United States Patent Application Publication US 2007/0054278 A1 - sequence listing, part 77

SEQ ID NO: 96191 - DNA, 13424 bp, Homo sapiens
  misc_feature (1)...(13424): n = A,T,C or G
ggtgcccagacctgaaccacacccacggggctgtccccgtgatttgaaggcctgggcacagaaagcagctcacgggtgtactgaagccagaggcgcggctgccgaagggcctgcctctcacagacaacactgagctacaccatccagcagctgaggcaggcagggccttctttggttcccttctgatggatgaggaaaccaaggcccagagatgctaagtgactttcccaaggccacacagccactggcagcagagccaggatgtcagccccgcctctcagctctcacccttcagccccacactggcccaggtggacactcactggccctgaggatgctgagggcccatgacttcttggcacccacagatcacaacctgttgtagaccttgaggccacagctaccccttctttgttgtcgagaccagcccatgcccagccagggggagggacccaggtgctagctctgtaagggtccctggcaagggcagcatgggcagtgctgggctgggtctgcggccctggaagcaggagcccagcgtggcctcgtgctcaaggctgcagtgctggcaggggcctgggacacctcctccaggaagcctcccagcctgctggctcctgcctcctctgctctgagctctggtgctgcagctggagctggcatggggtgccccagccctccctctctccctgagttctcaggcaactcttccccctgcctggagcccagccgcctgctccctccttccccacagctgggcctaggttgggaagtgctctcacggagcatctgtcctgggcccgccccccaggtggcaagggaggaagcccaccttccactcacccctgcccctgaaagcttttcttgcaccttgaaggtcagggctcggagggccccgtggaagcagccatcgctggagttggggtttgggtgcctcattgcctccaccatggggtccccaggatcttctcccagccccgtcctcaccacccaccgagccacccatgtgtaacgggcccatgccaggaaccccgcgctctagagaggatcaggggatgcccaaggtccctccgaaactgggcagcagcgggcctgggtgtgggcaggtggtggccctgtggaggccgggctggggtgggaccgagctttgaagtgaaggtggactttgaagacagaagggtgcgatttgagtcccagcgtgagcagccgcaagctggcagggccgcggggggctctggctctgttttccaaaaacacagatgggctgggaagggggtcagagagaggcctgggcggaatgtggggcccgcggcgcccccgaggttctgatgactcagcagcctgggccacacagggccacagggagcagagcctccccgaagcccacaggcctgtggacccccagggcttggcctcctcgaggccggtctccatccctggcaagggctgggctggctctgcctaggggtcacagccacccgggtttagacattctcagcccccctgggcgaggagagcctggcaggcaccacctacgttaccctcggcctgagggaccccgactctgacttagtccttgatccatgggcaccctgagatccctgctatcaacctgccttggagtggggactgtggggtgaccttttggtacagccccaagccagcttctaggggcagcctcggggacactgggaggcttggaggctgcctcagcagtccctggggtcagggagagggtctcccaacagcggcagatgggcaggaagtggggagtccaagcgaggtggggtgaggactggggccacctgggagcagaggagtgagctgaggacgcggaggagcgcgtgggaggccggcggggagcttggcgccagcacagcacggctgggccgcgagagggacgatggggtgccgcctccggccggccccactttcgaaggaatctgccttgctgttcctgcggccgaggccagaaacaatagtgggaggaagggcggagggtgcggaggcggcaccccagtgtgtcatctccgcgttcccagaccctgtctacccctgccctcaaacattctttccagagtggacctccctctcctcacggcgctggcggaggggagcgtgggaacgcactaaccctcagccgcctggaccccagctccaggccttcggtgcccccaggtcccagcccctgaagccccctcctcacatagaaaccaggactcgaccttctggcttgagtggctgagggagggaccctcctggccaccgctggcctccagcctcagtagcccccaggggccctggggaccctcagcaaaggccacagcctggtccaccaccggccacagtgggctcagccacgacgagggtgggacggagtccccctggtcttctcaccctagctctctgtgattctaggggctcgcaggtggggctcagagtccagccagaggctttcttggaatattagagacccagaacatttgtcccggccctctgagaaacccaggctggtgagaggctggcctgaggcttgacttaggggccgagactggacctgagcaggccgggggcctctgcagtgcccccaccatcatcatcagacagctcctctcattcctaagccccatgcccttcagagtgcccagcagggccccccacagcccccatagtccctgggagtgcctggcagggccccccacagcccccaagagtgtctggcagggcccccacaggccccacagcccccgggagtgcccggcaggggcaggatgcagctgctcagaccctgggtggtggccagaacctggacccgtggctggtggccggagtgcatcaaaagtgaggctctgatgccatctgctggtcgcacccgtgaatggcggctcctggccacattgctgggtgtggaaaggtgcccatcctggaaacagctacctcacagcctggctggagagagacactggccaacgttcggcccaagttctgcccagggctacctttcccagaaactcaggcttaaacactgcctgtcctggcctcagtctcttccctgggctggacccctgctgggcaccaggacccgaagggcagggggctaccctcagcaccgctgagtccacactcatccccccggggtctgctcaggcctggagagtcctggagacggaggacagtaaatatttgctgccgacaggggaaggcaaacactgccccaacggccaggcaaaggcgccagttatccatgccaggagcagacgcaatctagggggccagcctggaggcagccacaccgcagtgtgtcctgggtgggtgggagcacgtgccatgtgcctggctccaggcttcagtctctgcttaaggaatgtggtataagagtttcctccctgtgcagcatgtgtgaaggcaggatgcccagacagaaggctgtgtgcgggatggcatgcaggctgccctcggtcctccaggaatggacagaggcttctagaggggccagcaggtttggggagacttggggagcagctgccttgtgactggggagcagttagatggacccaatgccagggtgaccgccggggctggaggcagctgagtgcccctgccagcccggtgggcatgtgaaacccaggctccaaggccaggcaggtctctggacactgaagggctgtcttttagcttcccagaaggggtggagcatgggcagcagcccagcaggcattgcagagccaagctctgtgggcctggctcacatggggtgacctgggggctccgggagcatgcacactccccgccagggcatctggggaccggcacccaaggtggtgcctgacaggagactgggtctgatgctgcctctgccacctggatcaccttggccaactgcttctcattgggcctggggggatggaggggcgatacctcgccctggctgtggtctcccgtgtccacgttttccaggacacagtatatgaggggtggggtcaaggcgctggcgaagacaggcttgggggacagagtcctgggtctcaacaaggtgaaagctagccccagctctggcccagggcagccgagggcaccgcgaaccatggctgcatctcttttgggtgggcggccttgccctctcctgaggcctcaggtcagaggtcccccaggacagaagtcacagaaaatttggcccctcaaaagacactcctcagcccccagcaccagccagtgccagctgccctgcaagtcctggaaggctggggcagctccaggagtccctggacaccaaagggctcctcctgctgccctccactccaacacacggtcccccacagagcactgaccctcccctcccagaaggggcctctgcccatcactccctacggccttgttggccatcagggtcagccagggcaacagcttggccgatggctgactggtgggcagcctcccagccggcccaccgggccccgctttggcccagccccgcgcgagctcacatacctcagctccagcagggcgcccctgtctctacccgtgcgagtggggccggctgggtgttcccatggacggctgctgccgatcccagccaccgcctccctcctcttccggggccagtgtccggccgtccacccgcctgcccagccttggcccccactctggaggcggggctagctgggggctgtgacatctctgggtggaggggggctgatgtggtcatggggaaggggtgagctcagagcttcaggaacagggctgccccagtggccaggtccccagctggagggtgagctcctggcctcgaggcccaagctggcagtggtctgcagccacagcccatgccagccccaggcccagccatccccagcccagccctgggtggagctctcaggaaaggtgcagattggtttggcctgggtggcaggcagactggcccagccacagggtagctagggtcacccgctgacctcccaggccacagtaggcccaggcagcccctaggttctcgtctgcccactaggctgggtgcccagcggagccaccctgtcctcaggggtgctgcagaagaggctctgtgtcaggacccccaaggacctggagccacaacgaccttgtcaccagggcccgtgggcccttctgggtgagcagcaggtctgtagcaaaggaagccagccaagcagccctgcttactgggagggggtgggctaaggggctgcagggggaccctggccctggtctctgcccctgtggccctggcggttccctgcttctcctgggctgcaatcctcagggcctcatggccggggtgcccaaggcatgggttctgaggccctgccaggtgctgccacggtccctgcacctgccccagctcatggtgccatctgacctctcctgcttcctccaaggcaccagtgggtccctcaggtgtctggctggacctgggctggcataagctgtggctgcagacggctgccagcttgggccgcgaggccagggtgtgtgactgtcccggggctgcccagagctggggatagcgggtggctctcggcagcctctccccaccttcccagccccccgccctgcaggaccccctccctcagcccagcctcctccctccacagggactccatcagaaataactctaaaaatagaacctgggagggctaggtggggggaaaattgctggaatgttctcattccctttcctgaacaaggtctctggggactccaagagtccagagctactgaacaagaagtcacttctcagtggccccaccacccctggcccctcagagacccccgcagctcccatactggaccctgagccacagggtgggggcagcaggcagccgacaggcatggccgctttggggagagccactgcatgctgggcctggccggcgttggcacctgtgggcacccagagagcgtggagagagctgggaggggctcacaacagtgccgggaagtggggcttggcccagggcccccaagacacacagacggcacagcagggctggttcaagggctttattccatctctctcggtgcaggaggcggcgggtgkggggctgcctgcrggctgcgtctagttgcagtagttctccagctggtagagggagcagatgctggtacagcattgttccamaatgccangcttctgcagggacccctccagggccaagggctgcaggctgcctgcaccagggcccccgcccagctccacctgccccactgccaggacgtgccrcgcagagcaggttccggaacagcggcgaggcagagggacacaggaggacacagtcagggagacacagtgcccgcctgcccgccagccctaggtcgcactcccacccatctccagccgggctggacccaggttagagggagggtcacccacagtgggtgtggacctacaggccccaacgcccacatgtcccacctccttcccccgccccggggcagcgtcacagtgggagcctgaacaggtgatcccagtacttctccccagggcctgtccccagcatcttccccatctcctgactatggagctgccgtgaggcctggcgacaggggtctggcccactcaggcaggcagccacgccctcctccgggcgtgatggggtgttcgcccagaggcaggcagcgtggggcaccctgtgaccccaggtcacccaggactttacttaacaaaacacttgaatctgcggtcatcaaatgagggtggagaaatgggctgcggggcatttgtttgaggggcgagtggagggaggagcgtgcccaccctctgatgtatctcggggctgccgaagccaacaccgtcctcaggctgagattctgactgggccacagggagctggtcacttttaggacgtgaccaagagaacttctttttaaaaaagtgcacctgaccccctgctgggtggcagcctcctgcccccttctgcccatgctgggtgggagcgccaggagcagggggtggctgggggcggccaggggcagcaatgggcrgttggctcaccctgcaggtcctctgcctcccggcgggtcttgggtgtgtagaasragcctcgttccccgcacactaggtagagagcttccaccaggtstgagccgcacaggtgttggttcacaaaggctgcggcygggtcaggtccccasagggccagcagcgccagcaggggcaggaggcgcatccacagggccatggcagaagracagtgatctgggwgacaggcagggctgaggcaggctgaaggccaggtgccctgccttggggcccctgggctcacccccacatgcttcacgagcccagccacgtcctccctgctgcagagctggggcctggggtccagccaccctggaaccctgagcccacctgacgcaaaggcccttggaacagacctgcttgatggcctcttctgatgcagcctgtcctggagggctgagggctgctgggcccccgctggctttatagtctcagagcccatctcccctacctgtcaacccctgccgcctggcccattagggcctggggtgggggggtcggcagatggctgggggctgaggctgcaatttccggaccatttccctggtgctgggtctgtgggaagatctccttggtcgtcagcacctcttcctcaggaccagcgggtcattagagtcttaaccaggggcccggtggccagacctgtccctgctcacagctgggggcaaatgtctccaggagagcaaagccctcacctgggccactttccacattagaccaggagagctggaggctgcagggcggggctctttgcgctgctgtccccagacccctgtccccaggacccctgtccccaggacccctgtccccgggacccctgtccccacacccctgtccccacacccctgtccccacacccctgtccccagacccctgtccccaggacccctgtccccacacccctgtccccaggacccctgtccccacacccctatccccaggacccctgtccccacacccctgtccccacacccctgtccccacacccctgtccccacacccctgtccccaggacccctgtccccacacccctgtccccagacccctgtccccacacccctgtccccacacccctgtccccagacccctgtccccacacccctgtccccggacccctgtccccacacccctgtccccagacccctgtccccacacccctgtccccacacccctgtccccagacccctgtccccacacccctgtccccaggaccctgtccccggacccctgtccccaggacccctgtccccagtcccggatggcccaagatgccgccatggatgggccaaggtggtgggggtgggagagtgggagtgagggaggggtcccctccctgctggctgcctagttcccaccctgccttaggacagcagccccagctgaggccctcagctccccagggtggcagaaggagggcatgacctggggacctggggacaagcagcaagtcctcagcaggccactcggacctcatcttccgtgtgatctgggggtggcggcaggactctgggggtgggcaggtgtgggaagctgtgcactggcccagctccgtcctggccccccaggcaccctctcagcccccactcctcttctgggagcccatctcccctctcctggccaggtcccatgacaccatcacccccatagtgtcatctgggctgagcccctggggtacacccctccggccctcccagctccccagaacaggcacctggaggtccagcctgacccatggtgagggggcatgggctccgagccctgctgcctgcagcccctacctgcctcttagcaccaggggcaggatcaggaggtcccagaagcaggaggatgagaccatgggggcaggcaggttggagtatcctgtgccccggcccctcgcatccctatgtcccaccctggcctcagcctcggaacctctcggggccgctctgcacacacccagcctttggctctcctgccccgagcgggtttggtagtgggcaccagctatctgcaggacccctcccttccgccctttccaccctgagccatgccacagcaggacatgcggtggctgccccaggacgccacagtgctctgaggcccggcagctggagaggacatgggtgcctccttgagaggagtgtgtagggagggaggctggatggggggagcccaggtaggagggcagagccaggcgctggcagggccggggggaggcaaggcaggcacttccccagggcttcctgggggctcacagcccttcagagacacccccagctgcaacctcaggggctgggcactaacaaggtgtgtgaggaacagactgccaggctgggaaggaccaccatgcccaggagggccttcgtggatgagtaggagtttgccagtgttgtcggccggggagctgagatccaggatcccagcagcgtgtagtggggtggctggagggaggcagagaccttgaaggccagctggtgtcccagcaccccctgcaggatgccctggggctgctctctccaaggtaggaaggggacaccctggccggtcaagcctggagggtgttgggtgctctctctggagggcaatgtccaggcccctcgagtaagccaggggcatcttacagagtctgaaatccagcccccatcctgcctcgctggggagacaggcccagaccatctgcctgggcaccagctcagccagaccctccccatcagcacacatgctgggggccacactgaggttccccttggttcgcagggcctgctccgggtgggtgagggcatcagggcagctgttcctccatccctgtttctctcaagggctgggagccctgtcagcagggagggttaggcctgcaggcccacctctgagaccacccccagccagcacagtttgtgacccctgctcccttccaggcctgagagaggccctcccactgtcacgtggctccccaccttgggagggcaccccacggagatggggcagctcggccagggtgcccgagcctctggagctgcttggggctcagagctgggcggggcctcagggtgagcggggaaaccaggcccggaggggccagctgcctggccagggcggccagccatctcccagaggaggaaggaggccagggcgaaacctctgagtgaggctggggtgggggtgtgggagtctgaggatcccagggtctgtctctgtggcacagatgtggggccaggcaggtgtagagaccacagtttcttttattgtgacggtgattggggcagcagacagtgtcagggaagggcggagggcagtgcagcagcccccaggaccctgggagccaggacaggacctcaccacaggcagcacaacctcaccacgggcacacacagctgttgcgctgagaagcaggtgcaggggcagtgggagcctggcagcagggagggcatggggggcacccgggacccagcccctcaccagggcctgagctccgggacagtgcaggaccaggggaggttgggaagggccctcagggacgccgtgcacctagccaatggcactcagcgcatgggcaagggtgtccagctcatcctggacaccctccagggagcgccgcacggcctgggggctgtccagcacgtcgatggccagcgtgtacgggtcgaacttcacggagaaggggcgctggatgcgtgaggcatagctcctggggaggagagcggcagagccctcgtcaactggcgggcagagtctgcagcctccaggagaggggaggccaggggccgcgtttccaccttcacagtggctcagagctcccagggcttttctgagccaactggtcacaggcgggacactgaggcctcttccagggctgggtgagggggttcatgggggagataggctaggcgccttttccactagagactgccgggcaccccatccctccctgaacctccactgggcctcctccaggaagctttccttgaccatatccctaagcctgtgggtggaattcagcacccctgtccgctggacacatagcccctggcctcagtttccccagtgcataagaggctggagggaaaatgatgagaccttttatgaggatgaggctagagggctttgctcccctctcctgacactctggtcactgcaccaaaggcccccagccctggggaccccactcccgccctgtcccccaccttgactctgtctatccccctgacttctccccatcccagggcagggggccgggacaggttccacaggacgtcctcacaaagctcaggctctgtcagcacctccaagactggccttgacccggccacccagcagcccccagtcctgtaggtctgcccctccccagacgctggggtccttctcacggatggtgtccctgctgtgtgggggctgctgcagccaggggtcggttttctcatctgtgacctgggctcacaggtccagccctgctcaaggccagaaggaaggcctggctggcccagtttgggggcaccatggggggcttgccctagcagcctagcccacctgagcttgtccttggcgtcactgaagctctcagacacgaagtagactgactggtacgtctggtcttggtagggctgcacggccgcagcctcagggtcgaaggcccgaatctcaggctcctcagacaggcagtgctggcaggaggccaatggcatcactgactccactgcacccaggtccccgagggaactggggcaccgtggcctgacgctgggtgggttccttgggtagagtcacccccatctcccccgccgggccttcggaggcctgggataatgtggggtgaggactgggcagagacaagccttctcccaaacagagcctgagtcctggaggtccaggcctcagtttcctcccactgggagcctgtcccctccctgcaccgtcccccagccctgcccctctgctgggggctgcagcaaggagagactctcaccaggagctccccgtaggaggacagcagcccggcaccataggccttcacctccccgttctgcttacacagcccgaactccaccgtgaaccagtacagctgcggggaagccgggcagcatcagcccagagacagctgccgcccaccgggcagcccctggtcacccgtgaccaggacaccacccccagggaggccaggccaggatgcaggcaggccagggtgagggtcacaattcgtgggtggaaggagaggcctcagcctggacggcaagagggtgaggcctggattcagacccccaaacccacaccccaggccctgcagggaggggtcaacccaccgtggacagcttctcaatttcctcatccgaggcccccagggacgccaggccaatgtcctgtggagcagggaggatgaaggatggggagaggcagccctgggtcatgctcgaggtgggggcaccgggggtgtcagcagcccctccaggggtctctgggacacttcccgggcggcagagaccttccctggccgcccaggatccgcacctacaccgggcctcctccgccaggcagccctccttgaccatattcgtaagcccgtgggcgccgttcccaggtagccggcaggtggcagcacaggccgtgggaggctccgctccagccccgccctatgccgcgcgaccctcggggcgccgagcctccttggcggggcccgggagcaggcagcacacttcacccacccgcacatcgatccccgcccgcccccggcgccaagccagcccctgggtgaccccggctccctccgaggccgcggcgtacctgcgagaactgcgcgaaggtgcggtcggccagcatgggcacgtgccccagcagctcgtggcagcagtccctgcgcgtaggagggagaagggggctgaggggccgcccgtcgcaccccccaccctcgggctggcggccagggcgcgcactcacggctcaggggagtgcatgggcgaggacgcgtggcggatatactgggtgcactggaacacgcggaaggccaggctggccaggaagtcccgggcggacagcaggccggccacaggccgcagctggaagcccgtgcgctctgcaaggggccacgcgggtcactgccgagccgggacgggctggagccgcgctggggtggggcgcttggctgaccatccccggccccccggctctgcgcccctcccgtctgggcacacccttcaggaagcgggagacgtcctccagctgggggatattgtcttcccggtagccgctgaagcgctccagcaaagcaaaggcctccaggtgctccccgcaggcgtgcgtggcgtagaggcccttcagcgtggtgtagacctccttcctgcgggcagccaggctcagggccctctaatgccccaccccagtgcccgaaacccccctcctgaactgtgggtgcctctgcctg

SEQ ID NO: 96192 - DNA, 241749 bp, Homo sapiens
  misc_feature (1)...(241749): n = A,T,C or G
cccaaggaactgaagagtgaaacttcactcttgtcacaaaaaatgatcagatttaggcaaataacttcctactcttgctacatagcccagagacttcagcaatcaagtatttttctttattttgttttgaagaaggttgaataaaatttgtcatttattcatgttcttctatggtcattttccctgtaaatctatgactttctatagctacaatcattttgcggcatagacaatctaattattttcatttatgcctacattatacattttccacatttcttctaagttttcatcatctctctttttgttcttttttttttttttttttttttttggcagggggaacagggtccccctgtcacctaggctggaatgcaatggtgccacatcagctcactgtaacctccacctcctgggctcaaggaatcctcctacctcagcttcctgagtagctgatactacagacacacaccaccacaccctggtaatttttgcattttttgtagaaacagggttttgccgtgttgcccagcctggtctcgaactcctgggcccaagtgatctgcccgccttggcctcccaaagtgctgagattacaggcatgagccactgcgtccagcccatcatctcttattttaaacagttttatgaatataatttttcaatgtatataggaatcaagacatacggtaaataaacatagtttgttttttttaaaatcaggtagtttgatttcatctcacctaaatatggatctagttttcaagaaactaatgccttcttactgctcacatcatccacctctcccaacagtggaatcagctcatttagacacagcaaagaacattccagaaacaacactagaaaaaagaattttcccatgttcatgaaaagggtaaatcataagtataaatctccttgtgacagagatgaggagataatagcattggagccccgagcattatcttcccatccatcagagaagccggacccccacagccacatggcagagcctgtgcagactcagagatgctcacgacctaagtcacttgcagagtggagagtgaataatgatgttggaatccctggggcctatgaaaaggtacttctgggactagggtgattcatggtttcctttgtcctgctaagctcatgggtcccagaattacaatgtatcacctactcctggcttacttagaaccatccttaggagcctgcaaagcactgcttagaaccaattacattatttgcattgttatcatttttttggtagttccattagccactgactcgtataggatcacagaataatcttcttttatctagagagagagagaaaaaagacactttaaacgactccacagcatctcatagagaagccatcagaccagcctgatttggcaaaaacaagcctggtaatcaacagggaggtgaggctcttgccagttctcttcacatcctgtccatttattctctaaggcattgtaagggttagtcacaatactcatgtcaaactaaccctcaaagccacttaccctcatttctttctccatggctccttcaagcagagcctgtgagtgtctgtgcgtgcttaagtgtgtttgtatttgtgtgggttttggagtctgaagatctctgtggaatatgcttaatgtttcttctgaaaagatatcagaggaaaaaaaaagggtatttctgggcatcacgctgtcattccaactgcctgtctggttaactgtctaattttaagcctcattctaataaaagactttgaaaagctctgcttttatgatttaaaaggacattcacactaggatttagccatctgatatagcaaagtgagtggatttcagttttcaaaaggaaatgataaacatactgaaagctgtaattaaaattttccattttcctccaactctcttaaagccattgtcaaatttgaaatctctggcacccaaattcaaacctctagttttggaagaagaagacttcaatgcaaaagtgggatgaggcagttgaaatcgctttggtagaaacccagttccactggataagagcattaacattctgatgtatggtacatttgaaatatacctttggtcagagaacagaggtcatccaatttccctaagcacggagaattcatgtaactttgagaagccctgagtccacaacaggcaagtcatataatccagtgcagagcgctttagctcctaaggggccacatggagaagttgctgaggaaggcgtgaagaagtgggtcctaaagaaatattgaaaggaaaactttgatacagagcaactgggacaggaaagggtgaagacaagatagatataaatggtgaccaagacaatggcaactctactcccttgctattcaagccccaaaccttagagtcactctttttgttttgaattaatatttgtttagagacagggtcttgctatgttgtccaagctgaaatgcagtgccaattcacaggtgccatcccattattgatcagaaggggagctcaagagagggtgccacctggagcctgaggcagttcaaatgtgaagtcccggctacgggatctttgtcaataatgcagtcagtgacagagaaaagacaaggatgcatccagttgctttctacacagggatgctctctgggctgctggctggttggaaaagggaggtcttggggtagatttccccctggatatgtgggcctgaatttcttcagctaaggaggagtaccgaagttttgggatataggacttccaaattagggctttccaaataattgacccgctccatttctgacctggaccagttcacccctccttaggcaacctggtggtcgcctgctcccaggatgtcactatattgatgcggaacttagtgcagacacctgatcagcatagctcactgcagcctggaactcctgggctcaagcaatcctcttgcctcagcctccctagcagctgggactacaggcatgtgcgacctagctggctttagagtcattcttgacccagcttgtatctcacatgcagggacaagaaccaaggtgtgtggggcctgaagggtgtacgatacgggtagggctctttaaaaaaaaaaagaaaaatacaagcatatctctttctgggggaaaactttccaaaaaagattgaagcctcacagtagtagatccccctgccgttcatgtggccctcctcttggttctttttcatgctgtgatgcaatcatagctcactgctagcctcgacctcctgggctcaagcaatcctcccacctcagtctcctgagtagatagggccacaggcacagccaccatgcccaggatatatatatagtagaggagggtctcactatgttgtccaggctgattttgaactcctgaccttaagcaatcctcccacctcagcctcccaaaatgctgggattacaggtgtgagccaccacatctggccaggctctattttcacgtatgtcaagaacccaacatctttttcacctccatccttatcctcctggacccaactaccttcatgtcttgcctgaatgactgaaatagcccccaacatccatccatgtgggcctcccttgcccctttacaatggattcataccacagcaggcaagttcaatatgttccaggttggctcaaagccctccaaacctcgcttgtagtagtaatatataaagtccatatgcctgccagggttctgctctatctggcattcctctgcctcttagaccaagtttcctctcacctgttactcagctctcattacctaggatctctgggtgacctgggaacctgccaaacacgcttggtgtcctttgcctttgctgttcctcttttccagaatactttctcccggaatcttcacttccttcaggtctacacctcaacctcagcttagcagagctgcattcccagaccactccataaaaacagcagcaccctacacgccctatcctccctgctttggatttttctctaatgtttactctcgtttggtgtacatttctttactgtcttactctccccgtctagactagaagctctgtgaagggacacattctactgtattcaccgctgcaccctcattcttagagtgatgcctggcacttaacgtgtaggcatttaatatgtgtgtgaagaaggaagaagaaattacctaacctgggaaattagaatcatgatatactaatggaggaagataaattattttagggaagatggtggaattctttctggatgtcaagtctaaagtgacagaggaatttcttaaattattgttaaacattgtgaataaatacctattggttgatggagaaaaaaaaagccagctctagtagttacccaccgtgaataggacttaaaaaaaatttcagacctcgtttggtaaaaaaccaccaaagttaaaatgcactaattctccaatgaaactttactatcttgttaccttgtttgcctatctatctttactgtctttttttttttttttttttttttagacggagttttgccctgttgcccaggctggagtgcagtggcgcgatctcggctcacttatagcctctgcctcccgggttccagcgattctcctgcctcagcctcctgggtagctgggattacatgagcacaccagcacgtctggctaacttttgtattttagtagagaaggggtttcaccatgttggccaggctggtctggaactcgtgacctcaggtgatccacccgcctcggcctcccaaagtgctgagattacaggcatgagccaccacgcctggccaactacctgtctttactatctttactacatgtttgtcttcctttcttttatattcctaaaacgcatgaaaaccttcacaggctgcaaggaggatataatttctctctagaggaatcttcttcgaaggtgaacgtaattaagctggtcatttactctacttgcaatgttacttctcggtacaaggtagggagaaacccctggatcttcattctccaagtctctccaggaagaaatgaattccaagaggggagctccagagagggcgccacctggagcccaaggcggttcaaatgcgcagcccctttgggatcttcgtcaagaaaaggcagtcgttgacggagaaaagacggggatgcgccttggccctttctccacgggaatgctctctgggctgctggctggttgggaaagggaggtctgggcatgagggtctaagtttcttcagcttaaggttggggggtccccggagtttggggatacaggacttccaaattagggctttctaaacaatttccctgcagaggatcccctagcaaacggtctgatacttctgaggagcccacctcccttgcaccagctctccggtgataaaagttctgctttccaggctctaagcggtggccccgggagattcagtctgccctgagtccggcttctcccgctcgcggcgcgggttcaagctccagggggtgaaggcagaagtcaactgctcattcattcaacaaatatttattgcgcgcccgcttagtgccaggcaccggaggtgccccgagcaagaagccgctctcgctgatccgtttccgctccccaagtgtccggcgcgcgccgtgggagcgcagcccgcatccctcgcccaccggccgcccggcctgggcgtgcccggctcctccagcgcagccctctgtcgggagccggacccccgggacccagcctccggggtatcagccgggtggggagggcgggagaaaggcaaagtgccgccagcgtcaaagtcccgccggcccaggaagccgctccagggaagcgcgcgaggcggagccgcagtcggcccccgcccggcagagcgcagagagcggcgcgggcgggagaggccgggcgcccgcggctcggaggcggccccggcgggcggagggtgcggccggcgggagggactggggcggcgccaggaggggcgcgcactgctgcgctgcagcccggcccagcaggtgaccgcgggcggcgcgggcacgggcacgggcgcgggcggcgcggcgaggaggcggcccgcggagtccagcgaagtttggcggaacatggcggaagcgtctggggcacgcaggagcgcggsgyggcggcggccggagcccgaggagctgtagcagccttagtcgccgccgccgcggggcgaggtcgccgccatggcccgctggatcccgaccaagaggcagaagtacggggttggtgagtgcgcgccccaccttgtcccggcccgacccacgcggccaagttygcggacagcggccctgccaggtttgcgcagagcccggcggaggaccctggccgggggctcggcccggctgcgcagctctgggagccggggacggtaggagtcctctccagggagcgccgatggggaagtcgcccagggtttggggactccgagtgcttccaagtgcagctgagcttcgggaccgtaatcccgctcttgcatcccaatctccggcacttcacaccagggaaatgtcaacgcgaggggggcgcgcctgctgctcttttggggccgcagctctgtggctcgccccggtgcgcccagcgtgggtttcacctgggagtaggtgaccagcccgggtcggcacatggactggtgctcattgtcccagtgctttctgccccccgctttcgtaggttcttctcagacgccccttaagtgaggagttgagggtggaaagccgccctgccccctttcctccagagactgggatcttgatgacagttgtgagctggatggaaactagagtcgtggcgtggaagtgatggaagggacaggaagttgtggcacgggaagggggtggctggcccctggggctgtttgtgcgcactcatcccctaacggagcctgtctggagagggtgtaaggctgccttccggatcctgagtttcatcctggagacgagaagaggacattttattaaggaaactgtgccagaccccgtgctgggcacttggcattcagaacagcggtgctggagagccccgggttgtgcgcaggggttgctggtggtggtgctttggctccgaaacaatagatgtgcggggattttgacccaggtggaaagtcaggctcctttggctttttatcaaggattgaagttattgagggcctgtgggaagacttctgccctgaacggggtgattacaatggcagttagacctggggtgattccctacaataaacacggctgagtgtgttgcgaattttatcacttcctctcagatccattcatttggcctgtttgtaatttagtctttgactttactcccttactgaggtcctgtttttcctcacctcactggttaatgaagtgcagtctcaattaagagctactcaacgtgtctaggggcttttcaactctgtagccaggagtcagggttttttgttgttgtttgttttgttttttaacagtctcatatttactatattattcttaggttgtgatcctttatatatttattattttttgttttccctcaattcaaaagacattttcttttttgctcttaagttgcttttagaatcttagtctctcccttagctgcatctcagaaatgggtagagatgttgcttctgcctcagggctctttttttttttttttttggtttgtttgtttttgagacggactgacgagggagtctcactctgtcgcccaggccggagtgcagtggcgcaatctcggctcactgcaagctccacctctaggttccagcaattctcctgtctcagcccccctccccgagtagctgggattacgggcttgcatcactacacctgactaatttttgtatttttagtagaaaccaggtttcgccatctgggccaggctggtctcaaactcctgacctcaggtgatccgcctgcctcggcctcccaaagtgttgggattacagtcatgagccacctcacctggcccctagatgaaagcatatttacaatgcccaatcactacagaaatgttatcaactctaattttatcaggatkaaaagctcttttcaaaactattcagttgagggtaattaatgcaaacatgtttcaaaaatgtggtttttattgccatagtcctaggagcaagtataattgtttttaatattttgtttttatgttctggagtcagtttactgtgtcacttatcagtcaagaaaaatatttgggccaggtgcgatggctcacgtctgtaatcccaacaatttgggtggcagaggcaggaggattgcttgagcccaggagttcaaaactagcatagcaacatggcaaacgggtctttacaataaatacgaaaaaaatttagccgggcatggtcgcctgtgcctgtggttctagctactgaggaggctgaggtgggaggatagcttgagcctgggaggttgagggtgcaccgagcccccatcacgacactgcactccagcctgggtgatactgtgagacccgatctcaaaaaaaaaactatatatacatatatatacgtatatatatatatacacacacacacacacgtatacacacacatatatgtatatatgtatatacatatatatgtatatatgcgtatatgtgtgtgtgtgtatatatatatgtatatggaaatatgggtggaaattgtgtgtgtgtgtgtgtgtgtgtgtgtgtgtgtgtaaaatatttggattgcatttccagggcctaggtgttagggaaactgctccaggatataattctgaacacttatttcaccagacatagattctggtttgtctgggtttgacaaaaggacccacagttgggataaattaactgaagagagaaatctccattgcttattgctaaaactcattgtttttgtcacctccttgcttatgtttatgtcacctccctgcttggaagtctctcgtggtcaacaggataaagtctgagcctccgttccaaggttcctataatctggttcagcctatcttcagcattatctctcgaggcttctttcactagctctccaatgcagaccaactgcccttcccactgttgtgcaacataccctgcagagtccctcctttgggactttgctcccattgtgcctgtccctgccaggagtgccctcccaactctgcctcagacagctcacctttccttgagggctcaaatccattcctactcccttcttcaaatttgctatttgtcagactgtcccaaacctccttgcttcttcctcgcagttcctggactgtgccatccttgggttcagtgaatcagaccattgtggttttgtattcctagcactcaacaggtgtaccaggtattagtgcattcagtttgcttgtccttgatgttggggtgccgttctaaagtacactaacctagcttgtctggtaattgaatgcagttttttcctcttctttttcttcccattaggcataacatctcattcaccccaatatgagttgaattttgtttggttagatggaggaagggagagcctccactctgtctttatctctgcaagtaagagaatgagatattctgctgagaaaacaaggaagcatggagcasacagactttcttaaatatagttgggaaaattggctttctggacttctctaagtgtgtactggtcagatttggtttctggatgaaggaaccgtaggatagtcatgttgaagcatttggatgactcagagctagctatgactttgcctgttgtgctctaagaggagtgtgcctctgcagagctagtctgtgtgaggatagagctttggactcagtatgaattgtgcctgctgaagctggcagtcgctactgtcatattttatcttggtgccactcttggctgttcctgacatatcctagatgtttctacagggactgaaatgcagcctgtctgggctttcttagttcttaaacagcagtgttggctcaggctctagcattaagtggatctcaatggtttctgtgtgttatcaagtgaagtgactgatctatttgattctttaaacttatggtgctctagtaccccagtgttaagtgctcagtggctaagtgttcttccctggagacgtggaaaatgtgcttttttctcatcttttttctttctttgtttctcttttctctctcttttttctgtttgagcatatgaagatataaaacacttttaagcaaacattagtgataaatatccagaatagtctgattataaaaacatttatttttaagtttgcttccacacaagccattatgtaaagaatagccccagattaggttgactatggattctttgcaaagcttttttttcttttcttttctttctttctttttttttttttttttgagacagggcctcactccacagcccagactagagtacagtatgatcatagctcactgcaacctgccatctcagccttccaagttgctggaactgcaggtgtgcaccaccatgcctggcttaagttttttgattttttaagttttaaaatattaaacttttaaaataatcattttaaagatggagtctttctatattgtccaggctgatctggaactcttggcctcgtgtgctccttcagccttaagcctcccatgttgctaggattacaggggtgagccatgagcctggctgatttttttttcttttcttctgagacagggtctcgttctgtaacccaggatagagtgcagtggcaaaatcatggctcactgctgcctcaacttcctgggctcaagtgaccctccagcctcagcccgctgagagctgagagctacaggtgcgtgccaccacaaccagttgatttttgtattttttgtagggatggagtttcaccatgttgcccaggctggtctggaactcctaggctcaagcagtccttctgcctcagcctcccaaagtgctgggattacaggcatgagccaccacacccagccttattctttgaaaagtagctcattgttgcatgttgggatttgtgatcacatatatttttatgatgtaacaaaaggcagttttgggaaatattactagttagctcttcaggtgtttacttgtttaaagctctttagttgtttagaagcatctgacttaacggagtagagctttgaatgctgatttaagactgacttcagacttgggcttttgttgtgtttttgtttgcttatttgtttgtattttgagatggagtcttgctctgtcgcccaggctggagtgcagtggtgcaatcttggctcactgcaacctctgcctcctgggttcaagcgattctcctgcctcagcctcctgagtagctgagattacaggcgcacgccaccacgcccggccagtttttgtatttttagtagagacggggtttcaccatgttggtcaggctggtctggaactcctgacttcatgtgatgcgcccgccttggcctcccaaagtgctgggattacaggcgtgagccaccgctcctggcccagaatgtttttaaatgcataaagtacgatacaaagttccaagtcactgtagaaataaaaattaagtaaattacaaaggatagaaaatgaaaacagccgtattgaaataggccgtgaaggtgtttttcaaagttcgtgatactgcagtatatgtacttctttattaatgcataaagtaccaagatctagtgacaggtctaataactagcataattttgaattagtcacgagcatatatgatttttcaagatatctgcagtaaccatactatgatataaaaatccctgttttattggtgacagtatcacaggcgctagtagtgcaattgcggtttattggctacagtcgtaattaaagtgagtgctgaatgtcagaaaatagagatgtaacttttttcttgttcaagttcgtggatcctctggatttaacagattaagtatccttggctgaggatcacatagctaattagttacagtgccatctgagcaagacagtgatacttgttgaccacctctttgcacataacactgtaccggatattatataattataatgacccgaagaaggcctggccttaacttggtcatggatttttttttttttttttttttttttttgagacggagtcttgctctgtcgcccagggtggagtgcagtggcgcgatctcgtctcactgcaagctcygcctcccgggttcacgccattctcctgcctcagcctcccgcatagctgtgactacaggcgcccgccactgcgccaggctaattttttgtattttttagtagagacagggtttcaccgtgttagccaggatggtcttgatctcctgaacttggtcatgttttaacagcattgaggctaagaacaaaaggaagagagaattagtattcattgagaacttctcttgtgaggtaccattctgaaccctttattttagtatgttccagggacatgtggggtcttggagacacgttcagaatggggggggtccatgaaattaaaactttctttttgcaataatgctaagccgttattggcctgtttacattctcattctctcgttagtggagttttccagaggctttgcaaagtgcgatatggccaccgatggaatgcaggggcagctataaagacccagctgcctatagtgaagtcagacattaaagagacttycaaatatgcaaaacaaagccacgcttccaagtgtttttgtttgagaaaatagttctgttccttgaaaatatgtatttttacaaacatgtattggatttatcatagttattttaaattaattaccaactactttttgaatgtttcaatttgaatttctgatatggcaagttgtgatagatgtcacccacatagaagctctttggtggttctcagtaacttttaagcaagtaaaggggttctgagacaaacatttgagctgctttacctgttatttcattaaatcattgtggcagtgatatgaaatgctgttgtcccctgtttctgatataggaaaygaggtttgcagaagatgagtttctcatccatggccatataatctcactccaaaaacaaaatcttttttttaaaattatatatatatatttattatactttaagttctagggtacatgtgcacaacgtgcagttttgttacatatgtatacatgtgccattgtgtgctgcacccattaactcgtcatttacattagttatatctcctaatgctatccctcccccctccccccaccccacaacaggccctggtgtgtgatgttccccgtcctgtgtccaagtgttctcattgttcagttcccacctgtgagtgagagcatgcggtgtttggttttttgtccttgcgatagtttgctgagaatgatggtttccagcttcatccatgtctgtccctgcaaaggacatgaactcatccttttttatggctgcatagtattccatggtgtatatgtaccacattttcttaatccagtctatcactgatggacatttgggttggttccaagtctttgctattgtgaatagtgccacaataaacatacatgtgcatgtgtctttatagcagcatgacttataatcctttgggtatatacccagtaatgggatggctgggtcaaatggtatttctagttctagatacctgaggaatcgccacactgtcttccacaatggttgaactagcaaaaacaaaatatttaacccatgttgtgtttcccaagttccacttgttcatcgtcaccttggttttgccctgttcaggtaccactgtgtagcagcttcagggctattgctatacccatttccatctgtattcttttttgtttttcttttaagagatagggtctcactgtgttgcccaggctggagtgcagtggtgcaatctcggctcactgctgcctggacttcctgagctcaagcgattctcccacctcagcctctggaatagctggaactacagacacacactaccatgcctggctaatttttgttgttgttgttttcgtagacacagggtttcactgtgtttcccaggctggtcttgggctcctgggctgaagcagtcctcctgtcttggcctcccaaagtattgggattacaggcgccagctaccacgctcagcctatactattttctatgttatattttctttatattgtctgcttgttttcttttttaattttagcagttactgaaaaagaaagccttatctttctaccactacttgctgtagaaaagaaacaattgtaaaaatgaaagcaacaaaaataaaagcggtgtattagattctggctagatactgttgctgtcaagcctagagccccagacctgctttttcttcattaaaaaaggaggaagctgatacccaatggaatctttctcttcagtatagtgtccattctcattattcatggtarttatgttctatttagtcacagtgaacactgagttagtgaatactgacccgttgctcctaggggagaggcagggttcctgtgagcctctggtcacaagcttttcatcagccaatcaatacataaccttattttatgtgtgtttgtgtttaaagttaccttatttaacatatatagttggttcactaacattgagcccatggcaaaaagcactgtaactcatgcctgaatgaagaaacttatctaacgtgtatttttttttttaaggcacattacagcttttttttttttgcatttaggtacttagacagcactgtagcactatgcttgggaccattttaaatagaaaaatcaccagcaaaaagcacaaaaatgaggccaaatgtggtggttcacacttgtaatcccagcactttgggagactgaaacgagaggattgcttaagcccaggagtttgaaaccagcctgggcaacgttgtgcaaccccgtctctacaaaaaaaaatacaaaaattagctgggcatggtagcatgtggttgtggtcccacctacttgggaggctgaggtgagaggatcatctgagcctggggaggtcaaggctgcagttagctgtgatcgtgccactgcactccagcctgggtgagcgagtgagaccctggtcaaaaaaaaggcagaaaaataagagaaatgtggcagtaaatagaccctgaaaaagacacttgtttacaatatgttagctgaaaaaagaatgcagagcgtcaccttgctcacccttagctaggaacttgtgcaggagtattggttttaaggttccatgtatattttagtgagtaggtgaattcgcaaatatggagtctgtcaacaatgaggatctactgtagtttcacaaaacgataattgaagccgggcatggtggctcacacctgtaataccagcactttgggaggctgaggcgggtgtatcacctgaggtcagaagttcgagaccagcctggccaacatggcgaaaccctatctctaaaaaatacaaaaaaaaaaaaaaattagccaggtgtggcggtgytcacctgtcattgcagctactagggaggctgaggtaggagaattgcttcagcccaggaggcggaggttgcagtgagccaagatcaygccactacactccagcctgggtaacagagcaagactctgtctcaaaaaaataaaagataattgaaaatggaatcacttcctttccccatgtgtttgtttttgttcacakattggatgcagttgactttacttctagaaacattttcttctctagacttttgatcccatttctccacagttttcctcccatatccccaccctccatcctccctgccttccctccgytttgccacaactttaagtcttgccatagcctggctggcttttgkgtctcctttatctacctgatamcaagtgatctcatcccccgccttggctctcattcccattcatttgctgcagccttccacatggatagccccagaccccttccctgtgcttcggratcacatacagctgttcactgggcgtctcccagtgtttttcttaacaggcagtccctgcttccagaacagaagtttggatcctctctaaccccagaaccgcactttccccagtttcttgctgtctgtccagtggcccaggcagaacactaagagtcaccccacattctatctgtcatcaagtgcagtctgtccttcctccaaaatatgtcctcagattactgctgctgatgtttccatttcaatgcaagcctgcattagcgtctgcagggctactgcaacggtatttttttttttttcttttggggacggagtctcgctctgtcgcccagactggagtgtagtggcgcaatcttggctcactgcaacctccacctcctgggttcaagtgattctcctgccatagcctcccgagtagctgggactacaggtgcgcatcaccacacctggctaatttttgtatttttagtagacatggcatttcatcttgttgaccagtctgatcttgaactcttgacctcaagtgatccacccgccttggcctcccaaagtgctgggattacaggaatgagtcaccacgcccagctgcaatggtcttctaactggactccttatcacttttttttttttttttttttttttaagatgggcatcttgctttgttgcccaggctggtcttgaactcctggcctcaagtgattctcctgcctcagcctcacaagtgctggaattacaggcatgaaccaccaagcccagctaagaggaactttttaaaggcaagaacytgacattgccacctccctgcttccaccttcccattgcagttgggatggcactgaagttcctggtcatgccctccaggccctgtgggatcagacctgccgcctccctctttcccttctgcattccagccacaccagctttatttctggtttttgaacttgccaagctcagcttgactcaggaccttggcacttactcctccctcttatggaatgtgtttccctagatctttagatgtccggttctctggtcttccttcaaataatccctgcttagagagagccttctctgagaagaaccctagctgcatgatcccacctccttgctgacacctcacaatgtctagcccttttcctttatttatttgttagtgtttactgtctgtctcccatactagaatgtaaagttatgaggacacgaactctttttcatcagtgtgccccagcccctggaatagcacctggctcatagtaagtcctcagtgaatatatgctgtatgaataaatgaatactgaccccatcatctctttaaattcatcttgcttaccatcagcaggattttgcccacactttggaaaataccaccctgtgtgtatttcccatgagagaaacatcaaaggcagagagaaagggacattcaagtaatggagaaaatagatttaataaactgcataagcaaaagattacgtgaatcctgtggggtgggtgaggacttagaatcataaatgttgcattattagatggaagtgatgggatttgcttttttatttttgggtcattatttctggaggctttatggaggaaggggcactgcagacttggctacctggaaagaaaatgcttgaccatgtggtgtacagagtttaggaggttctgagtcattggttggtgctgtgttgagcacatgaattggaaaggaaagaaggcgcagtctcatggaagaaacaagacatttagattcatctgttatttcccatttctaatacaaggagttgagattccttacaaaaagagcatatgtactgtacactcaataattaaataaaaaatctgagaaatcacaagtaatttggagaagaagaaaaagtaatttagaatactggcaaggggctttgaagccatggttactcaaacattagtctgtctaaatttttcttgtggccatagctgtcatgtagccatcwtgttagctgaaaatatarattaatttgtgttttctcctcatctraatttcaagagacaaatcagtggggcttgaatgtaaggaatcaaatctcattgtacttaattttaccataamgcaaagtttttctaacttctagcttattgccagcagtattcaatgcaatgacgttataatgcaatgcatataaaagattttagtactttcaaaagaattaaaaaaaaggaatcatccagttctttggaatgagttgtagcggaattgaaccgtatgtctgtggtcaaggaacacatagtttgttcttcactaaatattttggctgggcaccgtggctcatgcctgtaatcccagcactttaggaggctgaggctggaggattgcttgagcccaggagtttgagaccagcctgggcaacatagtgagaccctgtctattatttaaaaaaaaaattagtagaaagaaaaatcgttttccccttcctcaaacaggtaaaatcacccagaatatgcctactctccgtggacattaaaggacataataagccctttgggagtcctttgactgatttataactacaccagcatacctccggaataatgggggttttattrtcaagctttataaaagtgttttttgagaaattattttgaggcagagatgtggatgagcacgttaattgtgtttttccaagtaatgtttgggccatgtcctctcagagcctgggctcactcaaacgattgtctgaatgctggcagccacttcccaagcaagagacagaagtgggctttgtctttcagaaagctctgtgccattgcaaagccactgttgttcgaatgggttcatggtcattatccaccttttcccaaatgtgccgtttgctctcatatttccacagctgattaaaccctgtcactatccacatcagataatagttggaccccaaagatgccctctctctaaggatcgtgtctttgtctttttttttttttttttttttttttttgagaaggagtctcgctctgttgccagggtggagtacaatggcgtgatctcggctcattgcaaccttcgcctcctgggttcaagagattctcctgcctcagccacccaagtagctgggactacaggtacatgcaaccatgccaagctaattttttttttttttttttgagacggagtctcgctctgtcacccaggctggagtgctgtggcgcaatctcggctcactgcaagctcagcctccctgtttcacgccattctcctgcctcagcctcctgagcagctgggactacaggtgcccaccaccatgcccggctaattttttgcatttttagtagagacggggtttcactgtgttagccaggatggtctcgatctcctgacgtcgtgatccgcctgcgtcggcctcccaaagtgctgggattacaggcatgaggcactgtgccggtgtctttgtcttttaaaacagcttgagggaaggaaaacacagtggagactaattccctcttgaaaataactctttgctgactcagccaaggtgcattagaatgcaccctcctgatgggtttgttacctgtatacctgcaacaagttgcatcgtatttgatttgtactttctgtgagcctggaacaatgcggctctcatgacccagccttccctgccagagaccagttataagacgaagtgacgaccagacacggtgtctcatacctgtgatcccagcactgtgggaagctgaggcgggtagatcacccgagatcaggagtttcaagaccagcctggccaacatggtgaaaccccatctcgactaaaaatacaaaaattagctgggcatggtagtgtgtgcctgtaatcccagctatgcaggaggctgaagcacaaaaatcacttgaacccgggaggcagacgttgcagtaagctgagatcgtgccactgcactccaacctgggcaacagagcgagactccatctcaaaaaaaaaaaatactaagtcataaataagactcagttgtcaaaatctaacagttttgccctcttgtatgtagaatcagaagatattaagagccggagtttgtaagtattacctcttggctaacaccctcattttatcagaagaaaaaaagccccagagacatcagatgacttacctaaaagtcacacagctagtagcaaatttttgtttcaacttgctgtctatctttctccttacttacaactctggagagggrtttgttaatcagatctccttaaggttggaagagtaaattctcccctctccatccaaaggggaagatgcctgtgtctcctgggttttttccaggtggaggttttgttataagtaaggtttggctgttaaatatcttcccttttttaagagttctaggaaggaagtgtgtttgaggaggtttgagcctgcaaagtggaagtgacactgtgggttgcacggtttggccactgacttctcacgtggtttcagtccttagcaccgtggtattgacatgacatcagttgcaaaattaataagtaatgtggcattgttactacatcacaggcatatttgagaatgaacatcactgtgttttgcaaagtaaacgtttaaggggtgaagaaagggtcatgtattgctaataaaggattatgttagtaacctggatgtgagagaacatttctactttttcagacctgtatttcaaataaaatgtgatgtcatcttctgaagacttaggaaaagtttgagtgagtaagcgccttctccctcagcttccatttccgctctgttctttttttttttttttttttgtgagacggagtcttgctttgttgcccaggctggagtgcagtggcaccatctcagctcactgcaacctccacctcctgtgttcaagcaattctcctgcctcagcctccctagtagctgggattataagcatttgccaccacacccggctaatttttgtattttagtagagacggggtttcaccatgttggccaagctggtcttgaactcctgacctcaggtgatcctcccgccttggcctcccaaagtgttgggattacatgcgtgagccaccacgcccaaccaacttctgctctattttctttgctgggagtggacagctttactctggaggaggagatgcagcctcttctcatgcagagacaatcactgtcattctccatcgggagcaaactcctgaaatggggcaatatctacccacgtggaaccagaggtgctggtgctggtgctggtgctgagctttgaacttccttcagaacaaaagtaaacagcaagttgcccttgttctttaccataagcagagaaggcctgtctatccaattgtgactgcatgatttgttttagatttgttaatttacattttgcagaatactgaggcacattttctgtgaacttatgtggttatatatactttcaatcagtggatactggaagcattgttatacatttgatgtcttttataaaagaatcctaagggccaaaaatgttgggaactttggagtaactgaaatggcaatgtgctgtatcttatcataatactttggagttcattgtgacttgaaaattccaattaaagttggtataacctctatcatgtattgattaaaaatgcacataccctttgacttagcaactcygtttctctgagtttatcttacaaatatactccacatgtggggaataatacatggacaaggttattcattatagcattatttataccaaaaacatggaaactctcaagtgttggctaattggggatggatttagtaatttatagcacatgcatacaatggaaaactatatagccattaaaaagattctgacgcagtgatagataaagtgttgacaaaggtgagagtggcatgtagtggttgaaggatgatcttttcaaaaaatgatactgagtcgtttgyttatctatactgaacaaaatgtatcaggacccctacctaataccacataaaaaattgattccagctgtatgaaagataaaacagtggaagctcttagaagaaaacataagagcacatttttgttaccttagaatagaccatctgtaatttaatacattttgctttctgccattcagttagttacttatgaccatctctttgttaatcaacaaaaaccaaatccaatattttacttcaataaagggcaaaataaaacatgcctgtgctggtctcatctctttataatcctactttttaaaacttgtataattacatcttattaattgtagtgttaatttgttggttgtttaaggatctaaatggctatttcttcttcttctttttttgtttgagatggagtcttgctttgtcacttaggctggagtgcagtggtgcaatctyggctcactgcaacctccgcctyctgggttcaaacaattctyctgcctcagcctcctgagtagctgggattacaggtgcatgccaccatgcccggctaatttttgaatttttagtagagacagggtttcaccattttggtcaggctggtctcaaactcctgacctcaggtgatccgcccacctcggcctcccaaaatgctgggattacaggcgtgagccactgtggccggcctaaatggctatttcatggtgaataaaccattagcctcaggcttcgtctcctctctctgtttgaagacaataaagtatgatgtaattgtattattttgataaggtaatatttagtcscatgacatacaaaacactagtagcattacataaaacaaagtatttcaatagtgaaagagaacatttatatacaattatttctatagtctaacagtatcactaacattacatgccttttaaaaaatatgtttgagttactgaagaagattgagatacagatgttgacttgtttagggcaacaggttaagctaactttagaacgctgattactacctttagtcctgcaggctgtggagccgggcagccaagccatgcttgaaatcagaatcgtcaaggtggatgcaagagccattggctgcagagtgaggttttggagagtagttgcttgtggctgggatttttgaagtccaagtctcctaacttttattactctttaccttgtgaagtcatataaggctctaagtcaagtaagacggaaggaataagattagcacacttcctggtacagtgggcagtacgtgatmgctatctgaaagtttgctcagtcgcagcctccctgacagtaccctagcctggcaatcaggtgcctttgtttgcagagtggggctgattaccaagtagttaatactggttggctcagaacctgtcctcaaagttcagaatagatttgagtatatttttgattttagagccttatggccagaaatggccttatcttgcaagaatcttcctgggaaaaaaacatatatatatatatttttttcttctctttgagacagagtctcgctctgtcacccaggctggagcgcagtggcacaatcgtggctcactgcaatctctgcctcccgggttcacgcgattctcctgcctcagcctccccaagtagctgtgactacaggcatgcaccaccacccccagctaatttttgtatttttagaagagatagggttttgccatgttggccaggctggtctcgaactcctgtcctcaagcgatccacctgcctcggcctcccaaactgttggcattacaggtgtgagccaccgcacccacccctggaaaatatttgaattcccagggatctctgggtgatgggactgttactttcttctgatcctgtgcttttggggtggtactcactcactggcttagaacagcctggaatcctaagaggaatggatgaatgaatgaattcacacacaacaaactaacggaaatgttttgagtcacgccaccttgcgtgtgaatccccttactgtggctaacccacctcactgttctgaggaagcccatgttcactgagcaccttttatgttccagggtcttgctgggctggatggtggtgaggatcacacagtagtcccgccttatcctcaaggcatgcttgaaaccacggatagtacccaagcttgtatatacaatgctgcttctatacaaatatatttatgataaagctgaatttctaaattaggcacagtaagaggttatcaacaataactaataataaaaaagaacaatcaacacaatatgccagtattaccactcttgcactttggggccatgattaagtaaaataagggtgacttgaacaccagcactgcaataccccrgcagtttgtttttgaatttttttatttaatatttttggaccttgagtacctgaagccacagaaggtgacacaggggacactaggagactactgtgtaagataaagagtctatagaaacacacatagaagcagtaggcagggattcataatggctgctttccttttctttagcttgataagagtgctaccaaatacatctccagtgtcatgaattcatggatgtgtgaccagtagctcttggccagccatttctggtcttaacacccagatcatcatagaatatgaggataggaatccactgatgacagaatcctgaatgactatcttatgtgcctgaaagcctgcctcaaagaaggctgatgtcttcttgaattaaagagttgcttgcatatagaatatactggagtcatttttcagaagatccttacatggcttggcagagggtggcatccagtttatctttggcggaattagatttgctgctcaagattgttttcaaattgtttgatagcttcagggaggtccactggtaagctcacaaattcagaaatagtttgaggctacagaagaattcttttcatgtttgagctgtgatctaagccaagagccttggaaattttgaatccgtcttatattttctttcctgaatgagaaatgggtatacttgctcagttccgattctgacaacatgacttatttcaaaaacaaatagctcactccgtgaagcaaaccctgtatcactctcctctggtgacatttcgattctgatacaatgtggtggcatggggatagattttagaccaggaaaagagagagcctctcatttgtggcccaaaagactcaattttaaagatcagattggaatctgtcagggaggacatatggacatagtgattttttcttttatttgccttttttcgcctctctttacttttggtttaatgtcttttaggacttgaggtacaaaatcccatgttgtggaggcattagctaacagttgtaaaaccttaggaaaagtacagcatctcagtgatcctgccttcctaaaattgctcctcaacaaatacagatggaggaaatagaaatatctaaaatgaaacgtgttctttcgtcttagatgtctttatcttcttgcttttatcagcagccttgagtgacaggattttatacttttggaagattagagggtttgtttgtttttcttgcagaaatagttacttataccatgttcatttatctgcctcagttctgagaattctttgccaatttttttaatagcatgtgtttggatgaattatagacttcatagaagtaacttcaggaattatcgacttcatagtcgatacaacataatgagaccctgtctgtactttaactttttaatacaagaaattttttaaaattttaggggcatttagrtttttgggggatagtgcatggagtgaaactaacagaagtattgatcccaggattaggaagttgggtttgtatttcagtctctgttacaggagtgaccaagtggcttgactctctttagcttagtttttccatctgcaaaacagagataatattttctattaccttctagattctcagagtgtgatgaattttcagttgttgaaaatttctgcaaatgaattaagcratgcctgttaggccacattaatggactaaaaactgctaggatctaaagttgacatgccattgaactttctgcctgaagacttactgaggaaactttgtctacaaaggtttggtgcaaagaaccccattactttatggccaaattttcttcacatgccgatggtaatccagtagtctttcttctaacttcttggcggctttcatatactcttcagactggctaagtcatacgttaataggaagaactaattttctctccctgaggctgaacttgtgatctttttcatctggtttccacttctcagatttccccaaatctctcagtcgtctttcccaaagtatttaaaggaagattgattttaacagagtgctatggactgaattatgtccctcacaaattcctatgttgaagcctcagcccctagtgtgatggtatttggagatgggtcctgggagataattaggtttagatgagttcatggtggggccctcatgaggggattagtgctttttttaaaaaaaattatttttaaaaatgtcttttattaaaaagttaattaaagtacagacagggtctcattatgttggccaggttggtcttgaactcctggcctcaagcaatcctcccacctcagcctcccaaaatgcttggattacaggtgtcagcccctgtgcctggtctcttcttttatgtggagagcgctctccctctctctygctcttgctgtctctcactctctctccctctgtctctctctttctgtctttctctttctctctctatgctatgtgaggatacaatgagagggtggccacctataagccgggaagagagccctcaccggaaactgaccatgatggtaacttgatcttggacttccagcccccagagctgttagaaaacacatttctgttatttaagccacatggtgtgtggtattttgttatggcagcctaagctgactgagacacagggagttgcgtgttatttgaaatacgagtccactgttgccagatcaaagttcaatctctgtagtttaatcctagatttttccctcctcttttacagggatttgaatctagtgaaagtaattcacatgcacatcagatacatgcctttagcagccttctggccttgaaaatcctgctgttgctgattcagttgtcagggcccaaatcagctggtgaactcatgagtttgcaggtctagaattgtaggtgtgggaaggggagagagacatgggttactgaagacttgtgcaaataaatgctgtgttcatcttcaccgattcaccaggtatctgagtaggaggtatgcacttagcacttggaatactcagagataatgccattgcacacttaattgatacttctcctaacacttaagagaagtggacatagattctgtttgtgggaagtttataatgaattaaaagaccccaagtataaagccataaataactccagggaaaggaaggctgaacatgaaaaaagttgcaaaaaaagtccagttggggttattggagtttagagaagcagagattattctaattgagggagttgaggaagcttcagggaagtagttgaactttatagagatggacatcaggtttgggaaggctggggacctggcacagcrtgagccctggccctaacgcagttatttgtggcaagtggataatgaggaagttgtccattcttgctgaagcaaagggtgggtaaagtggaaaagagggaaatgatatagattttgtcagattatggggagacttgtttaccttgattttttttcttcctctttaaccattcatgctgcaatagtgtgctggtaaactagctctgtagagtgggaggaaaaaacttgagtttgtagcattcaccaatatctgtggtgtaaatactcccacagtggccaatttcagaccagcagtggattaagagatagctcacagaattcctgaaaattcctgaaaatgtaacagttggcccttccaaactagtacaagtttgctccagtattctgtgaaaaacctgggctagttcctacatgacaaatagttacagtacctgcctgcccacagcctggatagaagacccagggaaggcctaggtagcctcgttttacaccatctaagattcctgtggccatcactgattgtccctggatggacacactacctagaggccattccgtagcctggacaatgacatatggtttgacgcaaagaagtaagtactcaatcaggttccttctcttgggaatttgaatgaggaaataccaatatgttttgccacaggggcaaaagctraaaggatgtcgtttgggagttgagttggtggcaacctgaagccatgtggaagccaatgttgtgaatggaaaccacaaggaaactgaaaaagctgattgatagagagaggggagcagatgtggagagaccctacagccctagagtggcccctgttcttagcagctttccaagtccaggtctaaaacatcccttttctgaggcaatttgagtgagtctctgttccttgcaataccgtggcatcactgaagaagtttatgtggcaactcagggtactttgcagagctttctatgaatgcagacatacctccttctatatagcacatcactttattgatcgaccataagattcatggtcgatcaataaagcaatggttcatgaagtttgatgaaagaagtttaataaaagaagccattgccatagcatagaagtgcaaggtgaggcagcaagtgctgatatagaagctgtggcaagttatccagaagatctagtgaagatattgatgaaagtggctacactaacaacatattttaagtgtagatgaaatagccttctattgtaagaagatgctgtctagtactttcatagctagagaggagaagtcagtgacgggcatcaaaggataggctgaccctcttgttaggggctaatgcagctggtgactttaaattgaaaccagtgctctttcaccattctgaaaaatctgagggcccttaacaattatgctaaatctactctgcctgtgctctataaatggaacagcaaagtctggatgacagtacatctgttgacagcatggtttactgactattttaagcctactgttgagacctacagctgagaaaaagaagattccttgattcaaaatattactgcccattgacaatgcaccaggtcacccaagagcttagatggagatggacaaggagattaatgttttcatgcctgctgacacaacatgaatactgcagcccatggatcaagggataattttgactttcaagtctgattatttaaaagaatacatttcatgaaatggtggctgccataaatagtgattacgctgatggttctaggtgtagtacattaaaaaccttctggaaaggattccccattctaaatgccactaagaatattgatgtttcatgggaggaggtcaaaatatcaatattagtaggagtgtggaagaaattgattccaattctcatggatgactttgaggggttcaaaacttcagtgaaggatgtccctgcagatgttgtggaaatagcaagagcactagaattagaagtggagcctgaagatgtgagaattgctgcaatctcttgataaaacttgagcagagaagagttactttttatgaatgagcaaagaaagtggtttcttgagatggactctatcttggtgaagatgctgtgaacattgttgacaaccaaggatttagaataatccataaacttgttgacaaagcagtggcaaggtttgagaggattgactccaaatttgaaagaagttatactgtgggtgaaatactatgaaatgctatcaaatagcatcacatgctatagagaaatatttcatgaaaggaaktatcaattgatctggcaaacttaattrctgtcttattttaagaaattgccacagctgccccagtcttcagcaactgccaccctgatccatgagctgctatcaatatcaaagcaagacccttcaccagccaaaaaattaagagtccttgaaggctcagatgatcatatgcatttttttagcaataaaatattttcaaattaaggtctgtacattttttagacataatgctattacacacttaattgactgtagtgtaaacataacttttataggcacaggggaaccgaaaaatttgtgtgattggctttactgcaatatttgctttattgcacagtctggaaccaaatccacagtatctcctaggtatgcctatatagcaaatttcttaagaatagaggacaaatcacttgcttctgattgaggttaaaatatgcccatgaccttcatttctttgccttccctccctccctgcactcctcccaaatgacttgtgaatattattttttcattctttttcattccagcagagctggtttggaattcatgatgttgaaagaatagccagtaggaacatgtggtggggtgatgttttgttggcatttaccattacagaaaatcacaagaaaattggagccattagcagcagggaaaggaaaatgagttctttatctgctgagggcatctggtgagggagggtctgtgaagatgccgcgggtgcactgctctagtatgaaatgccatttgaaggaggctcagagcacattagcgccgtcatccctgtctgatgttctcaccacacgcaagttcgtgaataattaaattgttaggaaggggaaagtcatgcatggcgggtcttgcccgaggctcaggcagacacacaatgaggtcgctactctgggagcccagtggtccaggatgccagtctggcagtgccagggaaggatgcttcctttcaataagcgaacattgtgagggagcggggtggnnnnnnnnnnnnnnnnnnnnnnnnnnnnnnnnnnnnnnnnnnnnnnnnnnnnnnnnnnnnnnnnnnnnnnnnnnnnnnnnnnnnnnnnnnnnnnnnnnnnnnnnnnnnnnnnnnnnnnnnnnnnnnnnnnnnnnnnnnnnnnnnnnnnnnnnnnnnnnnnnnnnnnnnnnnnnnnnnnnnnnnnnnnnnnnnnnnnnnnnnnnnnnnnnnnnnnnnnnnnnnnnnnnnnnnnnnnnnnnnnnnnnnnnnnnnnnnnnnnnnnnnnnnnnnnnnnnnnnnnnnnnnnnnnnnnnnnnnnnnnnnnnnnnnnnnnnnnnnnnnnnnnnnnnnnnnnnnnnnnnnnnnnnnnnnnnnnnnnnnnnnnnnnnnnnnnnnnnnnnnnnnnnnnnnnnnnnnnnnnnnnnnnnnnnnnnnnnnnnnnnnnnnnnnnnnnnnnnnnnnnnnnnnnnnnnnnnnnnnnnnnnnnnnnnnnnnnnnnnnnnnnnnnnnnnnnnnnnnnnnnnnnnnnnnnnnnnnnnnnnnnnnnnnnnnnnnnnnnnnnnnnnnnnnnnnnnnnnnnnnnnnnnnnnnnnnnnnnnnnnnnnnnnnnnnnnnnnnnnnnnnnnnnnnnnnnnnnnnnnnnnnnnnnnnnnnnnnnnnnnnnnnnnnnnnnnnnnnnnnnnnnnnnnnnnnnnnnnnnnnnnnnnnnnnnnnnnnnnnnnnnnnnnnnnnnnnnnnnnnnnnnnnnnnnnnnnnnnnnnnnnnnnnnnnnnnnnnnnnnnnnnnnnnnnnnnnnnnnnnnnnnnnnnnnnnnnnnnnnnnnnnnnnnnnnnnnnnnnnnnnnnnnnnnnnnnnnnnnnnnnnnnnnnnnnnnnnnnnnnnnnnnnnnnnnnnnnnnnnnnnnnnnnnnnnnnnnnnnnnnnnnnnnnnnnnnnnnnnnnnnnnnnnnnnnnnnnnnnnnnnnnnnnnnnnnnnnnnnnnnnnnnnnnnnnnnnnnnnnnnnnnnnnnnnnnnnnnnnnnnnnnnnnnnnnnnnnnnnnnnnnnnnnnnnnnnnnnnnnnnnnnnnnnnnnnnnnnnnnnnnnnnnnnnnnnnnnnnnnnnnnnnnnnnnnnnnnnnnnnnnnnnnnnnnnnnnnnnnnnnnnnnnnnnnnnnnnnnnnnnnnnnnnnnnnnnnnnnnnnnnnnnnnnnnnnnnnnnnnnnnnnnnnnnnnnnnnnnnnnnnnnnnnnnnnnnnnnnnnnnnnnnnnnnnnnnnnnnnnnnnnnnnnnnnnnnnnnnnnnnnnnnnnnnnnnnnnnnnnnnnnnnnnnnnnnnnnnnnnnnnnnnnnnnnnnnnnnnnnnnnnnnnnnnnnnnnnnnnnnnnnnnnnnnnnnnnnnnnnnnnnnnnnnnnnnnnnnnnnnnnnnnnnnnnnnnnnnnnnnnnnnnnnnnnnnnnnnnnnnnnnnnnnnnnnnnnnnnnnnnnnnnnnnnnnnnnnnnnnnnnnnnnnnnnnnnnnnnnnnnnnnnnnnnnnnnnnnnnnnnnnnnnnnnnnnnnnnnnnnnnnnnnnnnnnnnnnnnnnnnnnnnnnnnnnnnnnnnnnnnnnnnnnnnnnnnnnnnnnnnnnnnnnnnnnnnnnnnnnnnnnnnnnnnnnnnnnnnnnnnnnnnnnnnnnnnnnnnnnnnnnnnnnnnnnnnnnnnnnnnnnnnnnnnnnnnnnnnnnnnnnnnnnnnnnnnnnnnnnnnnnnnnnnnnnnnnnnnnnnnnnnnnnnnnnnnnnnnnnnnnnnnnnnnnnnnnnnnnnnnnnnnnnnnnnnnnnnnnnnnnnnnnnnnnnnnnnnnnnnnnnnnnnnnnnnnnnnnnnnnnnnnnnnnnnnnnnnnnnnnnnnnnnnnnnnnnnnnnnnnnnnnnnnnnnnnnnnnnnnnnnnnnnnnnnnnnnnnnnnnnnnnnnnnnnnnnnnnnnnnnnnnnnnnnnnnnnnnnnnnnnnnnnnnnnnnnnnnnnnnnnnnnnnnnnnnnnnnnnnnnnnnnnnnnnnnnnnnnnnnnnnnnnnnnnnnnnnnnnnnnnnnnnnnnnnnnnnnnnnnnnnnnnnnnnnnnnnnnnnnnnnnnnnnnnnnnnnnnnnnnnnnnnnnnnnnnnnnnnnnnnnnnnnnnnnnnnnnnnnnnnnnnnnnnnnnnnnnnnnnnnnnnnnnnnnnnnnnnnnnnnnnnnnnnnnnnnnnnnnnnnnnnnnnnnnnnnnnnnnnnnnnnnnnnnnnnnnnnnnnnnnnnnnnnnnnnnnnnnnnnnnnnnnnnnnnnnnnnnnnnnnnnnnnnnnnnnnnnnnnnnnnnnnnnnnnnnnnnnnnnnnnnnnnnnnnnnnnnnnnnnnnnnnnnnnnnnnnnnnnnnnnnnnnnnnnnnnnnnnnnnnnnnnnnnnnnnnnnnnnnnnnnnnnnnnnnnnnnnnnnnnnnnnnnnnnnnnnnnnnnnnnnnnnnnnnnnnnnnnnnnnnnnnnnnnnnnnnnnnnnnnnnnnnnnnnnnnnnnnnnnnnnnnnnnnnnnnnnnnnnnnnnnnnnnnnnnnnnnnnnnnnnnnnnnnnnnnnnnnnnnnnnnnnnnnnnnnnnnnnnnnnnnnnnnnnnnnnnnnnnnnnnnnnnnnnnnnnnnnnnnnnnnnnnnnnnnnnnnnnnnnnnnnnnnnnnnnnnnnnnnnnnnnnnnnnnnnnnnnnnnnnnnnnnnnnnnnnnnnnnnnnnnnnnnnnnnnnnnnnnnnnnnnnnnnnnnnnnnnnnnnnnnnnnnnnnnnnnnnnnnnnnnnnnnnnnnnnnnnnnnnnnnnnnnnnnnnnnnnnnnnnnnnnnnnnnnnnnnnnnnnnnnnnnnnnnnnnnnnnnnnnnnnnnnnnnnnnnnnnnnnnnnnnnnnnnnnnnnnnnnnnnnnnnnnnnnnnnnnnnnnnnnnnnnnnnnnnnnnnnnnnnnnnnnnnnnnnnnnnnnnnnnnnnnnnnnnnnnnnnnnnnnnnnnnnnnnnnnnnnnnnnnnnnnnnnnnnnnnnnnnnnnnnnnnnnnnnnnnnnnnnnnnnnnnnnnnnnnnnnnnnnnnnnnnnnnnnnnnnnnncaatatgtgcatacaatatgtatatatgtatacaatatgtgcatacaatatgtatatatgtatacaatatgtgcatacaatatgtatatatgtatacaatatgtgcatacaatatgtatatatgtatacaatatgtgcatacaatatgtatatatgtatacaatatgtgcatacaatatgtatatatgtatacaatatgtgcatacaatatgtatakatgtatacaatatgtgyatacaatatgtatagatgtatacaatatgtgtatacaatatgtatagatgtatacaatatgtgtatacaatatgtatagatgtatacaatatgtgtatacaatatgtatagatgtatacaatatgtgtatacaatatgtatagatgtatacaatatgtgtatacaatatgtatagatgtatacaatatgtgtatacaatatgtatagatgtatacaatatgtgtatacaatatgtatagatgtatacaatatgtgtatacaatatgtatagatgtatacaatatgtgtatacaatatgtatagatgtatacaatatgtgtatacaatatgtatagatgtatacaatatgtgtatacaatatgtatagatgtatacaatatgtgtatacaatatgtatagatgtatacaatatgtgtatacatgtatagatgtatacaatatgtatatatgtatatataatatgtgtatatatacacatatatacgtatatatgtgtatatatacacgaatgcaggagaaggtgatagcattgttcactttcctgttgtagggagagagagagakatatatatatatacacatacacatgtatacatacaatatgtatatatgtatacaatatgtatatatgtatactatatatgcatatatatgcatatatacacacaatatcatattagtgggagatttttaaaactagtttgtatttaaacaattaattatactgatgatctctggacaccttagtaatgaacaacttaaaaacggggaactgaagttaggggtttgagtcaccatgagtttactgaagttactacccctgggacttgccctgaccagtagcattcacttgttggagagtttgagattcttctttctgtgccagctgataccagcaacgcatgtgccagacatcaggcaaatagagttgttctaatgcctttagttccagtggcacagaagtcagcagtcaaggttgggtgcttcttgggtgggttatgttggtggagaacaatgtgtcaaagttggtgggaaaatattattgcccagaccagcacctgcaagaaggggaccatgtctgtgatttcagagagccatatggtagtttgagagggtgcagtatgcatgacattaatctaacattgaatcatgtagtgaggaaataattctttaaaaattctctttcagtatttctggtttcaccaaagagaatgggacatgttagtaacgactctctaacatttgcaatcccagtcttgcaggccactgcacctactaagattgttctttattaccttttattcaaagggaatggtgctggttttccaattactataaagaaatcaatttaaataatttgatttcaaatacatctaaatgatgtacttatgagaaaaacagtgaattcgtttaagcaaatagtaagcaaataagtatcacaggtggctgatgggactgaaatcctggaggcaggtacatgaacaaacagagcctgggaaatcctgagctaggtcattggtgtctctggaatttgttttcaagtgggtttcatgaatcttttcttctatgaaagttaaactttttaagattttttcagaatggttatgacctgattaagtgacagggactctcctgcctccgtggacaggaatggagtgtggaatcccagggtgccctcaggttggtcacacaggctctgattatcatagggcatccctgcagggcccggggtggccgcagagctcagcttctgtcctggttaccacacacatgccaccatgaccactgtgctcttacagttttatttcacgctgcttgcctccatagtgcctctgtgtggtgtctggaccttgccatggtccagggacagctggattgttacaagggggcatcaccaatgtcaccttagtggtggctaggagatgttcctagtccctgactagtaggatcttttaagtccctcctgtggtgtttatgacacgttcagctgtatgctgggggcaatggacaatgcaggagaaggtgatagcattgttcactttcccgttgtagggataaatctaacatagaaggaaacactaaccgatttgtcacaattaaggactgtcttgtgtggagcctctgtggcagtgctgtggctcttctagggagaggcttgaaggctagagcaggaagacaagtttccaggaagagagcttaggtggcaggaccttgaaggctgggtaacagaaataataatcattgtaatcaaaataatgcatgcatatactttttaaaaatccaaggagcactaacaggcttataatgtatcaagtaacactttccttcgtcttcttctcacccaaatctcactgatactcctttttaaagaggattcttttggtattcatattgatgactctaaacatgcttattttgctctcttgtgattcatcggttttaggcattatttactgacttccgctatctgttggtagacgagtatctgctcttctacctggctacttcccctcccctctgagtcacaatttttttgttaaattcacattccatgtttatgatattatgactatgcagatattcttggctgaataaaatatgtattatgaccctgagcccttccttgtacagttttctttttctggagttaataattgcttcatttctatgtcctccaatatatcccctctgataatctgtcagtggcatgtttttttattaaagacctcatccctggagcactttttctgttaatttcaatctggcatagtcgctctttatatctctgtccatggctatcatccgagacctcctgtcctcctsattttgggaccttccttttcctctctccattgttggattttgtctttccccttcttggtttacttatttgtttttctggattgcatcctgtagtaactctttgaggaaaggttccgtggtaacttttgagagcctaaatgtctgaaaatatctctattccacccttccacttccttgacagtttgcacatagaacttgaaagtgttttcccatgggaataatgcatatgtagtagtctgttgtcctctggggtccgtgttttttttttttgagacgttcacaaccacttttgactttctgtccccttcaactgtgacctggtttttctttctggaaggttctaaaatcttctctttatttttgtgttggcatgccttggtaggaatcgtctttccgttatttgtgctaggtattcattgattccagaaagttatgctctttacctggaaactgtcttgtgtcatttaagataatattttcttcttactcattttgtatattctttgtgaaatttctaacagatgttggtctttgggaattgaccctttagttttcttcttcttttttttttgtctattgtccttctctttgtttcacagacatgatatttcatcttctctgcaggtatcaatgatcgctttgatattattattattattttagtttttcctctaatacttgcactgcctctttttctgccaggttttgttttgtttcgtttcgttcctttcctttcctttccttttctttgtgtgtgtgtgtgtatatgtaggtgtgtgtacttcctgttagagaatttccccagtggtttcctggtccttggccgcttgttcctatataaaggtgagaaactgaaagttgattggatgctctgtgtatggctaggcatgttgacgggtggacttcacacttaactgccttttttgttctctttctctctaagactttcaaatgcctttatctgtagaaatttctctgtggcaattcagattctccaggaaaagattttctgatttcataccgaggcaggacacacctgctgctagggctctttgtctgcagcaggaggggctggggtcacagcacgtttcatgtgttctgttacccccagctctccacaggtaccgggtgtccctgaggccggaacatctctcattcagttttgttttgtttgtttgtttgagacagagccttgctgtgtcgcccaggttggagtatagtggcgcaatctcggctcactgcaacctccgcctctggggttcaaagtgatgctcctgcctcagactcctgggattacagatatctgccatcatgcctggctaatttttgtatttttgtagagttggggtttcaccatgttggccaggctggtcttgaactcctgacttcaggtgatccgcccaccttggcctcccaaggtgctgggattacaggcacgagccactgcgcctggcctctcattcagtttttacaggggatgaactttcctgtctcccgtgggagtggagaagggattgttatctggacctgtggagggggtgggtagggatggtggttatttgtcccatctctcaaatttccctgtttcttagcagtctacctctccagtctgtccctaactgggaccaagctacctatatcactttatttctacagttcatttttcagtcccccccattgttgggtatttagcttgtttgctgcttctcccagtttattactgaactttatgtttaatttgtcttgtctttctctttccaaaggaatatatctgataagtgaaattattagatcaaagaattaaaatatttaaaatacttgaagctttttaaaagcttcagctacattctgccaaatcttttttgtttgtttgttttttgagatggagtctcgctctgtcgccaggctggagtacagtggcacagtctgggctcactgcaacctccgtctcctgggttcaagcaattctcctgcctcagcctcttgagtagccgggattacaggcgcccgccaccatgcccggctgatttttgtatttttagtagagaaggggtttcgccaagttggccaggatggtctcaatctcttgaccttgtgatccgcctgccttggcctcccaaagtgctgggattacaggcgtgagccactgtgcccggcccattctgccaaatcttaaattccacttctgctacctaccatcatcatcatctccatcaccatcccatcatcatcatcatcatcattagttgagtacttacagggaccatgctgagcagttttcgttctcatctcatttaatcctcacaggaatcatgcataaagtgtacagttattcctcagattggcagaggagaaaatgaaggcttaaagaagtttaatgacctgtccagagccccagggttagtgggtgcttggagctgggacttatatccaggctcacctaatggcatagtaacgctgatcatatcagctccccactgccagggctatgctgacccatgccaaccaagactcaccttcagggcctttgagagtgargaagtgtgctctgaatcttaccttttctcctgctgtcagccctgcgagttaagagagagcattgctttttgctaggggtttttgctgtttaggacactctgttttctgtgaaggaaaaaggatgagttcgtgatctcgctttcttcatgctggtccactctgcactgttattagatagaacaatgctctccccaaggtcctggcatatgattaatgctttggtttgctttctagggtggctatggatttgtctttctttgaataattccagtattatttcaaacgggatctgagaggcagaccatactcttgagggccatgccttattacttatgaattgtttccaaaccctgtctttaaaataaatggaaatataattcagtgggtcatattatgttcacttctaggctggggggatatgagagctctcctaggagtcaggtggcctgaaccggcccctgactcagatggtcctttattttctgagccgttgagtaaaagcgtgtgatatgccccgtctctagctgtttcacaggagttccatgagaataagtaagaagatctctaaattcattcttttaccctctaatctgataggatgaagaccaggaatcataattattgccacattaacacacttagttagagcacattagaaatcctttcttcctttctaatctccctttcttccatctgttcctcgcctccatcaggggctcctggcagccctgggctgtgtgtcctcatcttccgcaagcaccargcccatggcagctcaatgagaccttcatagaggctgtcggtcctcagcatttccctgcctgcaagcagattcccatcatccagtgaggacaaagtatgtgaaatttgccaaaagtgtcttgcacgcttggtgcccttggcagctacstcgccagcagatgacaccccaagtaatgcccttcctaaagggcttctcaccctacctggagtactgcttgcccaggtgcccatgaagtgcttccatggaaagtcctggaaccgaggagctaattaatccatccttgcttgagcccagtggcttacctaggagccaagttttggaatatgtattcagggtctcagtcccataaataaagtacatgtgctggaatgttttatgattgggactattgatatgtgaaggtttttaaaaaaaatttttgaaatcttattttaaatatagagacaaggtctcactacgttgcccaggctggtcttgaactcctggcctcgagtgatcctcccaccttggcctcccaaagtgctgggattatagacacaagctaccacatccagccagaatgctttatttatttatttattaatagacaggtttttgctctgtcatctgggctggcataaagtggcacaatcacagctcactgcagccttgactgccccaggttaagtgatccttctacctcagcctcttgagtatctgggactacaggcgtgggccaccacgctcagttaatttttaaattatttgtagagatgaggtctcgctctgctgcccagcctggtctccaactcctgtcctcaagcaatcgtcctgtcttggcctcctaccatgctggaattataggtgtgagccactgcttctgggactggccgtgatttttaataccaccaacaatgggcataaaaaatgaaataagagcgagtgataagaatggtttgctattattgtcaagagaggtaacttacttttgtaacaaatgtgttgattacacatttacttgttaagatggatttgggcccttttgggtagatgattattttgttttattaaaatctctctgagattaaatttctgttaaacagcgagaccctgtactttatggatgaagcattgaattcatgacctgtcaaaactgaggctcatcataacagacagtttccctgaccatgctttgtactattttgtacagcacttatcacctccaatttctctgttttatttactgctgtatctccaacatggagaacaaggctaaattgcactcagttaatatttgttgaatgaatgaatgaggcatttttaactttatccttttttcatgctttccacgtttatatactatccttgagttccaaatctttgtttttgttttttgttttctttttctgagacagagtcttgctctcttgcccaggctagagcacagtggtgtgatcttggctcactgcaacctccgcctcccgagttcaagtgattttcccgcctcaactgcccgagtagctgagactacagccgggcaccaccacactcagctaatttatatatttttagtagagacggggtttcaccatgttggccaggctggtctcgaactcctggcctcaagtgatctgcccaccttggcctcccaaagtgctgggattacaggcatgcgccacagctcccggccttaatcatctttgtcatttctgtgtgtaaacaaatatctccttttcactatgtggcatatattatggacattcttatatccatgagaaaaagtgcaaggaagtgtgtcactctgaatcttactaacttgttgttggaaaaggtacaaatgaagtaagaacgcttcaactaggggagagaaactttcatttaaaatagttatggttgagggaagatggactgcaaattgtagaggctggcctgaggctcttctctgcattgaaagacatggcatcatattttcttcctataacacattagatataaaaacagccagaaaggcaacccccatgtgttttataacaaatcaaataatacagaaatgtataaagaaaaagttactgtgttcattggccccacctctgctctgggccaccctggcacccttctcaggagactgatgtgaagaaagtcatctgccctacagcttaaccatcaaaaaacctcataactcaattaacaaatgggcaaaaaacttgaaaagacgtttcttcaaagaagatatgtaaatggccacgagcatatgaaaagattctcagcaccactaagcagtatggaaacgcacaacaaaaccacaatgaaatatcacctcacatccattagaatggctgttatcaaaaacaaaaaacaaaaaccaaaataaatggtcatccaggatgtggagaaattggaactcttgtgctctgctggtgggaatgtaaaatggtgcagtccctatggaaaacattgtggtagttcctccaaaaattaaagatagaattaccatgtgatccagcaattccacttctaggtatatccaaaagaactgaaagcagggtctggaggagatatttttacactcgtgttcatagcagcaccattcacaatagcaaaacatggaagcaacaaaattgtgtacagatgaatggagaaataaaatgtggtctgaccatacaaaggaatattattcagccttaaaaaggaaggaaattctgccgtggtggctcacgcctgtaatcccagcacttcgggaggccaaggcaggcggatcactaggtaaagagattgagaccatcctggctaacacagtgaaaccccgtctctactaaaaatacacaaaattagccgggcgtggtggtgggcacctgtagtcccagctatttgggaggctgaggcaggagaatggcatgaacccgggatgcggagcttgcagtgagccgagatctcgtcactgcactctggcctgggcgacagagtgagactcagtctcaaaaaaaaaaaaaaaaggaaattctgacacatgctacaacatggatgaaccttgaggacgttatgctaagtgaaataagccagacacaaaaaagcactgtgtggttctacttatatgaggtccctagagtagtcagagttaaagggacccaaagtaaaaagggagttaccagggggtgggagtctggagagtgaatggggagttattgctgaatgagtgtagagttacacttttgcaagatgaaagagttctggaggttggttgcactacagtgtgaatatacttaacactactgaactgtacaattgaaaatgctttaagatggtgaatgttatgctatgtttattttacaacaattgaaaattaagaaaaaatactgaagtcatttagcaggtaaaataaaacaagaaaaattgaatctgtttattagttaaaatgaaacaaacatagaaataaattaagaaaaaagtaaaataaaatttaaaaagagggtagtatgtatcctccacactagtcttaatgcttatatgtgccaaatgtgtgtataggctgcttttttttttttttttttttttggacagagtctcactctgtcacccaggctggagtgcaggtggcatgatcttggctcactgcaacctccatctcccaggttcaagtggttttcttgcctcagcctcctgagtagctgggattacaggctcgtgccaccatgcctagctaattttttctatttttattagagacggggtttcgccatgttggccaggctggtctcaaactcctgacctcaggtgatctgcccgtctaggcctgggattacaggcgcaagccaccatgcctgacgttacccatgttttatttttttatttttttaattttaagttttttttttttcgagagagagtctcgctgtgttccccagattggagtgcagtggcgtgatctcagctccctgcaagctccgcctcctgggttcacgccactctcctgcctcagcctcctgagtagctgggactacaggcgcccgccaccacgcccggctaattttttgtatttttagtagaaacggggtttcaccgtgttagccaagatggtctcgatctcctgacttcgtgatccacccgtcttggcctcccaaagtgctgggattacaggcgtgagccaccgcacccggctcctccatgttttaaatccataccatggacatctttccaggtcagcaaatatagatctgactcactttcctttaaaaggtgactaattatctgtgggatgtgtgtaccatgatttatttcacgtttcctttttctgaaccttcaggttatttccagttttgttgccactacagtgttgcaataaacagccttattcatattaccattttattgtggttgttctgacttctgccgaatttcaaaaagtgttgctaggtcaagagtagtgccagattgtttttcaaaaagtccagagcagctcacgttcacaccacatctggtgagaagcctgactgccgacctcccaygagggccaggtactgtaatctgcaggtagaaaatggcttgctgtgatctttcaaacatatagttaggaagttgagtagcttttataaatttattacttgcattttttttggatgtgataaaagatagggagtctaattttgtttttttttcaagcaaatagccaattatacccatgctgtttattaaatcatttktccygctaaattaaaatacataattatatgcattttggatattttcttatttgattccattgatttatttttttatttctgtgtcagtgctagattgctttgggtatgtaaaccttatagaaagttccaatgtcttgaaagcaaaatcccttgccatttttcccttctcaaaatgttgtgaactctcagatactttttccttcttatgacgttttaaaccatttgttcagttatttaaaaaagtccaagtgaggttctaatcctatttaaatctaccacatataatctggtgtgtgtatgtatttgtatgtctcattgtgttttatgaataaagatatatcctcatctttgtcaagcaaactacaaagtattagataatactttctctagttttctaagcatccattaataatttatagtatggacatgaagatgtttttctgtgcttttgttgttgttgttgttgtttgtttttttgagacaaggtctctctctgtcacccaggctggagtgcagtggcaggatcatggcctactgcagcctccacctgccaggctccagtgatcctcccacctcagcctcctgagtagctgggaccacagacatgcaccaccacacctggctaactttttgtagagatggagttttgccctgttgctcaggctggtctcaaactcctgggctcaagcgatctgcctgccttggcctcccaaagtgctgggattacaggtgtgcgccaccatgcctggccattttctgtgtttttgaaacacacatttacttatttaatgaaaatagaacatcatatactaagatatttcagcatagttttgttccacttagaaaaagttatggcaattttatcagtaactgtctaacttaatacccatacatgatgcaggataggtgtgtccccaaattggggcttaacctgggagggttcttggcttcacttaggatggagttcaagggtgagccagtggtgttaaacagtgactttgattgaagtggcagtgtacagcagtggcagaggggctgttccttgtggctaccccataggcagtgtgcccacaatggcagctctggttctacagtcatatttataccactttgagttacagacagattaaggggcagagtatgcagtaatttctagaaaaaggattgtagcttctgtgtctttgggttgttgccatgggaagggcagtaacttccatgcgttgccgtggcagtggtaacctgacataaatatgctgaggcaagtctccctttaatttttcattttcaagctattttaaactatttttaaccttttttcacatgtttattcttccagatatattttattaccatttttgtgtcattttctaaaaaccttttttatttcatttggaatttaatttagtctatgttttatttagagaattgaactcttcgtaagattactttttttcctacaggaacatgatgtgtatctattttcttggttcttctttcaatcttttaaacaaaaaaaatttgtgggctgggcacagtgtctcacacctgtaatcccagcactcggggaggccaagacgggaggatcacttgagcccaggagttcaagaccagtctgggcaacgtagtaagacctcatgtctaccaaaaaaaaaaaaaaaaaattgtgatgcaagaattttacactcagttgaacttgaaggcaacgaaaagtcgcagatgcaggaaccagaaagaatgccacacatacgtttcttgacttaaacaaattgcttggagccaggtgcagtggctcacgtctgtaatcgcagcactttgggaggccaaggcaggcagatcacctgaggttaggagtttgagattagcctgaccaacatagtgaaaccccatctctactaaaaatacaaaaattagccgggcatggtgatggtcacctgtaatcccagatactctggaggtgaggcaggagaacctcttgaacccgggaggcagaggttgcggtgagctgagatcttgctactgcactccagcctgggcgacaaagctagactctgtatcaaaaaaaaaaagtgcagttccggtgaatttaagttttcatttcttttaaaattaagtcatagaaatactgatttacctttcttcagactggaagaagaaatgagattgaaaagaatttttcgtttctttgctttgaattgattgcgactaattgtatctcaaaaagaaaattttatttggttgcttacatatatatatgaagaaggaaaatatatcagagggtcattctaaccctctgatatattcatatttaataattcatagacctgaatgtttcatttgtttatttgattgattatcattccttcattgcataaaaggtaattggtcatttgtttttattcctccactgtttttattgttcactgtaaaagtataatttaatacagggtaaaatttattataaagatcactaatgtggcccttgaaaaaaatggttccagcttgctcatcctagactgcttttaattctctatgattttaagcaagctactttattcaggtcatagttttctcgtaagtgaaaactgcaattggatctagaattaccttcaataagaatcagcaagtatagagccagggttggacataaacagtctgagtccagagctggtgtgattaaatattatgtaatactgcagacctcttaatctctcagagattatgtttctttatctgtaaaacgaggactatgagctctttcttctctgctggtttgcatgaggctcacatatagtaatgcaggagttttgcaatgtcatctctgaaccaggagcaccagtggtatctgagaatgtgctacaaacacacattcttgggctgtattcccaacctactgaatcagaaactaggtttgggaccttgcaacctgggttggaggaagcctctcacgtaattccgatgtgtgctaaacgtcgcgaaccactggaataatacctatatgtaggtttgtgttaacgtgccatcaattatgtaaacaggtttccttttgtcattatgatcctctcctgcatacatatataaatatctgtctaactggtttttgttgttttaattaaacattgaatgcatgaagaatatttataccaggctgggcatggtgactcatgcctgtaaccccagcactttgggaggccaaagtgggaggattgcttgagcccaggagtttgagaccagcctggccaacatggtgaaaccttgtctctactaaaaatacaaaaatttgccaggtgtggtggtgcatgcctgtaaccccagttacttgggaggctgaggcaggagaatcacttgaacctgggaaggggaggttgcagtgagccaagatggtgccactgcactctagcctgggtgatgatgtgagactccatctcaaaaataaataaataaataaataaatttacaccatttgcgaagagtatgaagaagaacagtagcaaaagtacctacatatccctgtcaaatgaattgcaaacaacatgattctcagtatattaatcctatactcatgctcttccctaattgtctgacaccttggccccaccctggatgtaaacataccctcgggttagtgtgtttcatttcctccttttttttctgtagttttatcatccatacacatatgtatatgcaaattcatttcacttagttttgtaagacttggtattatatctaaaggcatcatcctgtgtatattttttctataatttttcaattctctctacattctgttagtgtcatgcatgcactcattttccctgccatatagaattctatatctgaatatgccataatttatttctccgttttcctttccatggacattaggggtgaatctcttttcaaagggctatcacacacagtgcttccgtgaactttcttggacatatttcctggtacacttgtgcaagtgtttctctggggcatagtcttcagattactacacttgcacttcgtgggaagaaatgcactttttatcataaccaagcaatttcatattgtttgttgtagtatagagaaatacaatggattcttatacattgaccaaaaaattaggccctgaaacctccctaaaaactcacatattagttgtagtaactttgtttttgcaaatgccttaagattttctatatagataatcatggtatttgctcataaacacaattttatattatcctttgtaattaatatgccttttatttctttttcttgccttattgcattagctagacccacccttaaaatgtgaaatagagcgattcaagcagatatctttgccttgtacctggtattagaggagcacatttaatatttaacagttcattatggtgttttctagatgtgtatgatggattttttttctactttgctgacaggtttttattatgaatagagatcagattttaccaaatgtcttttctatatctattaagatgatcatatttttttccttttttcatcataatatgttgggtgatgttgatattggaatgttcctcgggttatttagaggtgtgtgtttagttttcaaatattttgagagttcctaagtacctttctgatactaattggtaattcaattctattgtattcaaagaaaatgctttgtatgatttgcatccttttaaattaattaggacttgttctgttgcctgatctatgtcatttctgggtctttttctaaaagtctcttttctcctaactatgagtaatatttttcttcttctttggctacttggtaatcttgaaccagatgtcagtcatgaatttaatcctcttgggaggattctgcaatgcagaatgcaatkcaatgcaatgcagatgcaatgcaatgcagaacaaggctgagctagttattggaaaacgtattcaaggtttgcatttaagctttgttatgcaggaccaacacagcctttattctggggccagtttggctacatgtctaagtctatttgggatactataacaaagtctcatagactgggtggctagtaaacaacagaaatagatttctcacagttttggcagctcaaagtccaaggtcaaggttccagcattgtcaggttctggtgagggcagtcagrttctggtgagggcaaccttctgggttgcagactgccaacttatcactgtgtccttgcatggtacaaaaagggcaagtgagctctctggggccttttataagagcacgaatcccattcatgagagctccaccctcatgacttaattacctcccaaaagcccacctcctaatacctaatactatgggcgtagatttcaacataaacatttaggggtacaggagacaaacattcagtctgtaacactgcactaccgagtacttagtacccttctgagctctcagcccagtaccctcatattccaagctttctctactctggttgtgggatctgtaagctgttctcatccatgtgcgtgggttgggaacaatgcctcttgctcttttccagtgatttttttcttagcctcgggtattttcacacacatkcactgaccagtactcagctaaagacttggggaaccttctacacatctctagcactctctctgagcagccctcttctctctggttctctgccctgcacattctagccaccttgacccccctgaattctccactctcctggtctcagagtgaccactggctgcctgcacaatagcctggaaaccctgttcaagcagtaagtgcaggcaggtgtagacttcacttatctgtttctctcctctcaggtatcactccctgcattgcctgctgttcagtgtctgaaaaccaacgtgtcatgtacattttgcctagtttttaatgcttaaagcaggataattcatctggtccctgatgggttgcttccctagtccacctgggcaacaagtagaattgatatatgtattttttaggtagaaaacaaatcccaaattcaaactgatatttccaacccacgtcatcccagaatcagttaacctttttgattgtgtacttgtctttgatgctgaaagatcttggttccaaagacatgaccaatagttgctcgttgtttcttctcattttattcttaaccagaagagttaggtaaaacaccagctcactttactgatgagggaacagaagcctgcaaagattgaatcacttgccctagagtccaggatggtagttttttggccacattatggaaaatatcttcaatggcacagctgtaattttgttcgccttggtctatcacttttctttcttttttaaaattctagatattttttagtgcttcactttttaaaaaattttgttttatttttaatttttataagtacatagtaggtgtatatatttatggggtacacgagatgttttgatgcagacatgcaatgtgaaataatcacatcaggtctgtcwctttgaacttcacacacacacctatgtacacatgtcctatccttctgtttcctcactgcaatttcagtagggtgtgattctggagtatataaatacccaggaagttgagattcagttctaaaatcctcctgagtaggatccagaggttaaaggagtcaggccagagcttgtcctcagactggcccagggccggaagctgctgttgtacttgcattttttaggttgttattgtcaaagtaatgacttgtgtagcctggttggggatcattgcttttctcagtgaaatgtgtttgtctcattcatgtacatatagagaggataatcggtgacatcctcaactatcatttaaaagtgctttttctagattccacagtaacctctggcatttatcttcagattctctattccttagtgatgatttctgtctataacagagtcttagctcaacagagtcttagatgtgaccgtcttaatcttagatctgttcaccttttgtttcataaggatgtgtaccaagaagaacctgataaggagactttatttgctttggaaaagatgttctgggctgggtagtgagctgttttccttcattattaaagactgcaatagttgctatcagatttttttctgttttactttttcctattttgtttaataaggaagatattcattgagaaaaatggaggctaatagaactataggcatgaataacattagcatgtgtacctttgatattatatacagcctgagggtcctgtggtgagtacatggctgaggccatctttagtattctggataataccctggtttctcaatgaattgttgcagaaatgcttggaaggggcagcaagaaatggtgaatgtattaaaatactccccgcacctggtgctgtttcttaaaggagctctgtatttagcggcctgcaataaaatggctttgctctaatcaaagacatctgcatttcattgtccatcaaccattgccttggaaggaccattgaggctgatttgttcttgacctctccagtccttcctgattcactgttttcattgaccgactcccactggtttattgatgagggggtagtgtccatctttgaggatgtaggtgtcaccatgccctgaatgggaagctggacacggcgagaaaggggaaggagtggaggggaggagactgctctttactcactgtctgccaggtgttagtcatcattctggccctgcacaaattctcctttttgggcctcacaaaaccataggaagaatgtactgttgcctccctttttcagaggaggaagctgtgggaaaaaactcctatgattatacaccatagactttttgttctgtaattttgtttttgtttgtttgtttgtttgagacaggatcttgctctgtcgcctacgtagtgcagtggtacaatctcagctcactgtagcctcgactgctacaatctcagctcactgaagcctcaacctcctgggctcaagcgatcctcccacctcaccctctcgggtagctaggaccataggcacacaccattatgcctggctaatttttataattttttgagacagggtctccctatgttgcccaggctggtctcaaactcctgaggtcaagcaatcctcccactcagcctcccgaaatgctgggattacaggcgtgagccactatgctgggcctttgttctgtaatttcgaattgccttgtttctgctttcctgctgtaagcatttcatataaatttaatgtcatattcatgtaaatgatgtggcttctaagtcatcacttgctgccagtgaggcaatcaagaaacaatatttgagtttatatctgagaaatacccctccagttcaagatatttatctattcccttcacaaatatatgtaatctttaagatagagatttttttcttttcttttccttttttttttttttttttgaaacggagtctcactgtcgtgcaggctggagtgcagtggcacgatctcagctcactgcaacctccacctcctagattcaagcgattctcatgcctcagcctcccgagtagctaggataacaggtgcgtgctgccatgcctgtctaatttttatatttttagtagagactgggttttaccatgttggccaggctgatcttgaactcctggcctcaagtgagccacctgcctcggcctcccaaaatgctggaatgacagacatgagccactgcacctggccaagatagagatttctaaatagtaatcaatgcattgattatgaaatcctctcttctcctaaactatctagaaaatgaagttaagaatcctgtaagagcctgctcttatggagtactgttggtgagaagtagagctgatgtcctaacctgatagcctccgtcctggatgggtctgagcagagaggtggcgtgatggtcatctcattgtagaaagactgatttggaacctacttgtaattatcatcctaaaaccacagatttgacttcttggtgttatacctattattgaatatgattttcttgtccttatagtacagtgtaattacagagcataagaaaatgaaatctgtttggccctcttggatatcattgcaggaaagccaagatgaagatcaaagatgagttgtgcctctttagtttttatagaatgcatatctgaaactaggcagatcaagatcataatggaaaagaagaattgtaaccatcttttttttattttttttgaaacagagtctcactctgttgcccaggctggagtgcagtggtgcgatgctggctcactgcagcctccgcctcccaggttcaagcgattctcctgcctcagccttctgagtagctgggattacaggcatgagccaccacacccagctagtttttttgtgtggttttttttttgtatttttagtagagatggggttttaccatgttggccaagctggtctcgaactcctgacctcaacttatccacctgcctcggcctcccaaagttctgggatgacaggcataagccactgcgcctggccatagtcatctttggaatattatgaatgatatatgtctccaatgggtatctcattctgtgtttgctggatctttcttttgtagattctatcaggtgactaataaaaaatataatgtagctattcttcaggggattgtaatttgaggattcatgtaataatctcattcattagaaatattcattacttggccggactggatgtcccatgcctgtaatctgagcactttgggaggccaaggtgggtggatcacatgagcccaggagttcgagaccagcctgtccaacatggtgaaactttgtctctacaaaaaaattttaaaaattagccaggtgtggtggcacatgcctgtcgttctaggtacttggggggatgaggcgggaggatcaccagagcctagggaggtcaaggctacagtgacccacgattgtgccactgtactctggcctggttgatagagtgagwtcctgtctcaaaaaaataaaaaataaacataaaaaaagaaatatttattactttctagcctacagacttttcattgtcaaaactgatcactcagtttgcagccagtaagtctgttctgttggtttcttattgcataatcccaggacttcagttttcttctctcatgtaagcctggtttaaaagaaagagccaaatcaaagattcagtaaaatgcaaactattttgtcttgtctacttggctctgcaaaattatactttcctgttataaacagtaagctgcttagggaagaattccagcaatttgtctttcccagtgctgttcatggcagccagcgaggcaacgtatgtacagcaactcccggttcttgtttaatttcctcagtcaaaacaagagattgtggtggtgcctgccggttcaaaaatggcacatgtttcttttgcctcttctcattaccccgtgaatcagaaggcgttagaaccagagggctctttaaaggcaatcctgttttacagataagaaactgaggcctaggcttagtagctcattcaaggtcatgcattgtgtaagtggtaaagttgagtcttgaatccgttttgcttaccctgaggtttttcttggtttcccatttctctagctttctctataacagttattcatgttctagaaagaaactatgggmccactaagtgcattagctgtactctcattcttgaaatagcatcagactagcggacaatgtgatcaccagtcactgatgtgtgtgatgagaaagcttggtttgggaagtaggatggtcatttaaagagagaaatctaggctcttctctttgtttctgggctattccagggcatatcttcaccactatggactggcttggtcaaatgtgatgaatagaccagctttataacagctttgctgcttgcaagctgggtttaacccttctgagtctcagcttccgcattaaataatgtgacacctggcatccactgtatacaattactaagatatatatgaaagtaaactatgaaatacgctggaaatgtgaggtatattatgatatggagggcatactaccaaacccaagagttagaatgaatagatgacggcggtgattggaaatcttgtttgtgcttttgcccagagacatgaaacagattgtacaaacatcctctaagcggtgacttttcattccagtgaaaggcattcttgaagggatgtgcttctaacatgaatctctttgaaagcttaggttggagaggcagattctctcttgtgataaaccaaatggatggagaagtgattttagtaaccctttcttgagtgatgggaaaccacagcctctgctctggaggaaagcagaagtgtgtttgagtttggggaagaagtggtgaataactgaattttttgatggattttatagaagagataaaaatatgtgtttttaaaatatattcttttctgacatcgttattataccttgagtactttctttgggactaagcctgtgccttgtaatgagaaagacacaaaagtaatgtgtaacgagggccccaatcatagggatttccttctaattgatggcagacaattacacaagattgtctatgattaaaaacccaaactgcgctggaagggaaaattgttgtggaatgtcagagaagaaagagatccacgcaggtaatcgggagctagtagccatttgttgaattgcattgtggatgtgagatttggattgttacaaatcaagacaggcccttgttctaggcagaaacaaaccatggactgagctcagaatttaggggagaacataggagtcttcactggagagtaggctggaatttcgcagatagtggagacaaagacagataattacgggctgggacaattttggaggtattttgggtcaggcttagagatctaggttttaagcaaaccggtctttggtgtgtgcgtgtatatgtgtgtgtgtgtgtgtgtgtatgtgtgtgtgtgtgtgtgtgtgtgtgtgtttccagcagtccttggtaggtgtttgtgtttggagcttccagtgcaaggtgctgcctttgagagcttctgcttacttttccaatgaccggaaccaggaagaggtgaagcttggtcattacacaatgcattgtgactcagtgacctcactacttcctgttttcatttgagaagggggccaatggaagggaccatttcagtacaaggccatgaatagggagtaggagatgtcaaggatatgaggtctgccaaactagcaggcagagcatttgcgtaaaccagcagacgaatgaaggagttgaactccactggaatagcagcggtggcccagttacccatgagaaagtctaggaattgggaattactcctacttctgaatcgcgtgcgatttctcctaacctatgtcaccagccaatcctggttgtaaattcatagcctagtccataagctcaatagtaaaataaattccaacatactttgtccaggcttctgtgccaggagtgcaggagagcactacttggatgacttcctttatcaaggagaggccactggaaaacaggtggctggacgtgtgctccttcctgctcactgagaggttgactgtgatgtaagccaagctgcaggtgcagggtgcactgcaggcccagggaagagctgggaagagccgggaagacccaccactggcaatgtcaaggacgcctttcttccctgtgggatatactgatggactgagtgactatccattcatcagtgtggatggccactcatcaggcctgcagagatgggagccttatgggttccttggattgtcaagtccatggctagagctgaatctctaagggagttcttttttcctggaaagatgtagttccctcatcagtagagtgagggtaagaagtaaatctacttaaaaaaaaaaaaaaaccagcttccgtcaagtgtaatttatataccataaaatccacccgttttaagcatataattcactgatttttagtaaatttacagagttgtgtaaatatcaccgcaacccagttttaggatgttttcatctccccaagaagctccttagggccttttgtggtcaatcaccattccctcctcacagccccaggcaaccaataatctcctatattgccttygatagatttgctaaattctggacattttgaataaatggtgtcataaactatgtggtcttttgcatctggcttctttcctttagtgtaatgttttgaggttcattcacgttgcagtatgtgtctgtattccatttcttttcattgctgcatagtattccattgcatggatataccatactttgtgtatcctttcatcagttaataaattatttccattttgggggctattgtgaataatgctactgtagtggatttcagtggctgctgtgacaaattatacacttgatgtctcaagacagtgggggtttattctctcacagttctggagatgggagttaggaagtcaaggtgcaaacagggctgtgctccctccggaggccctcggggaggttctgttccttgcttcttccagcttctggtggatactggccttctctgacttgcagtcacatcagttcaatctcagcctccatctgcatgtcgccttctctcaggtgtgtctctcagctctctctctttctctcttataaagatatatgcgattgcatttaaggccaccctgataattcagggaagagagctcctctcaaaatccttatcattggtcattagaaaaatgcaaataaaaactgcaatgagataccatctcaagccagttagaatggcgatcgttaaaagtcaggaggctgggcacggtggctcacgcctgtaatcccagcactttgggaggctgaggcgggtggatcacgaggttaggagatcgagaccatcctggctaacatggtgaaaccccatctctactaaaaacacaaaaaaaattagctgggcttggtggcgggcacctgtagtcccagctactggggaggctgaggcaggagaatggtgtgaactcaggaggtggaggttgcagtgagccaagatcactccactgcactccagcctgggcaacagagcaagactccgtctcaaaaaaaaaaaaagtcaggaaacaacagatgctggagaggacatggagaaagaggaacacttttacactgtttttgggactgtaaactagttcaatcattgtggaaaacagtgtggtgattcctcaaggatctagaaccacaaataccatttgatccagtaatcccattactgggtatatacccaaaggattataaaacatgctactataaagacacatgcacatgtatgtttattgtggcactattcacaatagcagagacttggaaccaacccaactacccatcaatgatagactggatgaagaaaatgtggcatatatacaccgtggaatactatgcaaccataaaaaaaggatgagttcatgtcctttgcagggacatgggtgaagctggaaaccatcattctcagcaaagtaacacaggaacagaaaaccaaacaccacatgttctcactcataagtgggagttgaacaatgagaacacaaggacacagggaggggaacatcacacactggggccttttggggggtgggggtctaggggagggatagtattagaagaaatacctaatgtagatgacgggttgatgggttcagcaaaccaccatggcacgtgtatacctatgtaacaaacctgcatgttctgcacatatatcccagagcttaaagaataattaaaaaaaaaaccttaacttaatcaactcttttgccttacagggtaagatacacaggttccagggatttgatgtggatttcttttggccggggggcacctttacagcccaccactgcagctctgaacattcacataaggttcttatgtagacacatggcttcatttctctttgtaggtacctaggaatggattgctaggacctatggtaaatttatgtttaactttttgagaagttccccaactgttttcagaaggggctgtatcatgttacattcctaccagcaatgcgggagagttctagtttctccacattcttgccatttgtctgccttttcttttttctttatcatagccattctagtgggtgtggagtggtatctcactgtagttttaatttgtattttcccatgactaatagtgtcgaacatctcttcgtgtgcctgttagctattcatacataatttttggcaaaatatctattcaaagctctggcttgtcttaaaattgggttgtcttctttttttgagttatgagttagtctatcatttttcacaacccggcccagccattgccagccctaaagactgtggtggctgaggtcaccttgattaggaagtgctggggtaacccagttgcccagggtgccctgggctggggccaggcaccatcgttgcaccgtgccctgtgtcagtttgtcactggagggtggatgggcctcacaggtggccttttgccatcagatactgtgccatggaagccaggacatggctcgcctgtgtactagagatcatcagttccgtgttcttgcaggctggctgttgtctgatgaacaagggcactgactaacaaaatcccacaatatattttcattgtaactggattgtttctttcctaacacttatcacaactttaactagttatttctgtgattatatatttgatatctttcttccttccactcaactgttaagttccctggggacaggggccatgtccatgtgatttgcccctctatcactagtctctaacacagttcgtgatgtgtagcaggcaactgatccatatttgttggatgggggaaatgaggatccatttctgtgctttacagtgggcaattcacatgaaattattaaatagagagttgtttgttgaccgaattgttcactgtgacatgcattcttttttttttttttttgagacggagtctcattttatcacccaggctggygtgcagtggcgtgatctcggctcactgcaatctctgctgcccgggttcaagcagttctcctgcctcagcctcccaagtagctgagattacatgcgcctgccactacgcccagctgatttttgtatttttagtagagatggggtttcaccatcttggccaggctggtcttgaactcctgacctcatgatccacccacctcaccctctcaaagtgctgagattataggcgtgagccaccgtgcccagccaagtgacatgcattctaatttcccttttttatttctcatttccagcgatctataactacaatgcttctcaagatgtggagctctccttgcagatcggtgacacagttcacatcctggagatgtacgagggtaagtctggctggccttctgccagatgagggcaagggaaaaacagtgtaagttacttattaaaaaggcacttagagtaaacatcaacatgcttgacttcctgaaacagtgctagtaaaaattcaggaagtacttgggtgacacaattttgaacagagtgtgatttcaaaacagccagctgagtacatgagcacaaacttgcacagacaccagggtgaaagctcatgcatatgtgaagggtgctggtgtggccaggccacttgggcacagaaggatcagtgacagagctggctcgygaggagacacttgggatgttgggctggcagtagctcaaaggaagcactgctgattaagggtctctttctgttcagcactaaatgttcccaggttgggggagaaatgagggagagtctttctggtgttgctgagattcttttagaaaattaggtcatgactgcagcaggtccagaaagcctgattgtatatctccttcaactaggtcaggcgagggccgtggttccattaacctgttagtgggctgcggggcagtacttaggactgcctatttgtctgccaagcattggtcatgtctgtacccactccactgcaggcttccaacttcagctcaggttctctaaatcctagaagaagtcttcctccatatatccacatttttaatccaaacctctggagcacaacaaaagcatagccaggccactgaagttgaggaccaaaccaagaactatgtttagggtccagttattctctcagaaggttagggtacaaatgaggtggaaattaggcagatttgacagggaccgtgcattttccgggtctagcccccatgtaaacccttgtgatggtgaaacggcagagatggtccgcgaggaccccgtgcaggttcctagggtgggatgggatgacacaggatgagaaagaagagatgggaaggcaggaggaaaggaagcaggatttggccacagaacagctaaattatctgcatggttgcatggaagactctgctattactgcagcctccctttagtttttggcagagggctggggtttcacattatccttttcccttccacacaactcaatgtaatcatgtagctcccaggggcagagagaagacagagagggctgtgtgaactcttccctttttctttctactgcttattctcaccatctcaggcccagccaaagcatcaattcaaagtctccaagacactagggcagtcgccttatcttttccagaatcttttgcttatggaaaccacagctcttccaatctttttatttatttatttattttttgagacggagtctcgctctgtcgcccaggctggagtgcagtgacacsatctcagctcactgcaagctccaccttccgggttcatgccattctcctgcctcagcctcccragtagctgggactacaggtgcccaccaccacacccagctaattttttatatttttagtagagacggagtttcaccatgttagccaggatggtctcgatctcctgacctcgtgatccgcctgccttggcttcccaaagtgctgggattacaggtgtgagtcactgcgcccggcctacagctcttccagtcttatcagctcatacctcttttgtcaggaggccaggttaattcactttgtctagcctcaatggatgcatattttcctattgtgcaggtaaaaagcatawgttcaatttttctaactcttccatgtgggcttggaaagaatgtatatttaaggattattgggtgcaaagttcttttttttttttttttgagatggagtctcattctgtcrtccaggctggagtgcagtggcacaatctgagctcactgcaacctccacgtcctgggttcaagcgattctcatgcctcagcctcctgagtagctgagattacaggcatatgtcatcacacctygctaatttttgtattgttagtagagacggggtttcatcatgttggccagcctggtcttgaactcctgagctcaggtgatagccccatcttggcctccccaagtactggaattacaggtgtgagccaccatgcctggtggcaaagttctatatatggtaattaggttctaatttctgagtcatttttcaggtttgctatatgctaacttttttttcctgctttctctgttactgatagaactgtgttaactcttccaccatgattgtagtttgtgtctctttatggtgatgtcagctgtttgctttatgtattctgagacttgtttttaggtgcctgctaatttagaattgttgtgttaaacagttctaacttttaattcctatttattaaacctttatcattgtcttactctgtagtaacatgctatgtcttactctgtgttgtgtaaaattgcagccaactcactggcaagtcccagggcttcaatttttgtcctcctggctccacaaggccatcagaaatgctgctcagcttctcagccactcaggaatcctttctttttgttgttgttgttgttttttgtattttttggagacagagtcttgctctgtcgcccaggtggagtgcagtggctcaatcttggctcactgtgatctccgtctcccgagttcaagcgagtctcctacctcagcctcctgagtagttgggattacagacacccgccgccatgcctggctaatttttgtatttttagtagagacagggtttccccatgttggccaggctggtctcgtggccaactcctgacctcaggtgatccgcccaccttggcctcccagtgttgggattacaggtgtaagccaccgcacctggtcaggaattctttcttaaatcagcagatggatgccccaagcggaaagcagccccagatgctgagctggtctttttaggttttggtctctttcagattttgacctggtaattcttcactgccatgttagtttgtgtgtgtgtgtgtgtgtgtgtgtgtgtgtgtgtgtgtgtgtgtgtgkcgggggcggggtggggcagtgtatatgtttgtgtgtgttgttttgtcaagcttttctaattgtcctacagagtgtgggagggaagaatggagacttggtctgaaataaagtaggtaatgtcttttgttttttgttttttttttctttgagacagggccttgctctgtcaccctagctggagtacagtagtgtgatcataactcactgcagccttgagctcctgggctcaagctatcctcttgcctcagcctcccaagtagctgggattataggcatgtgccaccacacccagctaatttatttatttattttaatggacacaaggtctcaccaagttgctcaggctgatcccaaactcctggcctcaaatgatcctcctgcctcagccttccaaagtgttgggattgtaggcataagccatagcacctggcccaggtgatacctttaaaatatttcttcaaattttttttcatttttatgtgacctcagcgtatttctaagaaatagttaattgaaacactttgtcctgttagggttcatatcaatagtaattttaaggatgagtgtggtggctcactcctgtaatcccagcactttggtaggctgagatgggaggatcccttgaggcctagagttcaagaccagcctgggcaacatagtgagaccttgtctctacaaaaaatttaaaacttagccaagcatggtgacatgcacctgtagtctcagctacttgggaggctaaggtgggaggattgcttgagcctgggaggcagaggctgcagtgagctgactacaccactacactccagcctgggcaacagagtgagtccctgtctcaaaaagaaaaaaaaaagtaattttaagtgtctcactatactttaccaagagttctccagttggcctataaacattcctcaagacagcatccctatggaccaagctaagggggtcactgagcttagttgaatataaatataatcacagatacattcatttcaaataccatgcacttgagtccaaacagtccaaaacccacagtgcttctagtatattacagctcacactacgatatgcttgtaggatgtgctggcccatttgacagtcacacaaaaatggttaacttcttcagttatggtgatccggatgctgtagtcctgcccgcaagaaaccgctcttcttaactgctaccataacatttttgctgcgtcagccgtagaactttttcatctcaaaggacgtcagtgcctgttctttaaaagtaagcgcatgtcaaggcgtgaaggggagggaggttgagaacacttgagcctgcaccgtgagcttactgagttcattaaccaccaaggggcaggtcagcttgacagagagattactatattggattatatttttcattagtgtttattttctgggattaatttttaaaatcgtgcctaccttgccagatgtcccatgataggtccttgtatctgctaagcacttagagttcttggcttgattctcaaattcctttattatttaaggcagctcgaggcaagggccggagtgctttgcaaacatgaaacgcgatgggaatgctgagtaatcacttgtcttctacccctcttctcctagtccytcttaactttagaaaaataaacacaatgaaaacaccgacagtcctgccgggtggaactgaagggtgacactggcactgtattgtggccctgggattcgtgtcttccagcttcctgtcggagctgactttggggcgctccctctgcactctgccccaccctgccctcgagatgtctgcataccagatctgtgtgtgtttttccagcgtggacatgaatccacccagacatgaaacattttttctgcccaccgcccgggacagaatactatttttgattctcctttttctgtttcctgccgtgtggttggctgaaaaatttcagaaagtattggctccttgaaggcaaagcctgttcctccttcatctgcagagcctgtgcctccctagctcctggtatacggcaggtgctcagcaacaatctattgaatgatgaaggtaaaataggagaccaaggcaagctggtgtagagagtaagggggtcaggggtcacctccacaaaaccctgggtattacaaggcagaggtgctgttccttctctatgagggaaatacagggggtgctaatgttttttggtcctctgcaattataggaggatttagtcattgctgaagtttttgtttttattttatttatcttttttttagagacagggtcttgctgtcccccaggctggaatgcagtggcataataacagctcactgtaaccttggccttttggactcaacggatgctcctgcttcagcctcttgagtagttgagactactggtacatgccaccatgcctagctaatgtttttaattttttaggagaggtgaagccttgctgtgttgccctagctggtctggaactcccggcccttagcgatccttccacctcggcctcccagagtatagggattacaggtgtgagccatcrtgcctggccttgtgggtttttttgtttgtttttaataacagctttcttgagatataattcaaataccaatcaatttacttatttaaagtatacaattcaatggatatttactaatgcagagggttgggcaaatatcatcactatctactttcagaacactttcatcatcccataaagaagctctgtacccatcggtagtcatgcctcccctggctctaggcagcttcaaattcatttcatgtaagtggaatcacataatatgtggtcttttgtgactggctgccttcatttggcatcaggacttcatctctctcrccctctctcttgctctgttggtcaggctggagtgcagtggcatgatcacggctcactgcagccttgacctcctgggctcaaggaatcctcctactccagcctcccaggtagctgggactataggtgcacaccgctacacccagctaaatttttattctttgtagagacagggtctcgctatgttactgaggttggtcttgaaatcctgggctcaggcagttctcctgccttggcctcccaagggccaagtgtcccagtgtgttgggattataggcatgagccactgcacctggcccaacttcatctcttttcattgctgagtaatatgtattatgtaggtacattatattttattcattcatcagttggacatttgggtcgtttagatgtttcagctactgtgaataatactgctgcaaacatttgcgtgcaagtttttatgtggacatatgttttcatctctcttgggtaggtacctaggagtggaattgctgggtcatagggtaactcaatgtttaatattttgaggaactgccagactgattgagctttggctccaaaacaggcgaccagagtccagatgaacgagcttctatccatcatcttttttcactcatttgactctctggccttgcccctgaacttcatttgttgctaaatgaaggaaagaagcagaactgactgagaagctatctactgctcatccgttacaggtctccaggaattatttgtctttagagactttatcaggaaacagaattccttaaggactgaagcgagcgttcttgcctttcttcatctttggcactggcttgcccacagtcatttttgtgtctttgcttcttttactgtggaatgtatttggcagcgaggtagctgtttattactgtgaacgttcctttccaccccagatccatggcagaaagtgcactgacttctggagatgcccggccgtgaggtcatttattcattcaacattatttgctgagcaccaagtatgtgccaagtacatttattgagcatgagagatgttctgggtactctgtggtctcttaagtgacaaaatgcaagttcctgctctcatagggtttacattggagggatagacaaaamcaagtaaacaaagtaagtaaacaaaacaattcagatatgtgcttacaaatgctatggggagaagagggtggtattgcagaggccagaggtggaggacagcgatggagagggagacggaagactattgtaggttggtagttttgtccttgtctagattgactgtccctgggcaagatattgcagctgtctttgtgacaaggacatttcatctaaattggagtcactttttgagtcaagagtgatcaaatgtaagtgctttgaaaagtgcatagtaccttgtatgtgtcaggtttcagcatcctgttaccatggagctcccctctcctgtgattaacgtcactccagtcacaagtggttttaggcctggagtctgaggttcctctagtgctggtttcctgtgtttaattcatatccatcgattaactctttttctgctccgtaaaccactcacaagctcacgagaaagggcggctggtatgctggtgttagcagtgatttctggggtaaatacaacacaattgaccgctgttggaacaaacacaacgaaatgtctcaaaggtgagctgaactgtacagaggcaggcacagcacatattatttcagggcaatttgtaaagactcgaaggatagcacaaatgcttggactggaaccagaggaaacaggcaaacctgaaaagttaaaagaaacaaaaagaagggtttgtatacgtacaggagttccccagaatacccatgttatttcttctatatagaagaagtctagtttttgaatgcactttaatcaaaaaatctacttccctctaatatgaaaaggaataaaaatgtattaagacttgagctgtatgtgttttgaatctcatttttataaagcaggcctttgtgagtagggacagtgggcagtgttatgacaggtaagttacatggcaatgaattttgtctgcatgtttgccaaaactttctaacagagatataaaaaagaagagagtgggctgggtgcggtagctcatgcctgcaatcccagtactttaggaggctgaggcgggcagatcacatgaggccaggagtttgagaccagtctggccaacatggcaaaaccctgtctctactaaagatacaaaaattagccgggcatggtggtgtgcacccataatcccagctacttaggagactgaggcacaagaatcgcttgaacccgggaggcagaggttgcagtgagctgagatcacgcgtgccattgcactccaacctgggtgacacagcaagactctatctcaaaaaaaaaaaaaaagagtgcttttaaaagatttttttcaaacagaggcttaatcatcatcctttagagatgtggtaataggaaccctgcattggattatgatacagtatggtatctaacgttttgagaatgtctgtctgattgtcacattctgytatgctctatgacaattaattctgtaacactgaaatctctttattgttcctcctttctacttgtttctttctctacttggtcatccatgcacagtggtcagaagccaagagagagacaaaagattcaaaattgctgttaaaaatcagttcttaatagaatgtgtaaaagtttactggatataagcttcaataggggtgtccaaggtatttgtaacttccgtttacttttgttacccgctaattaaaataattgaaagtttattgtaattcaaaatctatatagtctccacgatctaggtatagaaatactgcctttctcatacataaatggcagtgagcctaacagcttggattttatgacgctgcgtgcaaatattttggcattagcctggaaagcagataaggccatgtggcattttgttgagtgtgcttggtcacttcccacatctgtttgacctttaccttaagtacagcttgtgagctactactgctggtgacatatgttcctgagatgtgtttttcaaaagatatgtgtggcagtaggagggtgtttaccagagaaattaattaaaaggagtgtcagtgaaaagtcttatctcggatttaatctttaaaaaaagcgaatgccttctatttttccttttcaggtatgtttcagtatgcttctaaaattctaaaattccatctttatttatttttttgagacagagtgttaccctgtctcccaggctggagtgcagtggtgcaatcttggctcactacaacctctgcctsctgggttcaagtgattttcatgcctcagcctcccgagtagctgggattacaggcacgtgccaccacgcccagctaatttttagtagagacgtggttttgccatgttggctaggctggcctcaaactcctggcctcatgtgatctgcccaccttggcctcccaaagtgctgggattgcaggtatgaaccaccaaccctaaaattccatctttaaaaatgtacgtgattcaggtataggcatatatggaattttctactgtagagttcacaactgtttcctgagtggtaccttcattcagttattctgtcatgagtaagtacttggaattacctatttgggcagctcctatgcacctaaggaggcaaactcagtctgaaagcaaatatgcttttgggagtactctggaggaatattcccaggagcttttagcattccacagattttggaccgcaacagatcttggttggatcaagtggttgaaatgggagcagagtccttccatcccatgcacacacatacctgctcacagctgtcttcacacccctgattgctgtagcattcasattatttggtgcataacctttattttttttaaatgcgttaggttatgtccatataacatcacggttgggctggctaagcctcattaaggattagtgtaaggagaaagccttagaggaaagtttaaaattgattgagggcaaatgatcatacttctcctcttgcttatatctggaaaaaaaagttaaatatatgcctctgcttcatccatagtaatataagagtcagttattatctttaaaagcatatattgatgaaagaatttgaaatactaaataaatggaagctatcccatgttcatgggtagggagactcaatgtcaaaatgtcagttcttctgaagttgatttatagattcaaagcaatcccaattaaaatcccagacagttattttgtggatatckacagatggattctaaagttatgtggagaggcagaggactcagaacaaccaacatgaagttgaagaacaaagttggaggactgacactacctgatttcacaacttactataaagctatagtaatcaagactgtggtattggcagaacactagacaaacaaatctactgaacagaacagagagctcacaaatagacccacacaaatatagtcagctgacctttgacaaagaacaaaggcaatacaatagagaaaagatattctttttaacaaatcgtgctggaacaacctgacaaccacatgccgaaataataatttagacacagacctttcacccttgacaaaaaataagtcaaaataaattcaagacctaaatgtaaaatataaaggtgtaaaactcttagaatataataacatggagaaatgtaaatgacttttgatatgggggtaactttttagatataacactgaaaacacagttatatgaaagaaataagtgataaactggactttattaaaatttaaaacttctgctctgcaaaagataatgtcaagagaatgagaagttaagccmcagtatggaagaaaattttgtaaaagagaaatttgagggtgggcccagtggctcacacctgtaatctcagcattttgggaggccgaggtgggcagatcacgaggtcaagagatagagaccatcctggccaacatggtgaaaccccgtctctactaaaaatgctaaaaattagccgggcgtggtggtggccagctgtaatcccagctacttgagaggctgaggcaggagaattgcttgaacctgggaggcagaggttgcagtgagccgagattgtgccactgcactccagcctggcgacaaagcaagactttgtctcaaaaaaaaaaaaaaaaaaaaaaaaaaaaaaacatttgataaaggactattatctaaaacgtataaagagctttaaaatccaacaataagaaaacaacccacttaaaacatgggcaaagaccttcacagaaacctcgctaaggaagatatatatccatatggcatgtaagtgtgtgaaaagatattcagcatcatatatcattagagaattgaaaattaaagtaatgagatactactgtgcacctattaaaatggccaaactccagaatactgacaacaccaaatgctgccaaggatgtggagcaacaggaactctcattcattgctgatgggaatgcaaaatggtacagccactttgggagacagtttgttagtgtcttagaaagctaaacacactctcatcacacaatgcagcaatttctgtccttggtatttacccaaaggagttgaaaacttacacccacacaaaagcatgcacatagatgtttgtagcagctttattcataattgccaaaatgtgggagtaaacaagatgttcttcagtaggtgaatggataaacacagtgttacatccagacaatggagtatcattcagcgctaaaaagaaatgagttatcaarccataaaaagacatagatatgcatgttactaagtaaaaagagtcartccacatgattccaactatatgacattctggataaggaaaaactatggagatggtaaaaagattcgtggttgccaggggttagagggaaggagggatgaagaggtagagcacagggaatttttagagcagtaaatctactctgtatgatactgtaatggtggaatcatgtcattatacatttgtccatacccatagaaggcacaacaccaacagtggaccccaatgtaacctatggactttgggtgataatgatgtgtcagtgtaggtttgattgcaataaatgtaccactctggtggggtatgttgatagcagggatgtcttgtcaggggacaagaggtatatgataactttctgtaccttctgctcagttttgctgtggacctaaaattgctctacaaattaaaggctattaaaaatttttaagcatataaggagacttctgtgtcataaatattaactctgtgcttgagtacacccattctgtttcacccatggagttgartgattcaacagaaatggtcatagtagcaggaaacagactgcctaaaaaacttgtgttttattgatgggtcttagaaacccatgaaaacttcacttctcttccttgcctcatctccaggtataattcaagctacaaataagaatggacaaggcaacacaggaaagtttctagttacagaaagattcttagtcttactattatattctgtgtatctgttcctaatgtttgtcatgcaaccaagaatattagatatgtgtgtgtgtgtttaacttttccaataggaatataggattttaaacaactgtatctagcaatttggttaatcttctaaatggcaggaacaatgagtattacattactaaccttgaatacttgtttagttttcaccaatgccagtgtaagaatctgttacaggccgggtgcaatggctcaagcctgtaatcccaacactttgggaggctgaggcgggtggatcacttgaggttaggagttcaagaccagcctggccaacatggcgaaaacccgtctctactaaaaatacaaaaattagctgggtgtggtggagtgtgcctgtaatcctaactacttgggagactgaggcaagagaatcacttgaacctgggaaggagaggttgcagtgagccaatattgcaccactgcactgcagcctggtcgacagagcgaatctccatctcaaaaaaaaaaaaaaaaaaaaagaatctgttatagttggaattgaaagatacaaagggtgaaattttttcttagtgtcactttcattgctgacactaagtgtttaatcaggccttagataaccaatttgggtaacttttgagtttggccccatttggtctctgccaaggccctggttactcagtgccatgtttctcgattattctagccacagtcttagggtttttctatcactcaaattgtttcttcttgacttttttttttttggtcctctttcttttaaagtcatcttttctaccattttcttggagtagggaagttatgctggaaaataaaattatgtcttcatatcaggtactatagtctggacacccctagcatggtattctagctgttttgtgtgtctcagctttggttgttggcagtaatttaagtagttgagagaggttctgttctttttgaggagcacagacacattcttcaaaaaaataagtaaaaaagaactccaaatagagccccccacagcacaggaaccagaagacagacctaagcactgccgttggtccctgaactgtgccattgtgtaccttccgtgtctgacattttacatccctctctatgccaggcatcgagctacggcctttcatgtactgcctctcagttcttacaatcctgggagaccagaattattgatgctcttttaatcaatgtggagatttaggttaagaaacttgaagaaattcatgcagctattaaatggcagagctgtgattcccactggggtcctgtggaatcctagtatattgttctttccacaacatgcagccctttagcaaatgacgtttatacttttggacacgacataaagttttccaaaggggttagggttgttttgcttttgaaatagccacctgaaaagttcagcagcaccccaaatgtgtctgtattgcggtgagctctttctgaacttagctcccctccatggctcttggcacacaaacttgccactcttacccagtggtctcgttgctgtcctggagggagatcagggattggggttatactctcaaattccttgaggtcccatagcctctagcataactctttataaaaagtgggcctcatgttggttgattaattgtacatctctctcattcgtctttcgaagtcatgctgatgataacaaaaccagcataagagtgagttgcagcaaattcattgctcctactgacaaaaccacatgctacctcctgtcatctcagctttcttgactgcttggataagctagagaaatgcaccacagaagaggaaagttagacttttagcaagaaggactaaccgctggcaagattactttgctttaaaaaggaaagaaagaaaaaccacatccagaaaatataaagcgaattggccaaaaagtagatgatgttgtccaggctacaggaagtgttatttccttcctctcactgagcttccagggctctgtgaaggcacagagggaggtttccttgttttgcagtggaaatttggatatatcatctctctattttgctgactgtgatttggtcctcttcctcrtccctcactgcctggaccaggtctctctgcttgtctcagaaggtatttactggttgcaaatagaaatctctgctatcaccctctgtgataggcaaccagaataaaccttcttggcattctttgctacagatgttatggggtaacaagattaaaaatattgtaatgtttttgtggaatgaaatttaagagatttaaactgtaattacttaaaattgacaagggaaaaaaatggagtcccccagagctggttactgtggagctaggatggagaaccaggccttttggtgtcacacaagctctctttataaagaagcaatggctcctctattctgggcattctgrccgtgtaggcagggtgctttagcgctgcctgtctctgcccactgggcatgggatcccaggagaacaaagaagggtcactcagaccctgctatccaagtgtgtcttgtgggtgcaggtttcattgcatattccttacagcagtctattctatacctagccagtggctcaagaacacctgtctttctcattgctatattcatcagatgtttactcagtgcctgctgcatgccaggcactgcgaaggacagttccctgttttgatcattaaaaaaattaaatagaccggacacagtggctcacgcttgtaatcccagcactttgggaggctgaggtgagtggatcacttgaggtcaagagtttaagaccagcctggccaatatggtgaaatcctgtctctactaaaaatacaaaaattagctgggcttggtggtgcatgcctgtaatcccagctactcaggatgctgaggcaggagaattgcttgagcccgggggggcggaggttgcagtgaggtgaaatcatgccactgtacgccagtctgggtgacagagcgagactctgtctcaaagaatgaataaatgaatgaatgcatgaatgaataaataaagccagaagacttatctcctttttcacttagatggtgtgcctatgcgtgtgtgttttatactgatagaattccatggccaagctcacctgacctgaggggtggcgcattgagaaagtgtcctgtctactgtgccccagcagggccgtgggctagcttggtataaggtaaagcaatgagctggcaggtaggaggcctgtgtttgtatccccagcttaggtagtaagtagctgggtgatatgggacaaaccttttcagttccttaactatgttttctttctttaattaatttatttactttttattttatgttttaagaggcagtcttgctctatcacctagggtagaacacagtggcaccatcatgacttactgcaggctcaacttcctgagctcaagtgatcctcccgcctcagcttcctgagtagttgggactacaggcatacatcatcaccaggcctggctgatttaaaaaaaatttttttagagacaaggtcttactatgttgcccaggctggtcttgaactcctgtcctcaagcgatcctcctgccttggcctcccaaagtggtgggattacaggtgtgagccaccgcacctggcctcctttgttttaagtaaggttgttatattttagtgagctgtgagttctttccaatatctggctatctcaaatccacaaaattgagctcagataattaacctggaagactcatttgtctcaccaagaagtacaaaagaatagaatcatcttttaccatctttgcatcccttgactttctgcctttgaacttattttcaaaagccccagtgagttccatgtggagtgcggacatcttgagacctgaggctcaggaaggcggtgagtgtgctgygcacagggagaggtgcagccactgtctgtaaggaaggattttagacccagccctttgtctgtcctgtgacgagtttgcacccagcagtttctgctcactggcttcccaagagacaatcagcttctattggaaggacagctcaccggggatgggaggacaggatatgcccgtggaaacctgacgagcttacctggcccacaggggatggagcctttgcccttggcctcatttactgtgttttatccagtaagataccagaccagcaacacttaaaggaaaaacaacaggatttagcacctgctccttctctggggtgccrcccacccccgcccagtccccacaaacacacacataatgcaggtgtatagaaacatagctcttttatgtgtgtacgtggggtaaaactaatttatcttgtgatcagaaagtagggagagattttataaaacactccataatttcagcatctgaatgatgcttttcttgttgggaaatcatgcgtccctctcagtaattgcttctgagtcttcagcatattcatgactttctcttttgtgtgccagagtctacaagcattaccattaaaagcccttttgtatttagttatttgtttacagatctgtttccttcctccttgaagacaatgtctggcacactggtgttcaataaatgttttcatgtataatgaatgaatgaccacattagtaatgtaaatcctcagcctaaatgtacatcctcagagagacaattttctttctttctttctttyttttttttttaaacggacagaatcttgctctgttgcccaggctggagtgcagtggcgcgatcatagctgactgcagcctccaacttctgggctcaagrgatcctctgaccttggcttccctagtagctaggactatgaatgtgtgccacctcacctggctagttattttatttttagttttttgtggagacaggattttggctatgttccccaggctggtctcccacctcagcctcccaaagtgctggaattatggatgtgagccaccacgcccagagagaattttctaaccatgttttctaaagtagctccatcctcaggagttggcctttcccaggttagcctcttttattcctttataacttttagccctatatgaagttacttttcttgtttatatgcttgtgtgtttacatatatatttttttctttccattattaagtaagatttaggacacggagacattgaataccctgctttcctaacatctgtaactaattgctcactggagaaattaatctccaatctgcagttgaacttctggaaatagcaaaacttgttcagaatgaattttggagcatgcagtagtaattaagatgaataatgtctttgggaagacaaaataccacgtaaagtaatrgagaaatagttctgtgctttttcacacatgactcaaacttgtttcagaggcatttccaaacaaaaatattcagtcatatttcagcaatgcaattccatgttactttgaggtggttactttatagagtaatattcatctgacggtgtcaatttttacattaaagaaaaagtgcagtaaaatttacaagcaacaaaaggcattcatcttaggtttacaattcaatgtgttttatcaaatgaatgcagcttgtatgcctaacattccgatcaagataaaacacatttcccttaccccagaaaattccgcggtatctttatccacacagttcccaccctcagtaaacagccaccgatctggtttagatcactgcgagttagttttacctgtgagtcaacttcatatcagtggaattagatgtgtctattgtgtttgggctctttcacttattgtaatggtttttgggttcatccatgatgttgcacatccgtagttcattcctgtgtattgccaggtataactatattacgtattatatatcatagttatagtatagtaagtaatatatacatataacactgtcagtactcccattgatgtacattttgatgtattccagcttttgactattaaaaataaagcattcacaaacattcttataaagcactggagtgaggatgtggccaggtcataggataagtgtacgtttaactttataagaaaccaccagcaatgagagagagttccagttgctccatctccttaccagtgattggcacagtcaatctttttaactttagccattgcagtgggtggatagtatttcactgtcttttttttttagagttataatttgcatagagtaaaattcaccgtttttagtgtacaattctgcaggttttgacaaatgcatacaatcttgaaacacaaccgtggtcaagctacagaaccattccgtcagcccccaagttctcctgtgtcccttttcagtcatccccatgccaccctgagcacttggcaactactcatgtgttttgtatccctataattttgcctttgcctagttctggcctaccagggtttatcagcggtatattttttaaaatgttatcagtcatatatgtttataaatttaaacatcaagaccatttctacaaggtttataacgaaaaacaggagacccttcttaactcctctcgaattctgaggagtttcaactttttcagaagtctttcaactctttcagccaatgttttatgccataaatctcttcatttctaaattcatttcttactatggaagataaggatttcactcttctgtacaccccaccaacgatgcagatacccattaatccctcatagaaaagcaaatatagatacaatttttttttttttttgagaccgagtctggctctgtctctcaggctggaatgcagcggcatgatctcagctcactgcaacccccacctccaggttcaagtgattctcctgcctccacctcctgagttttttttaaacacttaggatttgggttattatgcctatgtagtgtaagcagcagaggctgtgggatttaccttgattacatttcctttcttgaataatatgtttttctagagctaattcctttttttcttcattctctgtgaatttacctctatttcrtactcaaggttgctgacaggagtattgactgccttttaatatgttgagacaaataagatcatttatcagtttcttttttttcttggattcattcctcatgggaccgtctgtcctcctcccttgtttgggactggttgtgctttcccagtgacagctctttttctgagggctctctttatcatctgtcttggggacagaaaaataggaactaactaggtaattcaacagagctaggggtagtatgcatttgtataaatacagattaatacctgttaattttgactgatccacatgtataaaaagtcatgaattcatgtggataccttcaatcccaatccggcagcacagggttcattcgagatttttcccttctggggcttataactccattctataatagtaagaaacctagcttcccatatttttaatagatttagctatttgatcagttccctggtatgtaactgatcactcatcctcattagcatgctgtctcccatgggaacacccccctcaccccgttttagctcagctatccgaggccagtgcaccacccccaagtcctatgtgcggataccccctcgccccacttaggctctgacaccccgtctgctcccttacacggatgcccacctcggtccccctgggctctgacatgccatgccagtctggacccctctgcggatgtgcagccttcccccactgcgaatgcccaggtcactctgctccaccccatggctcagtactcagctgcccaggagggacggcagaaggggcaggatccatctcctgattctgtcctgattcccattccccaaggttttcctttcttcaatcttcctataccaaagactactgtcctcctatttgcttaagcccaaaatacaaatacctttgagaatttgcctttactcccccattcatggccacccccagcaaaatcatgagcaactcctgttgattcatatatatcattcgtctgggtgcggtggctcatgcctataatcctagcactttgggaggtctaggcaggcgaaccgcttgagtccaggagtccgagaccagcctgacagcatggggagatgccatctctataaaaaatgcaaaaaatagccgggcatggtggcatgcacctgtattcccagctaccaggggtcggggttgggtgctgaggtgggatccatggagstggggtggcggaggttgcagtgagccatgattgtgccactgcactccagtctgggtgacagagtgagatcctgccacaagaaaaaaacaacaaaaaaaacctcatcaatgtatatatcctacatttttttcatctctcttcctcttcactgcacccaccactcccctttggtgttcctcttgctactacacctcacatcccacaatccattcccatatagcagcaaggatgctcttttaaaagcctaaggcagccaggcacagtggctcacgcctgtaatcccagcactttgggaggccgaggctggtggatcaattgaggtcaggagttcaagaccagtctggccaacgtggtgaaaccctgtctctacttaaaatacaaaaaataagctaggcatggtggcacacctctgtaatcccagctactgagaaggatgaaccatgagaatttcttgaacctgggaggaggaggttgcagtgaaccaacattgcaccactgcactccagcctgggtgacagagcaggactgtctcaaaaaacaaaaaacaacaacaacaaaaaaaacataaggcatgatgacatttgaaaccctccaacgcttcctgctgtacttagaataaaacttgaatttctccatggcatataatacctgtgtctgataattaatcttggctacacattagcatcaccatctccatggcatataatacctgtgtctggtaattaatcttggctacacattggcatcaccatctccatggcatataatacctgtgtctgataattaatcttggctacacattggcatcaccatctccatggcatataatacctgtgtctggtaattaatcttggctacacattagcatcaccaggggaccttttagaagcattaagtctgggcctcaccccagaccagttaaatcagaatatttggtggtgtggactaggcatcagtgtttgtaaaagttcctggtgggtctcacgggtgcccagggttgagaaccaggcctcctctaactaccttcgtattgcctctccccatttcagtctcttgcgctgaactctggcaatgacatttttcttctttctttgaacttcaggcttattcttgcctcacaacttcctcgcttgatttgtttctgtctggaagtttctttgcccagatctgttaatggctcattccttttagcttcttagagtaatctgtccttggtcaccgtatctaaaataatgtgccatgttaccaaccattctctgccatattacttttcttgagcacttcttcctcttagcactgtcattatctcaggtcattctacttgtgtatatttttaacattagagtgtaatcttcatgtgaactcttgctttccattatgtcatggttcttaattagtgtttaataaagatttgtagaatgactgcatgtagcgaggagaagaatcagggaagagatctgttggacagaaagtgtgcaggagccagagagacatttggataggtgaagtgaaatggagcagataagagtcctgactgatggagattacttgagaagccagatttaaagtaaataattttgacagtggaattagcaactctctgttattttcagttggagaggacagatttttattctggattagagcaatcccaagaaagcagaaaagacttgtgagcctagcgaaagagcaaccctcagcatagaatacgttggtgttcaccatggttgccatgaatttgctttttgcaactgtcatttcccctaaatgtaggcaagagtggccctctggactcattatcccctcacgattccctttattttaatggtgtaataacttaaagcatctgagatcctgcggaccacttcacaccacccaccgattgcagctactgatatgcccatcacttcctctttgcattatgccttcttttttttttttgagatggagtctcgctctttcacccaggccagagtgcagtggcactatctcggctcactgcaagctccgcctcctgggttcaccccattctcctgcctcagcctccctagtagctgggactacaggcacccgccaccacgcccggctaattttttgtatttttagtagagacggggtttcaccgtgatagccaggatggtctcgatctcctgacctcgtgatccgcccgcctcagcctcccaaagtgctgggattacagcattatgccttcttaagtctaatatcaagctatatttaattatgattgtcttactgtaaatacgcgggattaattggaaaactggattcttgcttgtatgacaacccaggtatgtaatgtggaaatgagcaaacatatttgtgaactattaccatattctgtgcagttattaaaattgaatttatggagttctgacagtatacgcttaaaactccagagatagatctgttctctcatacctgatgcaaggaaaatgaacattcacgtttacaaattcagcatgataattttgtgcctttaggtagggcttacacacacaccacaattctagagaagacataggaggttaaaaaaaaaagttttttcaacaatgacaggcttaggaagcataattccgtgatgaatggttgtgcaaaatactgtttacaaacgtacagataaattcttctttgaaagtggaatgaagtttgtattgtgacagcttggctttatagggcacagaacgatgaaaactgtttggaaaagatgaatatcttgtttctcagcctgcccgcctcccactctgcccttttcccagggtgaattcgaagccatttattcatgcaaaagcccattttcatgttttcacagaaccaagcaagtatatacagatgggtacagaccttgagacctggggagaaatgcttagcttagtatccttcttattcctgaatctcttacaccttggcatcctaaatcgggggaagtgtttcctgtttagatatctttttctcagccatgtgccttgatgcaagccacaattccacagcatagtaccccacgcctccctgtaaaatgtagcaaatcctttcaatgtctgaatgccacagtttaaaatatttatgaaatactacttttacaatatttgtgaaaatattattgaatatatgcccaaagaagataagttcagttttctacccataacatgcacgaagtagagtatgtgtctattttttggttgatttcatgtagaacaaattacaagagagttctaggatcctattggcagatgccagaagttttaattacagtttgcatctactcactgtgtatatatggctaccttatacgtgtatgccgttactttcagtggcaaaaactgcagtttcttttgcaccaacctgataccacaaggtttacctgggcaagatgaccacactgatgctttagttgatgggcatggggaatgagggaaattattacagtgaacttcctacagtaggtgttcagcaaatagttaatataaaaaatctgtttatggacagagtaaattgtctactctccacaagatagagggttggaaaacatctataggggtgtgtacctttattggaatttttttttttttggaaacggagtctcgctctgttgcctaggctggagtgcagtggtataatctcggctcactgcaacctccgcctcccaggtgcaagagattctcctgcctcagcctcctgagtagctgggattacaggggcacaccaccacacctggctaatctttatatttttagtagagacggggtttcactatgttggccaggctggtcttaaacttctgacgtcatgatccacctgcctcagcctcccaaagtgctgggattacaagcgtgagccaccgtgcccggctggaatttttaaaaagaagttaaagcctttacctaaagcctcagcaaacaaacgcataagatctttttatgggggtggcggggggatgttgcttttagcattaccaagaattgcacgtaattttgttttattatttcattatttggattatttttaaagtgcaaatatttgtcttcataagatctgctagttcaatttaaaatttttccagaatagtggttcttaacctgggaactcagaagagttacagcaaatataatttatttaaaaatatatattttaatagtataaggtgacatgtagaaagcatgtatacaatgaaagtccatatttattcatgcaaaaacatttattaaatgactgtaaggtattagggtgataagaaacgggctgtcttgttggttttttttgctattgttctattcttcctccaaaggagtagagatgaggctaggttctaagtgaattttaaatccaattgttattaagagaatacagctctaaaatacagttagatttttcttgtgtaataaactaaaacattcatcttctaacgtactgttaattgtctctgtcaactgttgyatcccagtattgctaatagaacatgagagtatatattgctaataactttatgatatcccagaaaacataaaatattttgtgttctcttttgctctgacaggttggtacagaggatataccctccaaaataaatctaaaaaggtatgacttatcattcactttttaatttcatttgaaatctgtctgctagttttgtattgtgctatgtgaccctctcctctgctctctgctgtctctagacctagtttgctttctctttgatggctcttctttggatttgaaagcaaattctctgacctcagtgcctaaatgtaatagtgtaaatcccattgactgtatttcctaccagccaattcaaggagaaaatcctggaagacttcttgcttcctgtccctcaagttaagcaagttggtaacacattcattgccctagtgggatctcttttgcagggaggggtggacccacccttctccctttgtcctttacttccaatgctacaattccaaactaaaggatctccccatttccacttgatcctttccttcattgtaaattggataaacaagagtggttttcatattatgagcctcacatcccaataatacattatgaaatcaatatggtggattataaccaattttttccaaaaaatgaaaccgaaaagtagagaacatgagatgcaatggtaagtactgtttcacgaaacttttattttaggtatatacttttatttattgtttttattatattttatgtatttgatatgtaatattggttgccataagaatgtatcttttactgtgcaacaaaggcacagtttgaaaaatactgacctaaatggttccttttgccagtgccaaaactactaatcgtcaggctaaagaaaatctattaattatgttaatacctccctcagtttcttttaggtcttgtcagcacttttcctttgatactgctcgctggggcagcatgacatgtcagcactttcttttgaaagagcagagttgatagggccttattatttcacaattagttcacatgccaaatagcaaattaggaaagggatgagagaaacgttttagaatttatcaaaagaggagtgaaaaaacaaaaccagacccacggttcttacacttcacggacagcatgagaaagacgtaatcctgcacagataggctgatgttacacacccaactctccaaagagtacggggcccaggaaaacacctttctacaaggtatagttcattagaaaccaggactgcttctgcattgttgatgcttaagtcacaytcagtatttgcacatgtatgtgtacacatacacattttgttaactttgacagtttattcatctagcaaaataaaggaatgtttgcttttawtgcarttcccacagttttggtccttttttctcacctcaagccagagaatgaatttttctacccacagttattctagtgtcgcatgtctttatttcaaaccaaattattttcatttaatctcttgctgacttcagtttctctgggccgtcaaataggggtccaagacagcaggcatgccagagtaaatgagaacatgacagaactaaagtgaaagcttttcttctgggatcctcagtgacacagagtacttgattatggccactcttgcttttttagccctattggtgttaattttactcatagttatggaagtggtagttacttcaaagcaccattagagttaacaattttgatgttctgaatttgttaaacagtaagaatacttatgtcacttaattcccaatccttttttaagaaaaaaaaagttaatttaaaaacaataaacaaaaagccattctcaaacaaaattatgtgatgaacttaaggaacaaacgaaactcttggatttttcactgcgaaattcaattacgttcaaccaaggtcctagatcaggtcttctttttcatagactacagtatgtaaggatccttttgaacatggcagaccttgctttctaaagtatcctatgattttttaatatagtcatttcctcatttccacaggcaattggttccaggacccccacaataccgaaatccatggatgctcaagtctctgatataaaatggcatagtatttgcatataacctctgcatttcctcccgtgtactttaaatcatgtctagattatttataatacctaatacaatgtaaatgctatgtaagtagttattataccgtattgtttagggaataatgacaaggaaataaacctctgcttactttttttttctatatttttaatcatcagttggttgaacccatgatatggagggccttgtgtatataaaaatcaatctagctaatagtgccattgttgttggctttgaacagtagatagatagggttcccccaggatctaaatgataaattctggatttttttttwaatttttttgtgttcattaaagagtgcttaaaacctttaagcttaaaatctcacccttcagaagaaatctttcggtaagagtttctctttgttctcttggtaagtaaagaaaaactttctaattcaatgaaatgatgacacagacaagggacatgcatttatttgatgattgttttaagccgaaatatccttcttgtggagagattcagggaaaatacaggcaaatcaaattcagttgccatgaattctgctctgcttttgacaccccgtcattaagagatcagctcattagaaacgctctcctgtgctgtgtccctcatttctccgtctttaaggggaagagctacttgaaaggcctgttgttttaatggaaattcttggtgtcatttataagctgacccagccatttagagtgatgataaaaggagctagttgatgataaaaggagctagtggttttacaaattgaagaagccaagcgcttttccgaaactgattattgatcctggtggaattgtgggagtgtggataagggcaacatctagaaaatcattagtttatttttctactcaagtgagtgggttacaatgaggaaggagaagcagaactgagagacaggctgtaaatcagaaacacatgacctaggtttactctgactttctgtgtgtcatcatggcataggagtcattctataagcatcagatttgccagagcaattctatgactgtaaatggccaagtgtcatcatggaaaggtgaagcctactgatgacaaatacacacatactatgtaacaaatacacacatactgtataacaaatacatgctatataactaatacatacatacatatatacatacatacatacatatttgagacaggatctcagtctgttgcccaggctggagtacagtggcgtgatcacagttcactgcagccttgaccttctgggctcaagcaatcctcctgcctcagcctcccgtgtagctgggaccattggcatgtgccaccatgctgtgctaattttttaaatttttgtagagacggtgtctcagtttgttgcccaggctggtcttgaacttctgggctcaagcgatcctcttgtcttggcttcctaaagtgctgggattacaagcatgatccactgtgccttgcctcaaatattctcctaatatgaaaatcatcatgtctgaacatccagtgtaaattgtctgcttatgatctgcttagatgtcacaagattcatcactctgcatttaygtttctgaatacttctatcttgaatgttttccacttattaggagcgactagtcaccagattgtgaatgcatgaaaattttaattggtcctttaccttctgatttcaaaaaccttcagcagggatgttcctttgtagtagcagtgttacattttacttttgacttccagaattggatccttgtaactaaacagtttatccgtgcccagcgcctccgcaaccccactcctgcttttttatgagttttggactttttttattgtggtaaaaatatatataacataaaatttaccatcttaaccatttgtaagtgtactttccagtggcactaagtacattctcattgttgtgcaaccatcaacaccatccatctccagaagtctttcatctttccaaactaaaattctgtcccctttagatactaacttcctattgttccctatcccccgcaagcccctcagaacccccattgtactttctgtctttatgaatttgactactccaggtgtaagtggagccgtacagtatttgtccttttgtgactggcttatttcacttagtgtaatgtcttcaaggttagttcccaacatcccagtttagttccccacagagatgatagtcagcaaatcatttgccgtggcgcagtggcacagtggcacagcggcacagcaggcagaagaaacacccagagttccttaggcctcctagggacaggcctagagcttccgaactgcagaaatcaggccccagaggaatcacacgcagtttttgaactgaacaccckcctttctcattgctatattcatcagatgtttactcagtgcctgctgcatgcctggcactgcaaaggacagttccctgttttgatcattaaaaaaattaaatagaccaggcacatggctcatacctgtaatcccagcactttgggaggctgaggtgagctgatcacttgaggttaagagttgaagaccagcctggcctggccaatatggtgaaatcctgtctctactaaaaatacaaaaattagccgggcatggtggtgcatacctgtaatcccagctacttgggatgctgaggcaggagaactgcttgagcccggagggcggaggttgcagtgagccgaaattgtgcgactgtactccagtctgggcaacagagcaagactctgtctcaaagaatgaataaatgaatgaacgcatgaatgaataaatagtcagaagacttatctccttctttttcacttcgatggtgtgcctatgcgtgtatgttttatactgatagaattccatggccaaactcacctgacctgaggggtggcgcattgagaaagtgtcctgtctactgtgccccacagtagacacacatttaatttttgttttcaattatttgatcagttttccaaaatggttctgaatcccacctccataatgaaagaggtcattgtcaccttgtgtctgtgtgtgttcttggtctcatcagtaacgggattagaattcacactcatattccccacgcctgcccccgtctcaaagcgaggaggagaagggatgtactttttatttggggctttgtgtctggtggggaagcacatgcaggatccactctgtcatcaccaatgctaggggcagtttaatctcaaatgttcttgctgtttcctgttttattggcaacggattaaaagagagaaagcagagtgttgtacagacaaatatagcacatgcaactggacacaagaacaaccctgtcaatgttcactggtttcctgtctgagtggagtaaggatcagtgggtatatatgcctccgggcactgggacatcccctcccacctttatgatcagccacccctgacatgtcatgttcatggagttcacaccaactcttccaggaatagggctgggagcagttagccaacagtgccaggtataagctccatgtaagataccatgaaacagatcagcatcactgtctccggatgacatctcctctgtgtgtgagcatatcacacagtaaacagcagaagctttggtacacataacactcacatctgggacttgcttcctgttggttagatctggtcctctgttctctgatttctatccaccagtttctcctctttctcttaggtctttccaggcctaagtcttccccatgggcagtgttacaatactgatgtagaactgcctcttagggatatagaatggagagcagtttgacactgtgaggtgctgaaaataaccaggtaactaacacccgttgattttgagtgcatttggtttaagtgggagtgctgagaggaactactttagaaaaatcactatgtagttgacccgtgaaaaatatgagtttgaactctgcagcacttccacatggattttttttttttagccaaatgcaaatcaaaattacaatattcttgggacatgaaacctgtgtaaaagtatatgcgggttgtgcagggctgcgtgccatacttgagtatgtgtggatttgggtatatgctttgtgggaaggaggtttctggaaccaaccccttgcatattctgagggatgacttattttatgggctactgagtactgcatagtttccatgtcaccccttatgtgaaacttatgggaagcatctcatggcaagtagcatctgaggggtttaggagttcacaattacactccttcccattatgttatctctgagctgacacagcatgtttgcctcttcattcacaaaatatcctatgctctctgaacccaaattttaatttctacctttttgatgtttccaccatgcttwtgtggaggtagccagtcaacgtaagtggtgtcctgccaacctgatctcaggagtttagctattgcctgggtgttcccatttattctctttactttgggctgaggtgtttttgtttggtttttgttttgtttttatggccatataaccaaaattcttttctctgtagggcattttccctgaaacatatatccatttgaaagaggcaactgtggaagacctggggtaagttccaagctaggaagattccccaaaaatgatgaagatgtaacattatcattaatgataatctttaggcattaatgccttatgtacgttaatagttctctcatctcaggccaggcgtggtggctcacgcctgtaatcccagcactttgggagaccgaggtgggcagatcatttgaggtcaggagttcgaaaccagcctggccaacatggtaaaacccccatctctactaaaaatacaaaagttagctgggcttggtggtgggtgcctgtaatcccagctactggggaggctgaggcaggagaatcactcgagcccaggaggcagagctcgcagtgagctgagatcataccactacactctaacctgggtgacagagcaagactctctctcaaaaaaaaataaaattaaaaaatttctctcatctcatcagttctacttctcctatgagagaraaatgaagaaaaacttttcactcakacaattccttcctctgtcttctctttctakaattgttcctcctttccattacttctccagaatactaaacacagaagtagcaaaaactgagggcttttgcctctacattacatttattatctgttcactgattgtgtgtgtgtgcgtgtgtgtatgtttgcacacatgaacatttgggactctgactgataagatctgagaagcccccaattcaggatccttgagagagagatgattaagcaacagcctgcatttaccagctctgagccttggatgaatcacttaaacttaagtggatcctgggtttttcacagcatattaggggaaacaatctgaccctactttgatcatgagcttgtcatgagattcgaatgaggtaatgtatgcaaatgtgccctgaagataagatctgctatattttgggtattcatatttcttgcccacctcatcttgcccacctcatttgtcctgggaagtactgcctctgtgacagctaagaagagtgagctacttagtctaagtgggagagagagaggtgacttaggtgatggtgagtctctggacaggagarttctggaggcagtacggagaggctggggtaggactggaatcctggggctgatggagaggagagtggggccgaggagagagtggacagctgggtcacagaaccatgcagcctcacagctagaaagagcattcccagttgtagttcagcaccatcatttcttttcttttgttttcttttctttttttaattatgatgggcaagctttattttgtatgaacttgatttcacaaaattagaatggcaattccacttaaaattaactgtttaaaaagtgtaaatgtcacggtatagatctgttatccaaaactccaaaaggcagtgaaattggtaacagatattcctcctcatctttsgacccatacaacagcagaattgatgaaactggttcccaggcaagtatgtgccacttgctcccgtgcctcagggaggagaggatgttatgacacaggcgtttttgttgcagtgacttgtggataattgctccttattaacactgctaaaattatgttcacatgttttactttgtgtgggagccgatgactcttgtcctttcgttttttgagtattatctttcaaatgagcgttggcctcaaacccgctcattccaaaatgcatcacagatgggaatttaagcctcttcacaaagcaaaccactggaaattcataggtagtatgcaacattggtctgtaactgataatagggcaacatcatttctttggaacrtaattttcttgattccacaagaagtgacaggataagaaaactcatagttaaatgagaacagtcttgttacaggacagttatctcccaggtgtatgtcatcaattctaatttccgtgttgttaccaaagggccttattttcattctgactaacaaccaatcatcagaacacattgaaactgttgctgggtcaagttcaaaaggattccaaaacagtaaaaaaaaagaggaagggcccaccaagagcacagaggtcttcatcgctccagactcccagatacagcacagggaacaagaaatggcagaaccatcatttcatagacaagtggtcaagatgtcctcaaagccgtacagctctttggtggcagaaccaggaccaaaaaccaggtctcctgccctgctggagaagtcctctttccggtgggccgtgggctgcctccactgccacccaccatgttggaggaaacgtaggtggggaggcacattcacaccaattagggttatacaggatgcccagttacattggcaattcaaatagtaagtaatttttcatagtaagcatttcccagatatttcatgggtcacacttattctaaaaaatcttactataccagaaattcaaacttaactaggtctcctatatttttcctcattgagcctggcagtcctaccaccagttccaatttgtttgcttgctcttgctttctcctkttttctttttgctaatcataaaaatgccagagaggatttctgtgaataaatgtagtacctacctttatgagagtcttctgtgagtaagcaaggattttgttaagtgtacgttttctgtgttgtgaaactgcagatgagaagaaaacatgggactattccagaaaggggtgctgcctccgtaycccccacctctaccctggcctctgccccaaccaggtcctgggtggastcacagccccaggacactcgtgccacacacacctttccatccagcctcccaaatgaaacagctgcttggtggaaccagctaaaatgctgcatattttgcttccatctttgagaatcactgaagccagcctggctcagtaatcgagtctcctggagaaatctacactggggaggtcgaggctgggccgcaggctcattcagttgcaggaacggagcccattttgaggactgtgctgccttactctccttctcttctcccagatgcttggatgcgataaagtcccctgcacaactcctgcccccaggcctaaccagcttcattctcaaccttgaacgttgggaagtctgatccccatcaagtaaagcagtgctgatcagcctagaagaaagtgaccctcgtttggttctttgtaggcagcatgaaaccgtgattcctggcgagctccccctggtgcaggagctcacgtccactctgcgagaatgggctgtcatctggcgaaagctctacgtggtgagtttccccttgtggcttggagccccagggtcactctgggtcctcagcctgtaggtcctttgcagggtgttggccccttattgctgacttcatggagtgggatgcattctccctggatcacacaaaggctgataagcagcagattctcatttccccagagctgggtcactgatagcgggtagtggagtaactgggcgtaatcattctagcagtcttttctcaaatgataaacatgctgattgtgaaagtactaatgataataatcactgcaaacacttctgcagtctttcctaagtgccagaaactatgaatcctcacaacattcctataaagtaggtgcaattattattaatttgttaataaggaacctgagtcatgctcttagcctcttcatgtataccagtgaactgaaatttatcgatatttcagggctcagctgcatgaggatgacattctttaccttggcccacataccttacagactcagaaacttgaatagtgttaagttgtggtctgagagtcacctttttgggcagactcacagtattctttctcccaacactggtttgacctcataatgctaatacagtgtgtcagttcacagggaaattacaaggagccagcacatcctctccgtaataaacaataagctcaagttgtgtgcaggaatcagcaccaagtaaatctagcatttaacatgatsaaactgagaacagctgtcttgcaagagaccaaggatgctcaaagtctattggcagcaagyctgcctcatctscagtgtagaaagctctttccttaatgtttttttttttttktgagacggagtctcactctttcgcccaagctggactgcagtggcgctgtcccggctcactgcaagctccgcctcttgggttcatgccattctcctccttaatgttaacattggaatccacaaagactttttattttatttatttatttttttgagatggagtctcgctctgtcactcaggctggagtgcagtgacaccatctcagctcactgcaacctccgcctcccaagttcaagcaattctgcctcagcctcccaagtagctgggactataggcgtgtgccaccccgcctggctaatttttttttttttttgtatttttaatagagacaaggtttcaccatgttggccaggctggtcttgaactcctgacctcaagtgatctatgtgtcttggcctcccaaagtgttgagattacaggagtgagccaccatggccggctaattttgtgtgtgtgtttttagtagagatggggttttaccatgctgggcaggctggtcttgaactcctgacctcaagtgatccaactgtcttggcctcccaaagtgttgggattacgggcgtgagccactgtgccccgcccacaaagactgtttattctaaagttgcttctttgcctatagcccttgtagttcagcatcactgggtcttgcctctgttagtgggttccagccttctgtggctgaccagaaattcctatggcgaatgtatattctctcgttagatgtgtgtacaagttcagggaggttgtagaccagacttgatggcctgggaaccctcctcttttctttatgtggctttgtttgtctcaatttttgttcagtcatgtgttgattcattttaactctgaaaagccaatcttaataagttactgggaatacctcactctagaccctaaatactgaaggcagtaatcaaaagctmattttggcataacttataagagttcatggaagatatttcattttcattcagggctgttgtttcccttggttaatcacagcagtagaaatcaccaacccctttggtggaaaagcacatggtatttctctacttggtcatccttcaagaccttgtttagacgctttcttcttcatattgtattttctaaacatagcaatctataacgtttccctctggacaatagaagcacttactgctaaactcatcatctgacccttggggcacactgcttcataataaaggtgatcttttgatctctttatgtttagttgaagagagaatgcacattaagttgctaaatcacaaggaggatggagacactgctgtcagccccgtggccttcattgatcatcttgcacttatattgagagtactctctggttctggtttattgattagttagttgggtggatgtaacaaggttgatggatgaggaattgcrtgtacgtgggttggttccttaacatgttctttctggaaattgatgagtgttgaaatgcattagataatcagtattgggaaaggagtttttttttttttttttaaagatgtatgagactggagagtatgagtgaggccgactttttttcttgctaaaacacaactggtgtgcccagtttattacctatgtcttctacacatccacaagtaattgtgccaggtctaccattgaatagaatgaagaaagaagtgaatgggggccaggtgcagtggctcgtgcctgtaatcccagcactttgggaggctgaggacggcggatcacttgaggtcacgagttcaaaaccagcccgtcccaatatggtaaaaccccttctctactaaaaatacaaaaattagctgggtgtagtggcttgtgcctgtaatcccagctactcgggaggctgaggcaggagaatcgcaggagaatcgcttgaactggggaggcagaggttgcagtgagccaagatcacactgttgcacttcagcctgggggaaaagagtgaaactccgtctcaaaaaaaaaaaaaagtgaacggggatgaagaattaggactcatgtattttggctgccaaaatctcttagtagttaaaggtgataaggtcttgttgaacatttccttggtgggagagtttcatgttgtagtagcagaatttggttaaaaaaaaaaaaaaggccaggcgcagtggttcacgcctgtaatcccagcactttgggaggctgaggtgggcggatcacaaggacaggagttcaagaccagcctggcyaatatggtgaaaccctgtctctactaaaaatacaaaaattagctgcgcatggttgtggccacctgtagtcccagctactcgggaggctgaggcagaagaatcacttgaacccgagaggcggaggttgcagtgagccaagaytgtgccattgcactccagactgggagacagagggagactccgtttaaaaaaaaaaagaaaaaaaaaaaaaaaagccatcccctcttcgagggcagcacatttctsattttaatttagatatctaataacataattattttggtatttgtgaataatttaaaatgtcttatagccgctgttgattgactaaaagacattctttgtagaaattctcagtcagtcgataggactgagaaacctgcttctgctcttgatacatgctcatccagtaaggaacaatccactaagatttgttattatggttagtgcaaaagtaattgtggctttcaccgttactttaaatggcaaaacccacaattatttttgtaccatcctagtattaattgtggctttctcttttttttttttcctgtcccttcctaaagcattgacagttaacttgaggcagaacttctgaacttcttactgaaacgtttctgtatcaaagtagcaaacatcaatattatgtttcactaggaaacaagtaaaaacccaaatctctggttttcgtgtcccatctcctttcacctgctgtatgctgttattgatgtttttgctttctgattctgtaagttccttcagtccatgtaaagataaatacagattttactagtatgtagcaatacttgtattatttctctcttgcatttccccctgtagattacaacaccagacgctctgtttgatgtctttaaagacacctgtggccagctagtggctcacgcctgtaatcccatccctttgggaggtcaagcctgggggattgtttgagtccagcagtttgagaccagcctgggtgmcatagcaagaccctatctctacaaaaattagctgggcacagtggcacatacctgtaatctaggctactcagaaggctgaggtgggaggattgcttgagctcgggtggttgaagctgcagtgagccatgattataccactgcaktccagcctgggtgacacagtaagaccctttctcaaaaaaaaaaaaaaaaaaaaaaaaaaaaagatmcctgtgatgtcttagaaatccyrcatttctatagtacatttccttgttcttttcttttcagtctcagttcaccaraaatgtacgttgtggatccacagtctcatatgaggggaaaatgcagtccactaaccagattaaccccagccatgtagacgctggtgattattctagaaaagaaaaatatttgcctagctgtgatttatttttagcagttatacggtaaccatgtagaataatcataaatatgtcttaaaggggaggggagtatgtacacagaacagaggtgaacccacttatccaaaatggagagaacagatgactccccccgtggtctctctgttccttaggtatattattattgttttctgttggattatcttccccagtgggtgttggccttatgctcaggagaggaagcgggttttaggagacagacactggcccaggaattgggaagctgagtatcctgtgcgggtcctgttctgaccagttctgtggccttgggcaagtcacttgaacacttcaagtctgctggatgttgttcctctgcaaaagttgatgtaaaagctgccgtgttgaccgcgtagaactctgagagtatggaaagagagagtggctgtgatctgtgctgctgacagaccacaaggactccgccaatgggagcatgtgcttttgatgttatcttagctggaagcagtagccatctggacaccctccctctgggaagccttggcatagcttctctctttacccgactgcctgcccragactctgaagctcccttctgtatggccccttatccaaggtcgcttcctttggaacaattatcttaggcaaagtggccttgagcactcagcagccaagctaaatttctcaccatacatagagaacctgcttgktttaaattcaagtccaggaggcccgggtcattccaaaatacagagaaactgcaaatgtatggcagtttctgatggtctttccctatactgctgtgcctcagttggaactagtcactgggtgtgttttcattggttgttcaggaaaggagggaacattgtgatcaaggagrcctcctggtgacgtaccaagaccttggacattggagtcagacagactgcctagttcttaagttctggcttctcccttactgggtatgtactattatattcagaaaaaaatgacaaacccagtaatagttactgaaaataaaccaaaacagaaagaacttggatgcagaaggctactagctgatcctgctgcctaagacaagtcccttgatctccttaagttttcttttcttctcttaagtggggattttatgtgctatatgccttgcaaatttattgtaaggattcagcgggatagtctgtataaaaccccagggtagtacctgtcacactgtggtcaatacatgacagcccctgactaacccctcacaactctgctcctagaaagagctgattgataatgagaagtgtaagagaagagctggatcacactagaagatttagtgacgtttgccttgaggtcatgtaagggtgcagttgcccacctactgtggttattccccatcttccagcttcgggcagaaggggtgggcagataatgtctagcctccctccagccccgtagtaacttaactaggtcgatgggtttcagattttctatcyactattcttcccagccttggaaagcagctccagcgagctgatctttggcctcttttcctttctgtcaacacctcttcctgcttccacacggctgaggtggaatcagggcagatccccgtgctagatgggcggatgcccatgcagtgacttaracacggtcggattcgtgtaatgtctaacttttatcttgtcgataacaactcagttatactttttgaatataaacaattctacatctcaagtcaaaggatcatactttttcaactaaaaatctggtcttgaaactgaagaattgcagtgtattcgtggacacagtagggcaagagttttcaaatacaggactgtcctgtaaattctaaggtgtttggatgccataaacatgctgtgcaccatctcaccctaagatttagtttcgtgctattcctcatcttcccatgggagaaagggttcagtgaattgtggtcaatcgggctgttttgttcrtgtaactttggaagactggatctaatcctactccttatggaaaagagatagaagatcttttttggtgatagaaggtattgaaggcatagtgttgaatcaagtgaatttattattattttyttttttgagatgtagtttcattattctcgcccaggctggagtgcagtagtgagatcttggcgcactgcaacctctgcctccagggttcaagcgattctcatgcctcagtctccggagtagctgggattacaggtgcgcatcaccacgcctggctaatttttgtattttcagtagagaaggggtttcaccatgttggccaggctggtctcaaactcctgatctcaggtgatctgctcgccttggcctcccaaagtgctgggatacaggtgtgagccactatgcccagccaatcaagtgaatttaattgctaacatgtagtttgtacaaaggactgatctcccctcacttaaaatttgccagcaataaagaaccctgtggcagtctatagttctggaaaaatcaggagcagaaaaagtgcctataactgggaagagggggtaggggaacttgcagaacatactgaatggccctttcttcccatcatcgcatatccaggcagtttaaagctgctggattctaatctctttgaaccggtggttattactggctkctggaacgtaatctctgaagtacaattaagctggtctcatggtttgaaaccagcatcttattccttattaccaagaacagaaaattcccatagcaaactttgtcctcttgtcagggcattttatctgggagttgcaagccctgcttcagtgtggctctaacaagagagccaagatgtggcgtgggactgactgatgggcaccagacatgggtggtgctttgggtatttttccagttttgatttcctctgacctggttgcctggctgtcaggatttcttttccttcaggaggcaaaaaatggcctttaacttgaatggtttctttaaaaatcagacctttgctggtcagactgcacttttatctgacacagagaaaaggcactagaatggataggaagcgtgtttggggcagtgggaattctcttcttcccggggtccctggagtcagtgtagctcaagaacacagaaggacccaaacaccccatctggacccaggtgttacagctacgtggaaaaggcatgagattgattgcaatgagctcgacaccgggaaaatttgattcaacgccaactgagtgtgcaagcaagtgagatgatcagagtcagatgcagttaatcaggaagctgcctgggaggagtaattgagtttaatgtctcagtcatagactcaaagacgcttatccttgggaatggattttagttccagtctctttattttacatgtgagtttaccctagagggaatatgcccgaagccacatagcaagttaatgatagaattcgagatagaagccaagtacccatactttcagccaagcctgtttccccctaagtcataaaatctgcatggaagaggaaaggttggtgaacagagtgaatattgattcttttatacatggaatggtagaagaccagagaaagggtttttgactgtggtctgcattgtttttctcttttttgttttttttttgttttcagagatagggtctcgttctgccacccaggcaggagggcagtggtgcagtcacagttcactggtgcctcaaactcccaggctcaagcaatcctcccacctcagcctccttggtagctgggaccacaggcgtgcaccaccacatctggctaattttttattttttgtagagacagagtcttaccattttgtagagacagagtctttagcccatgcaggtctcaaactcctaggctcaagcagtcttcctaccccagcctcccaaagtgctaagattataggcatgaaccattctacmcatccctgtggtctgcattctttgggaaaatgaagaatagagtccaggttttctaatacccattgcagctgggccatcatctaaatggcccctcaaatttctataatactcctgctttcctgtgagtattgaaggcaaagctattttttcttgtgactttgtgtttatctctagacattctaaaaaaagaaaaaaaagttataaacatcgggaggccgaggtgggaggatcacctaaggtcagaagttcgaggccagcctggccagtatggcaaaacactgtctctactaaaaataagaaaattatctcattgtgtggtgtrtgcctgtgatcccagctacttgggaggctgaggcaggagaattgtttgaacccaggaggtggasgttgctgtgagccaagattgcactactgcactccagcttgggtgacagagcgagactccattaaaaaaaaaagttataaatatttggactaaaactacaaaaagtgaggcttcaggtatctccgtatctccaagtagaagagggagaaattttaagcaaatgcaggaatatctttgctatcttgaaaaaaatttagattgttttattttgtggacacattcttcattcacattgaaagcagagtattacagagtgttattttaaatttaagctgtcaaagtttgtttttgagtccctattgtgttccaggattgtgctcttttgtggagagggtcacagaaattcttggatgatgtgacagtggcggataatgcagaaaaggctgaagtgagtgatgacgagagataaccgagaaggcttctacaacaggcgggcctgggcagtatgggattcaggaaagaaagagctggaaggagagcaactggagagagaaaatagagcctcagaggagcttagcatatgctcttttttttttttttttgagatggagtttctttcttgtcacccagactagagtgcaatggtgtgatctcggcttgcagcaacctctgcctcctgggttcaagcaattctcctgcctcagcctcttgagtagctgggattataggtacccgccaccacacccagctaatttttgtatttttagtagagacggggtttcaccgtgttggtcaggctggtctcgaactcctgacctcaggtgatccacctgcctcggcctcccaaagtgctgggattacaggcgtgagccactgcgcccggccagcccgtgctcttttggtgagtgtttggttttctcttcrcctgtcctcatatgcttcccccaaaacccatgaagtgtcagggaccaactattatgtgaaacatcttgcttagaacgctcttaggaatgtagcaacaaagtccatctccttgaagtgaatggggaaattgtttcctttggtgtgttatagcttgtctattcagaattcacttggcacagtatatcagagaagaatgactgtcttcatccttccttgggggacaaagttggcagacaaggctggtatggacgggcaataattaaattgccacggatagtgtctaatgtaactgagactaagaacttgtgcacatgtaccccaaacaaagcactgtgtcacacagargatccccggagcctttgaaccctttctttaccatattatgagaagcaatatcttaacattagaaaacactttgaatagctaaaagtggacaaatgcgttgcaagaaagaaaacaagagtctctttctgcttagcagttttgaaaagcaaaaactgacaggcttaatttctcacttctttttccaattttgaagaaaatgaaatggaaacattttatataagattgaaggaaaaaagcagggtttttacctttgcttattaaaaatagtatcttaaaagccctcatttttatgttttgctaaggactgggggatgaggaagaggcaattcagaaaatgctaaaagcagtaaatgtaggtagtttcaaaattttaaacaggctttgccttctgtgtttttttaagatcagtggtgttaacagagcatattgcaatcacagataaatgggttgttcatctctttcctttgtgttgccacagaactttgaacttgtgttagggtttcaacacactctgctaatctcagttttgttattgccccctactttacaccaaggcctctttcctcctcatttattctttgttaaggagtattttggatgttttcagccctgtttctagtctacacctggtccaggaatctgtgtccttaggatcgtcatagaaggacatcactagagaatattgtgtgctgtcaacatctctctctgtgtgtgcattgttttttggggggttttttgtttgtttgtttgtttgtttattttacagaaacaaggtctcgctatgttgcccaggctggtctcaaactctgagactcaagtgatcctcttgcctcggcctcccaaagtgctgggattacagatgtgagccaccacgcccagccagtgtgagttgtttttacagcagataagaagaatgttttcttataatttcagaagtatatggttatataactatatcatgactttcaactataaagaagaaagaaatggggctgggcgtggtggctcacgcctataatcccagcactttgggagactgaggcaggcggatcatctgaggtcgggagtttgagaccagcctgaccaacatggagaaaccccatctctaccaaaaatacaaaattagctgggcgtggtggcgcatgcctgtaatcccagctacttgggaggctgaggcaggagaatcacttgaacgcgggagggggaggttgtcgtgagctgagatcacgccattgcactctagcctgggcaacaagagcaaaactccgtttccaaaaaaaagaaagaaggaaatagattcatagtatatgtggattcagtggaattctgtggggttttatttaactaacatttcaaaagtgatacacagaagacttttctctgaaygcagtacctaaagtaacatccttcccctatatacgcaagatcatattgtcctatttattcttcttatacttttcatcatcagaaattatctcatgtgtgtatatatattatgatataatatatggcgtatatatttactttcttattgctgtcttaccttctctggaatgttagatccttgagggcagaaactttattaccagcacatagtggatgctcattaacttaaaaaaaattaaaatgaagacatcaatcatttaggtcaggggtgtccaatcttttggcttccctaggccacattggaagaagaattgtccacatatgagatacactaacatgaatgatagctgatgagctaaaaaacaaaaattgcaaaaaaaatatgataatgttttaagaacgtttatgaagttgcattgggctgcattcaaagccatccagggccacaggttggacaagcttgatttagaagtttgtgatggcttaggtgtcaagtatttgattcttaaaatgattgaaaaacaaatgattagttagttgtaaggtaatttagtttggttacagtaagttactagtgaaaccaagattaacagtttaatatgtggatggtctaacaattggggaaatggggactttaaaataatatttaaaattatattttctagtatttcttatctctgaaattatttctccattcataattcactcatttagtacatttgctagagtgcctacttataccagctatattctagggacacacaaatgaacaaactctctgtcctataaaggcctaccagctaagcagggaggcagatgagccagtgtaacccagggttctccatgctatcatgggaacaaattctgggcactgtgggtgggaccgctaacatgaagttgaagtttcaaggtagagacatctaagttgagactgaagaaatcagaattaccagttggcagagggtgtagtgtgagtcagaaaaggataggggtggggtagatttggaggaagaggacaaaagaagaaataacatattgagaggatctggagccttggagagaaatggatgtgactttgcatggaagggaacatagattgttggggtggagactggtatgaaatgcagctgggaatgtgtggaagagtcaagatatggaaggatcaagatatgtgtctggaggacattgagactcactggagggctttaaacccaggaggggcatggctagagttttagggtacatggatgatttgatatgtttgtgagtatgacccactgtttaccctacaatcaccagtttccacagttgcaagaggggagggtgtagaaatggctcgggagaaagccattcctattaatatattttcttaaaatccctggatgcatgcagcttactctatgacacgattgattaaataacaccttataaagaatcaggctaggcgcagtggctcatgcctctaatcccagcactttgggaggccaaggcgggcagatcacttgaggtcaggagttcgagaccagcctggccaacgtgatgaaaccccatctctactaaaaatgcaaaaattagctgggtgtggtggcatgctcctgtagtcccagctattcaggaggctgaggcaggagaatcacttcaacctgggaggtggaggttacagttagccgagtttgtgccactgcactccagcctgggcaacagagcaagactccgtctcaaaaaaaaaaaaaaaaaatcaaccaggccaggcgtggtggctcaagcttataatcccagcactttgggaggccgaggcgggtagatccatggtgagaccctgtctctacttgaacccaggaggcagaggttgtagtgagccaagatagtgctactgcactccagcctgggtgacagagcaagactccatcacaaaaaaaaaaaaaaaaaagaatcggccaaaagatgttccctctcatctgtctgacattcccgttaaaaacaaacaaataaaaaaaggatgttcccatcctctgtcacacctttktctaagaatcttttcttcatcatrttttctcatcttagaacaacaagctcaccctcttccgccagctgcagcagatgacgtacagcctratcgagtggcggtcccagatcctgtctgggacgctccccaaggatgaactggcagagctcaagaagaaagtcacagccaaaattgatcatgggaacaggtaggtaaaccagggatggcttttcactgaaaacttggcgaacagtgggcatgttcacgctaatgacactgtttgcagcgacctttgatcttagagttgccaaagaataatgcttactgctctcattttgtctttgaagacatttaattttgttgaaaaaaatgtcacagttccctccatggccaggctctgtgttggatctctgatcccatggaggtgacagatgatcaggaaagatgggtcttggactgaggctgctccactccaaataaagaaaacaaaaacaaaaaacctggctgggcacagtggctcacrcttgtaatcccagtactttgtgaggatgaggctcgaggatcacttgagcccagtagtttggaaccagcccagacaacatagcgaggccccatctctacaataaatatttggaaattagctgggtgtggtggtgcacacctgtcatcccacctactcgggaggatcacttgaacctggaggttcaaggctgcagtgagccatgattgcatgcctgcactccagcctgggcaacagagtgagaccctgtctcacaaactaaactaaactaaaatccctgaaaatgaccaagcctctgaagttgacattttcagatacttgggactgtatctatttttattctaacagtggattccaaatcaataccagactcattctctttatttctcttcatctccccctaaccgggaccattgtctatggtgtgtgaaaagcagacttgcaggagtagtaaaacatgtttgtagcctgttgattatggctacaatcacctctacagagttaatcacttcattaatcttctgattaactcaggcacatatccaggctccagatatcactgcctttaggaaaatgagaaattcagtcctatatccaaattggtggtggcctggggtttttgcctcctgaccagcacttttttaaaaggcaaaagtggttcctcggttagctgttattggtgattcttttggaattagtttcattttctaaatttcttcaacttgtgcatatgtgatttttttcctcctcctctaccttgcttttctagtgtcggaattcttggatatccctcagagacctattaaaatatagatcattatgccacttatttaaatgtcatagactctgacaactatattctgaagtagccgaagtgaacatgccatgcaggattcagattcaagcagtatttaggaaacaccttctatgtacatttcatatacattacttgattataatcttaaaacatagggttgaggtagctgttattatttacatcttatggataaagaaacagaccaagtgagcttaagtgatttatttyccagtcacatagataataaatgggaaaggttaaatttgaacccaagacttttgactccatgtctaatgctgccttcttagggttaagaattaatagtgcccttccctattacttgaccacccagaagaccataccyacagtggctgcactgccaggcttgtggtgtcagaggacttattaaaaggccaattaggccaggtgaggttgctcatgcctttaatcccagcagtttgggaggctgaggtgggcagatcaccagaggtcaggagttcgagaccaacctggccaacatgatgaaaccccatctctactaaaaatataaaaattagctgggcatggtggcatatgcctgtaatcccagctacttgggaggctgaggcacaagaatcgctggaactcaggaggtggaggttgcggtgagccaagatcatgccactgcactccagcctgggtgatagagtgagaatccctctcaaattaattaattaattaataaaaggccaattgggtrggataaggaaactccattgcacataggacacctctgtcatttggtgtcttgccatgacattggcctggaggtcccgtgatctctggcacaggatgttcacaccccacaaacggcagaacatgacttctttcccgttccagctcttggaagtcgctcaggaaatggagctgctgtgtcagtgccttcctgatccagtctccgagcagccagcatggccattgttcatgagtctgggtggcctgtgggtctggccgccatggaaaggaacctgccagatcaaatcacttgatagagatgctgtaaaacagggaggagggagaggaggcatttttgctttcttcccaaagacttggcacattgcagtgttatccctgagcggtcttgctctttggtaccgggaatgcatgctgggtattcggatagcagtatcctatttccaccacagtcctcaacttcttgagcctaagcaaaattttttctacttctgtgtgcactttgggcacaaaagccttgaggggagggattgcacccacgatatggccsttagtattcccaagcatatgcagagctacaacttcacacacagccaggtgtttgcttctactagttgctgcgataagagctgtgttagtccattctcacactgctataaagaaatacctgagactgggtaatttataagaaaagtggtttaattgactcatggtctgttggctgtacaggcagcataccagcttctgcctctggggaggcctcaggaaacacaatcatggcagaaggggaagcaagcacgtcttacatggccagagcaggagtaagagagagagaggtgggaggggctacagacttttaaacaaccagatctcgtgagaactctatcacgagaacagcaccaaagggatggtgttaaaccatttatgaaggatccacccccatgatccaatcacctcccaccaggccccacttccaacattggggtgaatgtgagatttgggtgggaacatagatccaaaccatatcaagagctaacatttatgcttaagctgagagtttactgtatgctacatatagtattaggtactgtacatgcattatcttattaaattctcacaacagggccaggtgcaatggcttatgcctataatcccagcactttgggagaccgaagtgggaggctcacttgaagccaggagttcaagactagcctgggcaacatagcaagaccccatctctacaatttttttttttttaattagctgagcatggtaatataagcctgtagtcccagctacttggaaggctgagacagggactgcttgagcccaggagtttaaggctgtctctaaaaaaaawaaaaataaataaattctcacaacaaccttgaagggtaaggaatgtatacaaatgaagaaaccaaagttgtgcagaattaagtaaattctccagggtcataatgttagcaagtattcaagccaagattcaaatcctggtctaaatgacaccagagcccatgctctgggcatgagatagcagcaagccaggacttacttcactcgtctcctttatgaccatcttaagttaaggaaatcaaggcaagccctcaaataattgttcattggtccttcatagcaatgtaataaacagtgagaccacgcccacttggtctgttcctttactcataaaatggaaataataacatttacctccaccctacctcatggcattataatcaatcaatgtttgtgaagtgtatataggaggtatgtgtgtatgtatttatttatttatttattgtttcagacagggtcttgctttctcatgcaggctagagtgcagtggtgcaatcctgactcattgcagcctcaacttcctgggctcaagccatcctcacacctcagccccccaagtagttgagactacaggcgtgtgctactacacctggctaatttttgtatttttagcagagacagggtttcaacatgttgcccaggctggtcttgacctcctggtctcaagtaatccgcccacctcagcctcccaaagtgctaggattacagacgtgaaccacgacgcctggcaaaggaggtgtttattaaacacaggttgaatcttaattttgtttgctctatttacttcatagttcctcttcataataacagaagattacaggcaagaagcattggccagaggaatttagtcagaatcagtgccaattttacttttctcttcagggtctatggaccatatttgcatatccttctacgactttggctaatatcatctcatgagttttctaacagtgttgaaaggtggcagaaactgaaatgagaaaagtcaatgaggtgtgcttccctgggcttgtccagcatctccctttctaactatggatcctctgggctccttgacaaggactcctcagtaaaaagtctgcccctggtgaggagaaccagctgactactcctttctctccagaatgctggggttagatctggtggtgcgagatgacaatgggaacatcytrgaccctgaygaaaccagcaccattgccctcttcaaggcccatgaggtggcctccaaaaggattgaggaaaagatccaagaagagaaggtacagttyctcaaatgtgaaattctgcccactgaggttccatttttgccttggtttttaatgaaagaaagggaaatcattgagaacaaaactacttctgtagttttcgtcctcattttaaaagtgaaacatagcagaaaggatgaggcaggtatatatatatatatgttctgatatggaaagatcgcaaagatacgtattaagtgaaaagatcaggatccataatggtatatatgaaatgctattatttgtgtttcaaaaaatgtatataaatctatgcttgcatatacatagactaactctgaaataatagacaagaaataattattaatggatgcatctgggaaggaaaacggggtgggagggagacttcttaaatgtgtaatctcttgcattcattgcatatattgcaatttcaaaataaatagtatttatttttattttttatttatatgtttatttttgagacggagtcttgctctgttgcccaggctggagtgcagtggtgcagtctcagctcactgcaacctctgcttcccgggttcaagcaattctcctgcctcagcctcccgagtagctgggattacaggcacccaccaccacacccggctaatttttgtaatttttttttttttttagatggagtcttgctctgttgccctggagtggccagatctcagctcactgcaacctctgcctcctgggttcaagctgttctcctgcctcagccttccgagtagctgggattacaggcgcccaccaccacgcctggctaatttttgtatttttagtagagactttcaccatgttggccaggctagtcttgaactcctgacctcctgtgatccacctgccttggcctcccaaagtgctgggattacaggcgtgagccaccaagcctggccaatttttgtatttttagtagagatggagtttcaccatattggtcaggccggtctcaaactcctgacctcaggtgatccaccctcctcggcctcctgaagtgctgggattataggcatgatccactgcacccaggctaaaataaataatatttaaaaataaagtgtttgaaagacttcaaaggtaataattggacattaaagaaaaattagaatccatgcatggtgcctcatgcctataatcctagccctttgggaggctgaggtgggcggatcatttgaggccaggagttcaagaccaactgggcaaatagtgacatagtgagaccccatttctacaaaaaattttttaaaaaattagctggacgtggtagtgcatgactgtagtcccagctacccaggaggctgaggcaggaggatcacttgagactgggaatttaaggctgtagtgaactatgatcataccactgcactccagcctgggcaacaaagcaagaccctgcctcttaaaaaaaaaaaaaaaaaaaacttactcatattttgatttctcagacccaaacatattgacattttaatatgttttttttccagtctttctgttctaatgagtaaagatttgtgtcaattttctttggtttgttggtttgtagtgtttacttctttagcatggtcatgataatatttgtgttctgaatccaatggcaaaccacacctgaaggtaaagcctttctagtggaatattttgtttttaatgagagttatttctttatccaggataatggatcatgatgtttgtgcttttgagcttcattcagaagctattgtgtaagacaagcacctcttggagctaccaaaaccctggaattatcacctttagacagcatttgtttgaatgtctgggattcaaggccctgaacaggacagtcttgatcactgaaaatataatgattatattttgctcactgcatttgtccacttacatacactttttcttagcaaatgcacttcctctygggtgttatctgtgttttgttttttgttatttattgattaatcaactgattgattgagacagggtctcactttgttgcccaggctggagttcartgactccatcataactcactcactgcagcctcctctgttcccaggtagctgggactacaggcacagctaattaaaaaaaawtttttttgtagagacagaggcttgctgtgttgcccaggctgktctcaaattcctgggcctctagtagcactgggattacaggaatgagccactgtgcccaggctttgtctgccatttgcaggcttatttatttatttatttatttttgccaacatttcccatttgccaaaatcaagatgtttttctctgttccctctttgttcagtcaatcctgcagaacctcgatttgcggggccagtccatcttcagtaccatccacacctatggcctctatgtgaacttcaagaactttgtctgcaacatcggggaagatgcagagttgtttatggccctctacgacccagaccrgtccacttttatcaggtagcagagacccacatcccctgctgctgacctaacaaagatacccagccttcccctgacccctacccgggcagctctttgccagatttgagaagagaaaatagggaagcatggaagatttctaagcagtagaatgtaaaatcatatggtctatgaagccttcatatgtcactactagaacaatgaggccagtttgtatactctctgggatttagagatcacataaaactcattagggcttggagatgggaacaaagaattcaaaacagtgtgtgggagggtgagaaagggatgaataggcagagcacagaggatttttagagcaacggcagtattctgtatgatgctatagtggtggatgcatgtcattatgaatttgtctaaatgcacaggacgttcgatgccaggagggaacccttatgtaaactgtgggctttgggtacatgatgtgtcaatgtagcttcatcagttttaactaatgttactactatggtcgggggaatgttggtagcaaaggaggttgtgtctgaggggagagaatatgttatgggactctattttcagctcaactttgctgcaaagccaaaactgctctaagaaaataatgtctattaaaaaacattttttttaagactctaaggagtgtgatgggcattgttcagccctacagtggtactactgtttagcagctaagaaaatggagaatttatttttgagaagatagttaaaagtaattgctgacaatttgtttctttaaaaaaaattttttaatgtcaatgtggattacaggggatagatttggaatgactgttataaaattaaattctttttttatcttttatttattgtttattttttgagacagagtttagctcttgtcgtacaggcccgcatcctgggtccaagcgattctcctgcctcagcctcccaagtagctgggattacaggcacctgccaccatgcccaaccaatttttgtatttttagtagagatggagttttaccatgttggccagcctggtcttgaactcctgacctcaggcgatccgcccgccttgacctcccaaagtgctgggattacaggcgtgagccactgygccctgcctaaaattaaattattaatttagcaaagctgaaacttttattcaaagattttgagatggaaggacaacccagaccgtagcatcccataagctctaccatgtctgtgcccaccaggagcagtgggtttcctgcatctgtgtggggcatgtcttgcggagccacagcagggacgcttctctaatgccaggacacccagcagtggccatctgtgtggtcccagttcccaactcagctgttttcacaccggcctgttgaatttcactgagcatttctggcctttcctccttcccttgtaagtctatactragggtagcctcatctccaaccccagttagcctctcattaagagcaattttttttcctttgccagtgagaactatctaattcgttggggcagtaacgggatgcccaaggaaatagagaagctcaataacctccaagcagtgtttacagtaagtcctcccttctgtttaatcattctctttgtttgtgatatgagcatattcacataatgaatatgtggaaaacatacaaaatgaaaagatgaaaggaaaaatcatcaatctgcctagcaggaataacccacccatttattcaacatgtacttcaatgccaggcactgatttagacacttgagatacatccgtgaaaaatcggggaaaaaaagcagcttttgtcctgattggtaagacacataataaacaataatcaatccaggcacaggggctcacgcctgtaatcccaggactttgggaggccaaggtgggaggatcacttgagctcaggagttygagaccagtctgtgcaacatggtaaaaccctgtctctactaaagaatttaaaaaaggaaaaatgaccttaaagtacaagaggagtgatgctggcaattcggatatgccaaagagaagcgtgctccctttaagtgaaaaggtaaaactttataaatacttatgtataggaaaaaacagcacatatagagttcggtactgtctttggtttcaggtatccaccaggggtctcagagcatattcatcacagacaagsgggggctactctatcaatgtgccacaatatatgtaactagtcacctggagtctttatttttccattaacagaagccttgcagacctagagtagaaatgcagggtggacgttatcattgatgtatatcttggagacctgagttaactaaattacaggggctggatttggaatgattatgttaaaagtgattcttgcttcagtaaagagagcttgggcagctgtttcatataaccaatttgagatgtgattagttttttttctgaagtcgaactgaatgagagatatcagctcattcctgggtttactcacccatccttaagaaaacaaataatggctgggcgcggtggctcatgtctgtaatcccagcactttgggaggccaaggaggctggatcccttgagcctagacgttcaaggccaaggccagcctggataacatagggagaccttgtcaaaaaaaaaaaaatacaaacaagtgtagaaccctagctgcaagagaaataggtatttcattgacacatctgtcatgattcagtatacactgataagctctcaatagagacctctcataaatcaggtgaatagtcccataaagcagtgcctgtctcatagttgcctcatgggcttgttttgaagaggaaatgaaatgtcacagacttgtgtggatacccaataaatgtcagtgttacacaagtttttacttcatttgatgttgaaatgcatcctgtgctgagatacgtccaaagatatacaatcgcaatgatgagggccctgatttttcaataccctgcttaagctgatgaactggagacttycaacgggctgtgatctgatttgtaaatttgaagtaggaactggggaacaaaaaagcacttgtttacaagcacaaagtcatgttytctgatgccataatagctcttggatggagatgggggagaagagagtcgttctaatacttcagcattgagaaataaggtcggaacaggattttgttgtagagggtaaagaaaaaagagacacaggtgacacagtggtccagccccacctcctctcacactttctctgcccctttaggaccttagcagcatggacctcatccggccccgcgtcagccttgtrtgccagattgtccgcgtgggccatatggagctgaaggaaggcaagaagcacacctgtggactccgaagaccttttggagtggcaggtacaagagagacccagagacaaatgtgaaatagtgcagtgctgtggaaaatagcatggcgatttctcaaaaaattaaacatggaactagcaaatgatccagctgccctgcttyraaacaatcaaaagcaaggtctggaggagatatttgtgcatccatgtttgtagcagtattattcacaataggcaaaagatggaagtaacctaggtgcccatcagtgcataaatggactaagaaactgtggtgtgtacgcacaatggaatawtactcgccttaaacaggacgggaattttgactcatgctacacacwgcgtggatgaaccttgaggactttacactaagtaaataagtgagacacaaaaggacaaatattstatgatcccacctatatgaggcacctagagtagtcaaattctcagagacagtatagagtggtgagtgtcaggggctggagagggggaatggggagttagtgtttaatgggtacggagtttccatttgggaagatgagaaagttctagagatggaaggtgatgatggttgcacaacaatgtgaatacacgtaatgccactgaacggaatactttaaaatgggcaagatggtacattttatgttatgtgtgttttaccacaattttgaaaatagaggaagagaaggaggaaaggaggaagaaaggtggaagaaggcacagagatagtaagagatggatcacgttgtcattgtcagtatcagacacgcagcatttactgcctggcactgcccgttttctttgcatgggttctgtgtcctcacctggcccacgctcctttctttcccccttagtgcccaacactgtgtcttatacacaatagaacctaagttgtgactattggaatcctccctgtctgggtctgcgtattgattttagtggaataaaatactcgctgggaagtggtttgccrgtctaggaaatttactcttcgaagacaatgttgtgtttgtttctaaatgctttcagagatsctccttggcttacatcaaaccccagaacctgcttaaacgcccagcatcttcctctgtagtttgttcaattgaggaaatacattttgggccttacattgacattttggttgctcatagattgaaagcgatcaaggaaatgttataattctgctcctggacctttggttccatacttactaaaaagtaacctgatgttaaatttctcaagaatttagcaactcgggcggggcacgatggctcatccctgtaatcccagcactttgggaggccgaggcaggcagatcatctgaggtcaggagttcaagaccagcctggccaacatggtgaaactctgtctatactaaaaaaatacaaaagttagccaagcgtggtggcatgtgctgtagtagtcccagctacttgggaggctgaggcaggagaattgcttgaacaggggaggtggaggttgcaatgagccaagattgtgccactgcactccaacctgggcaaaggagcaagactgtcttttaataaaaagcaaaagaatttagcaactcgatcttgtagagtttttaaagtgggtagtctgcaaaattgatccagtaaaacccagaccccttccttagcacctcatgagtcacttttttgctgggctaggtacactgggaatcaccattggcaaagaaattttaaaaaagtccctgcttagtacctttcttcctgcagtgtttgatgtttgctgatactgtccttttccatagtaacttactgaggcatgaagcaattagtttctttaatgaagtttatctttttcctagtgatggatattactgatatcatacatgggaaggtggatgatgaagaaaagcagcattttattccctttcagcagtaagtactttggcatgtgtcccagstgacttgagacctggattagccattcaattgtcttttaacacagaaacaggtgttagaaaccattttctcagagaaggaaagattctaagctgcaagattgtcagataggagctgaacagaagamtttattcaaagtccttgatgttggactcccattgaagagggtaaactgaactttcctgattctatagaaagcatcaaaggaatataaaagggcacatatctgtctgctctggaatgcagagagggtgccgtccttgtgtcagcaatgccaaaatatatgtgcagtctattgcatgaaacaggcatcatggatgacacggaatcacgtgggctagcatagggcttctcagactgcatcatgcatatgaatcaggggaacttgttaggctgcaggggagttctgcctctgacaagctcccaggtgatgctgatgtagctggtctgagggccacactgtctgtagcgagggtttaggagatgagagagtgaagggctgacccacccatgggccagtgttcctgcatgttgggggaaagccagcctgggagcatgtgaaaggatccttgcagagctttactgaggccctccatattgagctgcaggagctggagccatgggtaggccattgaggagctgttgggagcagattcaagccgtgtcactctgaagaagtgcaggtgtgaacgtcatgacctgctccagcacctgcacaggcagtggaggcctagtggaggccaagagcattgccgggaccaagtcccaccaggggccatcgtgccagtcagagggcatcatctcagctcacttgcagctgccactgcagacaagtagaacaaactgagaattccacaaaccagccagagtcatatatttgagttaatatatcactttttacaaatgatatcacaaattagtggagaaagatacattatgcaaaaaaaaaaaaaaaaggtttttggagaaagttagctagccatttaagatcccgaagttagattccagtctcacaacttatgccagtgtaaattttagatgattaaacatacaactgtaagagctagaatcttaaaatattaacgggaaaatagaagttttatgtggtagtcatgggagggaggccgttttaaagattcagccaaaaaaagaaaaattgataggtttaaccacccaaaaactgtaaagaacttaatacatagaaaaaaatcgatacagtctttgcactgtgtttgagaaaggatgaatatttgtaatatataaagaattaatagaaattaataaggacatgaagggaatacacacacatacagaaatggtgttgtacatttattgaggatgagtgaaatgcaaatcgaaacatcaaggtttattttttatcttgaccacactttagtgtttgggtagatataaggagacatacattacttatagagaatatgaattgttacaatgcattagaagtcttaaaatttagatatttcaaaaaatgtactccatgattaacagtgattatttctgttgatgtaactcttggtgattttgctcctgtttttgttttcctgttgtctgttttttatacaaaaaatatgtattatatgtaatatataaaatataacaattttaatctttcaatgttaagtccacaccttcggaccagtttctaaacataatagtgcaaatagcccatgctaagtagtacttgtctcttttatccagaggctgctatgaattatttttttaaaatatggccattgcactccatcctgggtgacagagccatacgctgtctcagataaaataaaatataaggtaaaaatagataaaataaaatagttaaaaaataaaatgcacttaccttgtatgctaccacctatatattgaccttccaagacgagacaaatattttatgtagcacagtgctaaagttaattrtgtgataactttcatctccatgaatgctgctcttgttttgtgcataatataaaacactgcatgcacatacctatataaatatgtattgtataatatataaatatgtttaagtatatttaataaacatgttgaatttaggtccgggcgcataggcttacgcctgtaatcccagcactttgggaggccaaggcgggcagatcacaaggtcaggagatcgagaccacggtgaaaccctgtctctactaaaaatacaaaaaattatctkggcacagtggcgggcgcctgtagtcccagctactcgggaggctgaggcaggagaatggcatgaacctggaaggtggagcttgcagtgagccaagatcacgccactgcactccagcctcggcgacagagcgagactccgtctgaaaaaaaaataaataaataaaataaaataaataaataaatatgttgaatgtaatacaatgttaatttgttaattacatttataaatatgctaaataaaatacaatcatgcatcacttaatggcagtgatacgttctgagaaacatgtcactaggctctcttgtcattgtgtagacaacatagagtgtacttacacaaacccggaatatatagactactacacacctacgctgtatggtatagcctattgctcctagactgtaaacctgtccagcaagctactgtactgaatactgcaggcagttgtaacacagtgctatttgtgtctttaaacatatttaaacatagaaaaggtaatgagttgggctgagatgttaaaacagctataatatcactaggcaatagaaatgtttcagctccattaataatcttttttttttttttgagacggagatttgytcttgttgcccaggctggaatgcagtggcgtgatctccgctcactgcaacctcacctcctgggttcaagcaattctcctgcctcagcctcctgagtagctgagattacaggtgcatgccattacacccagctaatttttctatttttagtagagacggggtttcaccatgttggtcaggcttgtgtcaaactcctgacctcaggtgatccacctgcctcggcctcccaaagtgctgggattacaggtgtgagccatcatgcctggccagctccgttataatcttatgggaccatggtcatctaggcagtctgtcattgacagaaacattgttaggaatatgactgtatattgaataaatataaatgtaccatatatattatagtactatgaatgtgttatatttgtatttaagattatatgtacataataggagtgaccttcatggatatgaaaggtgtctgaaacagccatctgtatatttgctggtggtgatgtgcctcctgcttaatttctgaaccagctttcctccagcaaccatatcacagtacttagtcctgagattgtccccactgtataatccgtgccttgagtccctgacgaaccctgccttaatttcattactgctcactgtgcagccaacagccgcagtggagtattcatgatgcagactgcagcctctggcattgaatgcctaagatttatggcaagcgctactataatctacttcaaaaactttacagtgttttccagtaggagagtgttgtatgtatattctgcaagtccatttagagagaatcatttgtaaaaaacaggaactcaagactatagcaatcccatttgccagtcacatattgcagtgtgttttattgtcagggtacagggaaccctgcagagaaaactggcctacatgcagtggacagaggagacaggagactattgtactgcaccaggccgatgtgcagttgcttatagtgcttctgccttcagtagaatggaggctgtatttggttctttgatcgccctttacaagccgcagcctgataaggtcactcaagtggagcytgtttggcagcaccyatgccaagatctagcttgtcatcacatggaaatctgagaacatctaccagacaccaggcatatacactgtgctyatatatagggggttgacactagacaggagccttaacaggcatgcgatcccagcccatctcttacagatggagaaactgaggcccaaagggagcctcttgcagagctcactatcaagcagaagtagacctgggggctcctgccccttccgtgggtgctctgtcttcaattctattgcagcagcctcttctgcctctgaaagagcatggagtgttgcctctgattttagttgctaaccgttggtcaccagttttgtgtactcttgggtttttttcctccstctttgcctcaagtcatttccaaggtgaatttagtatttaagatgacacaaaatggaaaaataaaggaaagatagaaagataggggtacttagtgttgatatctccaaattattcctatatgactcaccattatctgaggttgtgctgcagagacttcctttctccccctcccaccttacctcttatttctctttcccaagaattgcgatggaaacctacatccgccagaggcagctcatcatgtcgcctttgataacatcacacgtgattggggagaatgagccactcacttcagtcttgaataaagtgattgcagcaaaggaagtgaatcacaaagggcaaggtacagtccagtgccagagctgggagggactctgctgagggtgggggacattcacagctgggtccttggactcctgccctttattatctttctctgatacaaaacagcctctgctggggaccrtccccctcagcttccaaccacaggcttttaatactgaactgcattgagatgcacccagcggtgatttgatcacagttgtgttttgtaaattctttggaacaaatttttatcccatgagtctttactctttattcatttatttatttatttatttttgagactgtctcatgttgtcacccaggctggagtgcaattgcatggtcttggctcactgtagcctccacttcctgggctcaagcatcctcctacctcagccttccaagtagctgggactacagacatgtaccaccatgctcagctaacttttaarttttttgtagagatggagtctcactatattgcccaggctggtctcaacttctggccttaagtgatcctcccaccttggcctcccaaatccctggaactttaggtatgagccaccgcccctggcctccatgtttttgcctacccttcattcccaatgtcgaccctagataataattatgctctattctgaataagtttatcccatcacattttttaaaattgagaggaaggaaaccaaagtaatacagatgaatatgtattaatacaaaataatgtaaaaattgtagtttttagtatctccatatcatgttctgttgatagagtgtgttggtgcacacctgtaatcccagctactgggaaggctaaggcatgagaattgcttgaactcgggaggcaaaagtttcagtgagccgaggtgatgccactgcattccagtctgggcaacaaagtgagactctgtctaaaataaaaaaaaaagaaagaaagacagaaaaatggtttgttctcagaggtttaatagctatacacttcttttttcttttaacattctgccttctttttctatgtaattcattattgggaatttaatgaaaatacaagatgggaaattaaattttcttaagtagcaagaaaataatcccagcatattcatgtaattattggatttttttcatgatttgttatgcctcttttgccatatattaaattgctatatactatagtgtttcattgtttcatgtatatatcttttttacccctaggatcacagatggttgtagctttactatatattctggtatctggtagggtctatctttaccccttttttcccccaaagttagcatctgttcacatctctgtcaaattctcaaagaggtcctgttgtgattttaatggaagtgtcattaaaattataagtcaactgggggagaatttacatctttacagtaaggttgtgactatacaactcaaatgttcttctcaccagttacgcatgtgttttatacatcatacaaagaactaaacgtttatcttttatttcttttaaggcctttgggtatccttgaagctcttgcccggtgacctcacccaggttcagaagaatttttcacacttggttgatagatcaacagcaatagcccggaagatgggctttcctgaaatcatactgccaggtaagcactttgcatggctcacctgtttgcttcctcctgttcagcgattatttcttattggacggtggaggcaacttggatccagaagacttggttatttacattcattggtcctgagacacctgggacacaaacagagacacctgcaatacttaaacacttaggtgcttyctaatttgtcattattacaaatataaaaacctctgctctgactatccttaccatgaagtcttttccacgtttaagactatctccccgagaaaattcctggaagttggatatacagtgtgcaagtacagtacactgatatacggtgtgcaagcccaagataatgcttttaaacataactcaaattttcttactctctcttttacgcagactctctcaaatagcacagggtgctctgttcaggagactaattggcctcatttgtgtgtccctttcttgttatgacatccccagcatgtgggcgccttgctctctccattctctgaagctccaaaagcgctctggctctccctgttcttgttgtgacaagaatgtcagcattttcctgtttcatcttctttctagtgatctgcatatgtgtgtgttctctggaatttgctgacttcgcccatttaattttaatctccatactaagaaaagggaattggtcccttgaattttatacatattgctataaactaattgatattaatagaaattctagaaaaacaaccatggcttggccgagcagggtggctcacgcctgtaaaatcagcactttgggaggctgaggtgggcggatcatgaggtcaagagatcgagaccatcctggcaaagatggtgaaaccccatctctactaaaaatacaaaaaattagctgggtgtggtggcacgtgcctgtagtcccagctactcgggaggctgaggcaggagaatcgctgaaaaccggaaggtggaggttgcagtgggccgagatcgcaccactgcactccagcctgggcaacaagagcaaaactctgtctcaaaaaaaaaaaaaagaaaaaagaaaaacaaccataccatgttagaaaaattctagaaaaccaacttacctattgcacaaaaattcaggttattttaggccaggcatggtggctcacgtctgtaatcccagaacttyaggaggctgaggcaggcagatcacatgaggtcaggacttcgagtccagcctgaccaacgtggtgaaaccctgtctctatcaaaaatacaaaaattagctgggcgtggtggctggtgcctgtagtcccagctactcaggaggctgaggcaggagaatcgcttgagcctgagaggcagaggtttcagtgagctatgatcgcaccactgcaacccagcctgggcaacagagcaagactctgcctccaaaaaaaaaaaaaaattaggttattttaaagtaatacaaaatcttatttctcctttgagaaattaaggggcagtgataacttgttgctgcccacattgtctacatgtagtgggtcttaaatgagtatttgtggaaggaatgaataaaaatgttataaaatggagatcactcttttttccttttctcataaaagaagatagttttttgcttattttgtccattacatagctattttaccctgatatacattcatcaacattctgggaaaatgttttgtcttcttgttaaggaaaaaaaaaattagtagtaatattctctacctgaaggttgttttactactacaacaagacacaaatctgaaaaaataaagtagagaagtttattctttgatcaaggtgacagcagggttggcttctcctgaggcctttgaataaggtgagtttaccttttaaatctggcttgtaaaagaacatttagttttgtttygttttttaagtcaataggattggttcataggatgccaagggctacattggttttaaaattcatctagaatacggccaggccagatggctcacatcggtaatcccagcactttgggaagctgaggtgggtggatcacttgaggtcaggagttcaagaccagcctggccaacatggtgaaaccccatctctattcaaaatacaaaaatcagctgggcgagttgacgtgtacctgtagtcccagttactcaggaggctgaggcaggagaattgcttgaacccgggaggcggtggttgcagtgagctgagattgcaccaccgcgctccagcatggcaacagaacaagactccgtctcaaaaaaaaaaaaaaaaaaaaattagctgggagtggtggcgcatgcctgtaatcccagctacttgaaaggctgaagcgggagcatcacttgaacctggaaggcagagtttgtagtgaggtgagatcatgccgctgcactccagcctgggcaacagagtaagactccatctcaaaaaagagaaaaaaattcatctagaacaatsgtttccagtgctagtatgtggatcagctaatcaagatctccttgaagatctccttgaaaatacagattcccagatttctagagaccgattcagagctcccaaggtgatctggtggtgagtcaggtctgagaaattcaggtctagacccaactccctgggctcagaactccttcctgttgtcccatcaccacgtgaactcgttccagttgcctcctaaactcttccctgtacccccttgccctctagcaaggagctttgactctcgtcttcagcatcgcaggagtgattctgtccacgctctttctctgttctcacctctgccagccccactccagcctctcaagagtagctctcatgagagtcacccatgatcatggtatcgctacatctgatgggagttttctagcctagcgatcaactctgacctctcagcagcatctgacattgttgaaatatttccttcccttctcattggtgacccctcacttttctctgcttctccatttccctggggcttctgctagaacccctttgccaccttctcatattctgcttcacctctaaatgttgaagttccttgttatttggtcctgagaccctgtgtgagtgtgcttgggctgccatagcaaaataccacggactgggtggcgtcaacaacgtttattttctcacaacaaaggacagggactggaaattcaacaccaaggtgacagcagggatggcttcttgtgaggcctstctccttggcttgcagatggccatcttctcccttcgtcttcacttggttgtccctctgtgcatgtctgtgtcttaatctctttgtatgaggacaccagtcatattggattagggcccacctatatgacctcattttaccttacttactcttttaaaggccctatctccaaatacagtcatattytgcgttactaggggttgtggcttcagcatatgaatttggggaggacacagttytgcccagaacagccctctgtctcacctgtgttttctccctaggggtatcatccactcacttggctttcatctgcctgtcaccttcaaatctgtagctccaggaccaagacctctttaatgaattctaggaccctatagccagctatttcctgcctcaggactcccctcttttttttttttttttttttttgaggcaaggtcttgctctgtagcgcaggctggagtatagttgtgtgatgatagctcactgtaagcctcgatctccgaggctcaagcagtcctcccacctcagcctcccaggtagccaggactacaagcatgagccaccacatctggctaatttaattttttttttttttttgtagagatcaagtttcattatgttgcccaggctaatcttgaactcctgggctcaagcagtcctyttgcctctgcctcccaaagtgctgagattacaggcatgagccacaacactcagcccctccttgctttaattggctaattcttactcagcatccccatttggacctcataattctgtgcatctaggcctgaggcacctctcttgtgttttatctaagaaaatagcacctccatccattcatccatccatccatccacccacccacccacccatctatcatccatccacccacccatccacctacccatccacctacccatccaaccgtccacctatctatctaaccgtccacctatccaacctctatccatccatgtatctatccatccatccatccatccatccayccatgtacccaacctctatccacccatccatccctccctccacccacccacccatccatccacccacctatccatccactgcacaagcaagaagccagaaagtcacccttgatatctccttttcctttataactcacataaattagtagataagacctgtcagcattacctttgaaaggactctcaagtctctctctcccttctctccatctgcattgtcactacccaaattggagctacgatgacctcttccctggacaactgccgtagcttcctacctggttttcatgtttctgttctttctttgctcattttctcttctccttactgcatcctgaatgttctattctgtaagcacacctgatctcatcccgctcctccctcgctgaaaacatcttactgactttcatttatgttgagggtaaatataaaaattcttttttttttttttttttttttttttttttttttgagacagagtctcgctctgttgcccaggctggagtgcagtggcgggatctcggctcactgcaagctccgcctcccgggttcacgccattctcctgcctcagcctcccaagtagctgggactacaggcgcccgccactacgcctggctaatttttttgtatttttagtagagacggggtttcaccgttttagccgggatggtctcgatctcctgacctcgtgatccgcccgcctcggcctcccaaagtgctgggattacaggcgtgagccatataaaaattcttaatttgcccaccggcctcagggggatctgacttatatctgtctctrcagcctcatctcacaccagacaccccctcactgtgaggatgtcagtcaggttgtctcctacctctgggcctttgcacaggccactctccctgactgtgctaacagctgaaaggaaagattcccataccctgcagacgaggtcaggacctggtattgtgcattcacagagcctggcacattcctccattgctaatggtgggtttacttgtgcagattatttgactggtgcttctctctggcacyagactgtaacctgagttggggcaaggctggtgagtggctcaccatmgccacccagacacccagcacacgcctgctgcagagtaggagctcaagcactttttaaaatgaatgttayctccattacgtgattataccataatttattcaactaattccctgtgcttggaaatcgagactgtttccatgtttccacttttataaacaccgcaatgaatatccttacagataaattattgcccacatttttaatactttgagacaaatattaccagtgggattgctgtattaagacttttgacacattttcagtttctccattgacaaagagtgtgtcaagtaagatttcaaactgtgctgtgtgaataagcccctttttcttcatcctcagcaagtgataagcagtatcttatttttttccagttgaggaaatgatgaaaacgatcagtgctctaaatatgcactcctgttttcttatagtgttaaaaggttttgttttttacattgggtggcagtttaatatagtgcaggtgttggaatcattttttcaatacttttttcatctaggagtttaatatacttcacatttattccaagtttcttttatgtacctcaataacatttaatatttttcttcaatatgtgggccacacatttattaattaaaattttttttgctgggtaacaaaaaagaaaaagagcagcagaaagcattctttcattgataaaatcaagtaaactgatttaaagaaataaaaagtactctaggctgggcatggtggctcacacctgtgatcccagcactttgggaggctgaggtgggcagattgcttgagtccaggagtttgagaccagtctgggcaatgtagtgagaccccttctctacaaaaaatacaaaacattagccaggtgtggtgatgtgtgcttgtaattccagctacttgggaggctgaggtgagagaatcacttgagcccaagaggccaatgttgcagtgagccgagattgcaccactgcactccagcctgggcaacagagcaagatcatgtatcaaaaaaaagaaaaacatactctataggctttcagaaagagtgtctacctcatcaggttgttctgtagattaacaagttagtctataatcgattacattaatacatataagacattttgaccattgcctggcacagcatataataagcactcaatagacaattgccttcattattatcagatgtattcaaaatatcacactctccaaggcactattgaaaaaccgtctgccactgtaacctaacaatatatactatgtatttattattagatagaaatttttaatagagaaagaattactacttaattttctgtaaaactacagtgcaaagacatcttggtatgcatggaaaggtaaaatgtgataagctgaagacagcaaacgcatatgaaagcctttygtcggatgagtagttcagtataaaaccagaccatttcgtgttgtctttaccttttatgtcgtatgacattctgaaacttagaatgacttctctcagcaayactcacagcatgcttatcatgttgcaggagatgttcggaatgacatttatgtcaccctgatccacggtgagtttgacaaagggaagaagaagacgccaaagaatgtggaggtgaygatgtctgtgcacgatgaggagggcaagctcttggaggtgcgcggcatggcccagaaatcctgctaccatcgcatccgtctttacaatcacgatagaatyttggccgtatttyaattcttctttgcatcaggatgggtttgatttttcctgagaaaagaaatataaagcctgttaaatttgtgattagcagtgagcagtttcactaaggaagctatctagactcttctagactcttatttttatatttctcctgtgctaagaaatagctccagccactaatgattttatgtgtaagcttccaatgcagatgttatttatcgttttcaacttagttagccactttcaagcttgatcagttcctcttaggcttgagctaagtggcctgggtgctcgaatagcatcagaaagcatgtttccttccctgggtgagcagaaccaaaggagatgtgctcatcagagactgaaactggaagagccctggggtaggcatccgctaccactgctctttagtttgtttgtttgtttgtttttttgagacggagtcttgctctgtcgcccaggctggagtgcagtggcacgatctccactcactgcaagctccgcctcccgggtgcaccccattctccagccttagcctcccaagtagctgggactacaagcgcccaccaccacgcccggctaatttttttgtatttttattagagacggggtttcaccatgttagccaggatggtctcgatctcctgaccttgtgatccacctaccttggcctcccagagtgctgggattacaggcgtgagccactgtgcccagcctactctttagttttaatgaacaggaaactgtaagaaactttaaaaggatgagttattgtctctgggaaacacaggagttagtggcagagctgggagggtatctaagtatcctgaattccagtccagwgttcctccaactctggcagctttttcttttcttttcttttctttcttttgttgctgttgttgttgttgtttgatggagtcttgcactgtcacccaggatgaagtgcagtggcacaatctctgcctgctgcaacctctgcctcccaggttcaagcaattctcctgcctcagcctctggagagctgagattacaggtgctcgccaccatgctcgactgatttttttatatttttagtagagacggggtttcactatgttagccaggctggtctcgaactcctgacctcatgatctgcctgcctcagcctcccaaagtgctgggattacaggcatgagccaccatgtgctgcctgctttgctttgctttactttactttcttctttcttttcttttctttttttttctctgtctttccgctcccttcccttctctcctctccactcccctcccccacttttcctctcctcccccacttcccctcccctcccttctcctccccttccccctccacttcccttcttctattttcctttcttttccattttctttccttctttttttttttttttttttaattaagacaagatctaatgcaggtatctgccagctttctgcccacataaagaagtgagtcccaattctgacatcaaagaggataggcaggaggtggtcacaggaggctgcatggcctctgctgaactccacctcttctcgtatgagccgtagttaactgctttggtaaccaaggaccaagctcttgattgacttgactcactgagtgtcctgttgcatagttgtttgaggctacaatgaaatacaatttcatcacttgccatggatgttataatctattaaggaagcagatagctaggcagtttactaaggcaagtcgtattctgcatgagagggagaaactgaatgctatgagccactgtatgaaagtgctttatttgtgctgttgataagagcacatgagctcatttcacgtagacaccttctcctggttggtcatttcgtttgatagtgccccaccaaggcctggttctactaagctcagtggttcatgaccaggaaaagatgcagccctgagttgagtgaatatgctgtgccaataccctaagtccctaaaacagaatgtagacaggaaaagagaaatgcttttctgcaaatagcggcgcgtctgcagttgtcacctaacttctcgtcatcgtcatgttccctgagagagaagaggaaagaatcagaggagaatgcatgcctggggagggaagagaaaatacaagttacaggaaagaagaatatttaggcggtgctgggttccttagctgctaccaaattgatattatagacccttgaataaagtggtggaaattcagtcttctctgttcttcatcccccaaacttaatcagccgatcagtgccagtgtagggcatgtgtggacgtgtttgggggtgaggggcttgtgcatggtatatggggtcctcttacttttctaaacaaaattattcccttctaattttttccttccatctgaagaaagcaattcaccctggtgctggatatgaaggcatttcagaatacaaatcagtagtctattaccaagtcaagcagccctgttggtatgagactgtcaaggtgagaatgagtcatttgtaacccctgttatctgttaaacctcagttagattcctatcttctgtttwcccccmarttattcctactttattttgaaatttttagataagttgcctatggtgtgcagtaagaaatgaatcagtaattataattctgtattaagagcatttatcattaagaaactcagtgatgtatgagaatttgaatagcaaagcttgtggttgaygtgatggatataatagactgccaagatggtacaaaascaaacagaaattttcacactgtgcaaacagtttcctaacatttttttwttyttggcctctcaccaagtgttctgggcctcttttcaacttcaatatgtgtattacacattccaaagtgcttttcagatcagtcatctcctttgagccccacaagggctctgcaactagaacaagcaggtgttgtaacgccatctttcatattaggtactgaagttcaaagttcagtgacttcccaggatcctagagctgactggtatcagggcccaaactagagtccacttcttctgaatcccgggctccatcagctctttctggttgtcgaagtcacacgagttcttcatagaaaaaaaaattttttaattgcattcatatatctcaatttagaattaaccattttcaacagttttctatagttcatatgttttgaatgatgctgttgatacaaatttatattgtgctttttaaaactacttatctcaatgcatataaattcttcagatatgtattttagatacttgcataaggttccaaagtataatcatgccatgatttgactgcacaccacaaatctctgctcgtttgagtgccctaaggctctgtttcttctctcccctgtagataggtaagcagcagaaaactgctttatgagccctaattattacctttccccctctttatggaataatcaggtcttatagatccaattattactatatttatacacatcttgcagtctgaaagatcctgtgtggacctcaaaataccagtatttcccctctgaagtattactgtttcttacttcagaaaatgctagawattcacagtatccctatgctcagratctatgataaacagcaagatgatctgagattcttttgatttgaaaatagctcagtctcctttgaatgaaaccyataccaaatctcactctctagtaatttgtgctgtggaaagtataaaattgagcctaattccatgaaataaaccatgcttgcaaagtactgtgtgtctgtaaactattaatttcttactatgacacaggtatccattgctatagaagaagtcacacgctgtcatataagatttaccttccgacacaggtcatctcaggaaagtaagtattaagacgtctatgacatatttccacttaaaaaaaatttgctctggcttgacagccatcttgtgaagctggagaacaagatatttggaaactagagacttggcagctgtattttgtaactcactggtgctaaggaaatcagcataatgaattttgctgggcgtgcaaggtctgtgttgtcactctatattaggatttcctcaaaatgtgttttgtgaacactaatattctcaaagacagcagtcctcaatctttggcaccagagactggttttgtgaaagccagtttttccaaggaccaggggtggggtgatggtttcagggtaattcaagcacattacatttattgttttctttattcttattacattgtaatatataatgaaataattatacaactcaccataatgtagaatcagtgggagccctgagcttgttttcctgcaacgagacagttcagatcatcaggcattagatttccacaaggaatgtgcaacctagatcccttgcatgcacaggtcacaatagggttcggctcctgtgagaatctaacgctgctgctgatccaacaggaggcggagctcaggtgataatgcgagcagtggggagcagctgtgaagacagatgaagctttgcttgctcctccgccgcttacctcctgctgtgtagcccagttcctaacaggccacagactggtatgggtttatggcytggggtttgaggtcccctgctctaagatgctactagatgctctataacaaaaagtgttgtatttcacaatcaaataggtataggaaaggctatatatacattgtatctccctcctagacgttcacaatgcgtgttgccatgttgcagtagcaagaaaactctttattcacttgtctccccaaattatcatttttctcatgaaaaaactctttcaagtcttaggtcacagttcttgaaatggctacactaaagtgtaagcagagaagaaaattgattgttttcagattgatcacaaaatttctggaatcgtcttattctcatttcgcactgcataaaaatgtaacccctccttccaaaaatgcatgtgttgaacaccatctacacaacaggctgcaggcgaggccctggtctatgacagccagctggacactcccacgcagagtctttgtggtctggttaggaagatgaacgaaaaagtgggtggttatgtacggaatagtatgatatgtacattacaaggggcaaagacttgtaatggaagcgtagcacagcaccttacccagtctgggggatttatgcatatgacctcctacatcttagctgagacttgaaggtgagtagaaattagcccagtgaagggtgatgggagaagtgtgtttggagaaccaaatgaactcagtatggctaaagcaggaccagtggagcaataatagtatcaggttgaatcgtgtgaaattggcattttttaggtctaaatggccaaatatcagccatttcatatggttctgcataataactaacaattgtcaattaacaattaacaaagrtcaagtttgtatgaagtattatgtgaagctatatttgtacatggtcctgtttagtatccacaataatataacaargtacattctacttttatctacatttatacacaaagaaactaaggcatggagaggttaggcacttgcctgtggtcacaaggctagcatatgaccaggctgggttagcacccagacaatctgattctagctgggctggagccggatcatgaaggctgaagatgtttttcagccatgttaaggaggtgcaattcaagggtggtttctggttttgaggttttgggaggggttggtctatgttcataacagcttcacccatagtactccaacactagaatagcctaaatccccatcaataggagaatggataaacaaattgaggtatgatcatacaatggatgactactccaccactgtggggacccaaggggcacagcagaccacagagccgtgcctatgataaaaacaggccacaggttaccctactcagagccactgaagcaggggacccggtgagttcagagactggccccraagaccaagagagaggagctctgcctcctcatgaagctgcaccctcctcccagctgccacagggcatgcagatcttctttcctggcactggagctggtattctggggaggaagggkaaagaaactttgggcagcaccataaaccctagagtagaataaatatcttgcagagcctgttttagagcaacataaattgagatctctcattcaagtgttttgaagcagcgtggttgacatgattggattggactttggaaacctcattccaacatagagaatgtgtttggtgggagagcctagagacagagagatgcgctgggaaggtcttgtagaaataaagagaagaggtgagtgtggcctgaagtcaggaaggacagcaagatggagagagaagagacaggctccagagctgtttaggacatggagttgacgtggggtggagttggtgtcaacacccacatttctgatttggatgactgggcagatgctagtctcatttattaggggatgtaggaagaggagagcatacttgggggtgcyaggcagtttcagtggcacatggtacgtggcttattgcagtttgctcagttgtgcttattagaatatggttgaacgctgcacccccgagcaaaatgtgaaatcgtgtcatagccatcgcctcctggtgtctctctgcactgctcagacatgtctttctgcyttttcagccagagataaatcggagcgagcatttggggtggccttcgtgaagctgatgaacccggatggcaccactctgcaggatgggaggcacgatctggtggtttataaggtggtgctaacagaaaatggctgagaaaaatactccctttcaaatgagcatttaagactcytttcatatttatttgtacaaacatcagaaacctttctagagctttctgtacttgcccattaacatctagaaacccagagggctctgggccctccagctttgtggtttcccacctgctttctggagagagtgagttgcattattactgagtcttctaaggaggctctcacctccttagacctctcacgggagaggtcctgtgaatggtgttccctagcagtgaatggtaaggggtcggcctctcatgatctgctcttttcatcatcctgcatggcacatggacaggtgcactgttgggcttcagtagtgtgtggtggatatggttttcccatcaccatgagccacatactatttctgtgctctgggggccttatttccttccctgaaagttttgtctttgttcttgccttccaactgatgctgagctcccacttctactgagattttagagtataaagtagatgctggaagatctcatttrgccaacaatatctggggatttccccacagttggctgctcttttgagatgcatctacctgaggaatatttttcttaacatcttagtttatgaatcattttggaagggatggcaagctaattcttcttccatcaacccaataaagtataattgtccccattttttaattacacttcaagttttagggtacatgtgcacaacgtgcaggtttgttacagatgtatacatgtgccatgttggtgtgctgcacccattaacttgccatttaacattaggtatatctcctaatgctatccctcccccctccccgcccccgccacaacaggccctggtgtgtgatgttccccttcctgtgtccatgtgttctcattgttcaattcccacctatgagtgagaacatgcggtgtttggttttttgtccttgcgatagtttgctgagaatgatggtttccagcttcatccatgtccctacaaaggacatgaactcatccttttttatggctgcatagtattccatggtgtatatgtgccatattttcttaatccagtctatcattgttggaattgtccccatttagagactgaagaaaatgaaatttaaccttattctgaaatatgtgtatttactctaacagagactaggatattctggtttctagttcacaacttattctgtttccattcaatcatgaaattatttctgggctcaatgtttacagaaagatatcagagtatctcagaggtggaagggatcttcaggataaattgataagtccacgcttctcatgctgaaaatgcatgatagaaattgtttttatttgcatataagagattttggccatcatttggtgttcctaacatgcttccttttagggtgacaacaaaaaaatggaagaygctaaattctacctgaccctgcctggaaccaagatggagatggaagaaaaagagcttcaagcatcyaaaaacctggtcaccttcaccccaagcaaggatagcactaaagacagctttcagattgccaccctcatctgctccacaaagctcacccagaatggtaggagyggtgaatacactgacacaaataagcttcttgctcagcctttctgggctccttggttaggctcacagggctggactatatggggctgggtcttattaggtaggatgttggccaattggattctgctctctgcttttcaagtggtattctgggtagtgctgatcacattgcacagcctcttctgaagtttcatcgtccactttagagcaggatgaaaaacattttagtatttaatatcwtaaaacctataaatgcatttattaacagcaactgtaaaattcaaaagccgtatgttccctgatagtgcattctgtgtagtatgtgcaggaagagatgttggtagtaagaggaggagcttggcaaagaaatataatcagtttcctgtccaaacaggtatggcagggcttcctgtttgagttctgtccttccctcctatattctcttctttcccatttttttccaagcagtcagggattttccataaattcagctgaatagtkcaaagagggattcatttggtttttccttcaaatctctgatatcaattttaacctctcttgtgtagattatgacatgtgctagccaatatcaacttcttatttatttaacttaagtaatgtgtaaggaaccctactggatgtagtaaaccaagaatgagctgcctaggggacttgcgctagaaattctgtctcccatatgcygtgtagagactgttgcctttggccttgtagacagtttgagtgaggtacaggcaagagctctgccttaaggggtgccaagatagacaaaaaagtgtagttatagggtaaacccagggatcagatccctgatctttagaagggctcagtgttaggtttgtttcaacaagtcgtggttgacaaaaagataaggattgtatttcaacttggacaagtggctagactccacagagtgaagtttagggctaatccgtatgtgcaagtaaaagcatcctcaccaaaaatgaagccagaaacataaaagacgtgacaaaaccgtcagcaacataccccgtgttatggacaaagcgaatccattaacaatgaactgctggtaggttaatgggtacaacatttatggaagataatttagaaggcatatcaaggagtttaactgtcttcagaccctttgagcctgtgatttgattcctggaagttgcacttaagtaaacaatgagagatggacacgaagatttatgtacaaggatgttgtttccctattatttgtaacagggaaatactggaaacaacccaaatgtctgatagtcagggtcagtttaaccacgttttataatataattaagtgatgaaatatatgcagctgctaaatatggtatttcaaaacatagtgaaggacacggtgaactttttaacactatatacagtatgatcccagttttatttaagtatatgtgagcaacctgcaggcagattgcctggcttcaaatcccagctctgccatttactagctgtttcatcttgggcaagtgacttgatatctctgtgaattggtttccttgtctttcaaatgggagcaataatagtatctatttcaaagaatgcagtaaattaaaacacgtaaaaactcacattcgatctatatagtgaacactataatgtcagctatcacgatcatcatcactatttgtacacagaaaacgatgaataggactaacccaaagtttgataattcttgttttctttattctttttggtattttccaaatttttaactatgaaatgtcaaaatgttattttttaaactaagtatggtagtatactatataaagcattaatgttcttttaaaactatcaagggatatttgagagggataacacttattgaacatctagtagattatcctttctggactacagattaaagaagaataaagaaaacaagaataaaagtttgtgaaattaactagtaatgaaaagcaaaaggaatttctgttagagataaccatattgttacattgtttgttatctccctgtcaaaaatgtagggtttcctgacaacccgcagttctcaatgtagacccttcgtttgctgatacatctacttcaccccatcttctgaatgttcttaactagcctgtactgtcccgatatggtagcccccagacacatgtagcttgtaaaatttaaattaattaaaattggagggtggggagattggggagaagttggacaaaaggtacaaaagctcaattagacaagagggataagttcaagagatctgttatatatcctcgtgtctatagttaatagtatagtgtatacttgaaaattggtaagagagtagattttaagtgttctcaccaccaaacaataagtgagataatgtgtgtgttaattaccttgatttacccttctaccgtgtgtgtgtgtgtgtcagaacatcatgttgtacactgcaaatacatacaatttttatttgttaattaaattttattaataaaattaaattataaatcagtccgctagttgccctagtcgcatttcaagcattctggtcttctgcagctggtgagttttgtgttgggcagacggatatacattttcatcatcacagaatgttcctttggatgacactgtatgctttattttgtcatccttattcctgatgttttgattaaaaaaaaagacaaactcatcataacacatacaaaaaaagtcagaagtaatatcttattacaaagaagggttaaaaaggcaaaccttgtctgagtcagagaggagtgagctgccatccaaacagactgcgagcagggagagggaacagggtacagagagrgaaagacggagacttggcaaaggcatcacgagcatcagggaaaatggggtattccagggacaaatgattgcagattattcatgcatttgctttcttctgacttgatggaaattataaagaatgaatttgatttaataaaaagctgaagaacattaataagccatcagctaattctgtgagggtgttgactgagtagagagggtagcagtgttctcactgagagggtgaacaaaggcatttctccttcgcctgaggagagttattcagactcaaaaggttaaaagccactggagttttaacaaacagatcttggagactcttttgtttactygatttgttttttagaaactaaaacagaccaatttgtgtgggatcattggtttctgggcccactggaaggtaagaatagatttgtttyccaggaaaaagagaggaatgtgcaggtccccagaggtgcgtggccttgggccaggaggttcatactcagtcagtcattgcaccctccagcaccaactttgccagatcatctccagcttattgatcagaaaattgagttttaaagtggcaaaaaatctttcttaagctcctaagtcgtggacttgtattttgaaagcagctctttgtagctccaaacagtttatagtttatcgttttgcagttacagagtctccaagatctgtttgttacgaactccagtgacttttaaccttttgagtctgaatagctttgtctttcttttctctttaaaagtatgtgttcttaaattctctcctttagggtagaaggcagttactaccctaaatgtggggattgttattctcttgcttctctttatagttttgccacatctgtagcccttaaggtatattgtttcattttgcattttttaattttatgttaataaattaaattatgagtcagtcccttagttgccctagccacatttcaagtgctcagtaatctcctgcagctggcaacttttgcatgccaccttacttatttttcggtggtgagaacactcaaaatctattctcttagcaattttcaagtatacagtatacagtactatacagtctacagtattaatgtagttaataattgaactgtctaattgaagtcttgtgtcacgtgtgaaatcatgtaacttgcgcttttactcagcattactgaagatttgaaatatcctgaattcttacacatttctgacaagaatgtaaaatgaggacagtgactttgcataatatttaatatggttgaagatattcttcctgatgccccagaaatcccaccttagttttctaycccagagaagctgctctacctgtataccaggagacgtatgagaatgttcatggcggaattgcttatgatagcaaaaaaactagagacaacccacgtgtttatcakcagcagagtggataaacaaattgtgtacacccatacaattgaatagacactatacagcgagaaaaaaaattaactagagctacatggataaacctgtataaatcttagaaacacagcaagcatggggctctttctgtaaccccgtgtcactgctctcctggccctaagaccttaacaattcaccagatgccaaaatattttcctatgtgagcagtgatctggcatgcagatatcactaggaaataaacctctgggctgatagatgggtactttgccagagctgaagctgctgggtgaatattcacccctggtgaagggactaaatccttttcctccagcagctatgagtcaagtgatggaatgagtgataccttcgactagcctgtgacagaaataagagctggagaatatggaagtagatggtgcctagtggatgaatgaatatattaatgattgggttgagcatattatcagtttccttagggctactggttccctttccgttcattcatttattccttcatcaaacatgtattgaacacctaatagatggctagtactaaggcaagataaaagaatgaatactatatgattcctgccttcaaatggctgagaactatgggaagagtcaaggagataccaagtacatcttaccaaatacatagtatttctgggtatttcaggcaaagggaagaatatacacaaagacacagagatatttcagaacctgccatggttgggctgtagtgattggatttctctgactgctaaaggrtaaaagagaatggtggtggttggaagtatgcaggagtgatataggtggggccttattacattctctatgtggcattggaagtttatcctgtagacacgaggaatccctaggcactaggttttggagggtgttgataaacaccctcaagaaggactttgactatttatgaaaaatacatgtgtaactacttatatatttctacaaattcattgattgaaaaatatcagccgggcgcagtggctcacacttgtaatccctttgggagggatttgggaggcactctgggaggccgaggcaggaggcttgcttttgaagctcaggagttcaagaccagcctgggcaacatggtgaaagcccttctctacaaaaaatacaaaaattagccaggtgtggtggtgcacctgtagtcccagctactctggaggctgaggtgggaggaatgcttgatcctgggaggtggaggttgcaggttgcaatgagctgagattgtgtgattgcaccactgcatgagattgcactactgcaccccagcccgggtgacagagcgaccttgtctctcaaagaaaaaaaaagtatgtattgctacatttactagatagtgctctgaatagaaatagtagcttgatgtactaaactaggtgataatacagtaacagtccagataactgcagtttctctgtgacacacacacacacacacacacacacacacacacacacacatatatgtgtatttcttaatagagacagggtctctctatgttgcccaggctggtcttgaattcctgagctcaagtaatcctcctgtcttggcttcctaaagtgttgggattacaggtgttagccactgtgcccagcccctttgacatttttaatagctcaacatttattaaacctgtaagtggcttaaagtttcaaaattctccattgtaagtcaaaaaatgtcttaagatttttatcccagacttatgctaagggttatgaatctgttccaccttttgtttgaaatagccacctgtctgatttgcttgtctatttcttcaaagaactctggggaaaacagtatgatagagtagcaaggagttggtttttcaaatcagataaatatgtaataaaattccatttctacctctcctaagacatgtaatttaacttcacaaagcctcagtttcctcatctaaaagatgaaaaaaataaaatctgtgcagtcatgatgttgaaataaattaatgcatatatatatatatatatatatagagagagagagagagagagagagagagagagagatacacacatacctatgttcctctttccctctgaatccacccagacataggtagtgataagggacaatttaaataaggcagcaaattaaaagtaggaaggttacattagcatgcttcttagctttacttcttatgaccatgatgtcattatttgagaaatgttagtttcagtcagatattctaagttcttatgcattaatagttaatttttttctctttgaagaatgaaagaggaccacaaggttttctctgacttagataggagatagtaaattaaaagaatatataaggcatcttgaattagccactattgagagcaattacctgttctagagaattctttagctatgtcctgaaatkgtctgggttgttctcacctgtatctaatgtttgtggttgttcttcctagttgacctgttaggcttgttaaattggcgttccaactcccagaacattaaacacaacctaaagaagttaatggaagtggatggaggagagattgttaaggtatgtttatatattcatagttagaaatacacatacctacatatatatacctatctaattatacctaattggttcaccatttaaaattaaatcattcaytgtaaatataaaatctacgttgttaaacaagtgtgctagttttttaaaaaatgctrttttaaacctctttgatttaaactagttgtacccagatttctgtggtgtggggctgaatgaaagcatcaaaataacctctccgtttttcttatcttcagtttttgcaagatacactagatgcactctttaacataatgatggaaatgtcagacagtgaaacctatgacttccttgtgtttgacgcactggtaagcagttaaacatattaactagtgtttattgttgcaactttgtagttttcaatatttcactattataagtgattgtgtgaatatcttctcacataartatttgtttacatctctctggttattgttttaggctgaattcctagaagtactattagaaacaaatgacttatatttcaggcctttgtttgtttcctgttaggtctcattttttgatatgctctttctcattagrgaagataagatgttttatttttattagaaatcaggaatcattttaactcacattaccatgatctggagcattgttacatgttggatttgtgtgtgcactggtgtgtttatgcaagggagactgaattcacaagtcagaggtgaatctgagcctcattaggcagaatattcaacccagcagaaaattgaatttgtcgcacaaagcacttaaacctacaacccattgcaagaattgaaatcagatcagggataagtgatatcagaatctgggaaagccrgaggtgagggtggaggggaagaagctgaaagkctcaaagcaagcatcgttttcaccttggtggggtgaaatttcaggacaggattttacctgaatgccacagctgaggaggaaggtcagttgcagctttaggcgatttaccagctttgagaaactagtcagtttaggaaatgattagggtattaaagctaaggtttaagataaagaaagaaaaggccacctasttgagatccaactggttggacttgggtttatgggaaagagagacagtggttatggttgctgtgggacaaggtctggaaacagattcctgagggacatagcagctggcagtgggcatagatggaaatcccaaatgcctctttcttctgacccctctgtcttaaacagggtagtgtggctgattttaggtcatgtgcctgatagcagtgcaagagaatatacaagaggtaattgggagataaaactctggtgcagttgttactgggggcactcatagtgtacacaggagaaaaatgtcatggaatgtttcattagctgcatccttggattagagaaaacacctttccagagcctccttcctcctgcccgttaggttacctgggcatcgactcysctgtctttgagatagtcagctccctgaggccaaggatgctggcttgagttggtttcttcacagcatttaacatagtgcctgacacataatagtctctctatttatgctaaataaatacaatcctcaagacttgacatcagctctggaatagtagagtgggaatgctgcagaaaagatccagagaggaaagaaggcaccgagatgttaaaatgcggcttgttgacagaatacttgggattgtgcagtgctgctatttctatttttcacttttggcaggtatttattatttcactgataggagacatcaagttccagcattttaatcctgtacttgaaacctacatttacaagcacttcagcgccactttggcatatgtgtaagtatgatctgaaggaactacatgttgttggatctttggatttgtactcttaggactggattgttgagaaacgagacggacctattactattcagtaaatacgcctgttaaggcagaactcttattctaagcttccgggtggaaaaagggaaccatctaagtattctaactctggaaagggggctaagatcagggccttcattctggatcaggcgaaatttccttaaggatccagaataggccaggcgtggttgctcatacctgcaattccagcactttgtggggaggattgcttgaggccaggaattcaagaccagcctaggcaacataacaagaacctatctttacaaaaaattaaaaagttagccaggtgtggtgacacacacctgtagtcctagctactcgagaggcttaggtgagaggattgcttaagcccagggaagtcaaggctgcagtgagctgtgatcatgccattgcactccagcctaagtgacagagcaagacttagtatctaaaaaaaaaaaaaaaacgagcaaaatcaataacaaatgactcaacccaggatctcagaggttgaatgtcagtgggattggcgtgggacatcaaggagatcaaaccatgaattaaacaagaccaagtttgatagaagaaaaggtcatgccctcaaccctgtaccacaaatgctttgtaaaatgtattgcttacaggatatgagaagatttcgttttcccatcttttgcataagaggcagtggtctctaccttttttgtagtgcagcctgccttctatcattggtttatgggcccctgactaaggaaagcaactgatgtccactccgcattcctccccagagcactcagctcaccatggcattgtgtgtgcctgccacacccacccgttgccttccagttattgtgcagaatgtgataaatagtgawaggaatgtagctggattggtccatgatcttcttatgacagtggcttaagccacatcctgtagattgctgcccactgacttgtcagcaagaacaccagtgacagtggccgttccacccaggagcctcacatccaggtgggcaatagctacaaatgaggaaatcccatcactgtgatcataccgagccaaatgcagcactccaggtggtagtaatctgggtttacttgcaagacttgatcaattctatatgtttcctttttaaaaaataataattcggccgagtgcttgaacccaggaggcagagatcacgccactgcactccatcctgggtgacagaatgagactccatctaaataataataataataataattataagtgactattattatattattatgtatgactattattgkatataactattattattattctaggaaagctcaaggatccccagaaggaaagtttaagtttaaaatatcagtgccctccaaagtctaagggatagcacaaaatgaagaccattcctagcccaaaaactctagaaagacacaaagagcaacctataaccccagaacagctttatctgttgaatgcttagaaccatgaatgttctggagagtgagctcctctttcttcactccataaagtttctatctggctccatattgatggatcccartgggttgaggcagaataaaaggaattaggcttcttttaagtcaactcctgtaggcaggcataatccctcatttatgggagcatctgaagatgtcagaattgcataccagagattaaaatatcctagcaatttgggtcacttcaaccatttcatttcataaccctccggtttaatcccacaaagggaaagaaaccttttctagtatttctcagcagaasgtagttccaaacctagatggcagatgaggaaacttaattggaaaagagttaattttgctgttcagggcatattctagaagatataattagttatgacttctacttccaggatgccatgttcccctcttagataacttacccaagcctcagagtatcctgttgctcattggcttaatttttctttctcattcttctaaggaaactctccaaggtactgaacttctatgtggctaatgcagatgactccagcaagactgaactgctttttgctgcgttgaaagccttgaagtacttgtttagattcatcatccaatcccgagtgctctacttgaggtaatgttaactgcagtgaagatgtttagattatcagctgtcactctgtgtgctttttccctcactctgcacagtggtgttcagctctgtgagcagttagttcttagaattgccttatttcagaactgcagggctgaagatggatttgggctgcgtgtctgttggagaagactcatgagaagtttttgtagatcagcaaaattctggggcagtaatgacctcaggacttggggaagcagattcctgtggaaagattgtacctaatacagcagatgacttcatgacaatattgagtgtgcaaatctaggatcatgatctgctgtcgctagcagaagcagcagtcatctcaggggaggtgttgcctgagatgagtgtttccttgttgacactgtgcttagctacctgggcaactaagcactagagacaggattattccctgtttggatttctagcataacagttccatcaaaaacagaagaaactgcaaaagagcaagtacctttgcagggaacattcacaaccccagtgactttcctacccttcagaaatagctgtatttccaaactgttaaaatttttttctaaggaagaaagaaaaggtttgtagaattgagcatatgtatttttaaaagaaactttattgaaaaaaataaaattaaaggcaaacaacctgcaaaaaggttacatatagtacagatgaaagtttaatagcttttctcagttaaagcttttataaatcaataaaagaatgataaatagccctaatggaaaacaaaaacaggtaatttacaaaagaaaaacttaaatggtcaataaactttttaaaaaatttcatactatcaaaagaattttgatacagacgcacacacatgcatgcacacacacaccatcttttacctatacatttgaaaaagattagacatctttgtccttgatgagattgggcaaaaattggtcctgtatttcagttttgatgctaatggagatataaattcttcaggatagaaatagatagtctgaataaaaacaaaaaagaagatttttaagggaaaggaaaaagtgtcacatttgtccagtaatacctcatctagaaatttatctaatggaaaaaaaaaatcttatcaggtatgacaaaaatgaatgtgaaagtatgtacattcagtcatttcaaatgtagggtatgttaatgaggaaagacgaccatgatagattcttttttttttttttttttgagatggagtcttgctctgtcgcccaggctggagtgcagtggtgtaatcttggctcactgcagcctccaccttacaggttcaagcgattctcgtgcctcagcctcccgagtagctgggactacaggtgcataccaccatgcccagctaatttttttgtatttttagtagcgatggggtttgacatgttagccaggatggtctcgatctcctgacctcgtgatccccccgcctcggcctccgaaagtgctggaattacaggcatgagccactgcgcctggcccgatacattcttaaatgataaaacaaaggtattaagcatgagtacagtatgatcttccttttaaaataatacagatttgaaatatgtatagtaaagaagactggatagatcacatgctaaagtgtttttttgttgttgtttctttagagttttttagggttttttgtttttgtttttgagacagggtctggctctgtcacccaggcgagagttcagtggcatgatgttgggtcactgcactctgcttcccgggctcaagcgatcctccaaccttagccccccaagtagctgggaccaaagggcacgtcaccatgcccagctaatgtttatattttttgtagagacagggtctctctatgttacccagtctggtctcaaactcctgggctcaagggatctgcccacctccgcctcccaaagtgctggaattacaggcgtgagccaccgtgcctggtctgaaatgtcaatagtatgaaaacttcatgtgacagggttgtaatttattttttcattctttatgtttttattctttcagcatttgatttacatttattattctatttttatttgctattttttatatttttttgaatttttaaatgaatatgtacctttctgattgtttttaaaaaatgtttaatgacttgaaacccatctggctgaatgactgtccctcctttccaggtggaagtgggcagtgttttccccacacataatttatgctcagtctctgtatttgctttcttttcagaaggtcttcttttaaagttgtttcattatattttccagttatggtacatttccatgtattcagaatggttggggcatggagtgttcgaccaagggaatattctcttacccaaaagtttgtatgtatagtaaaccctgatgtccaaaaatcagtatcaactttaaaccacagaaagaaaacctgagtgtgaaattaaaatrtattttcttatggatggttcactagttcatttcctcttcatttgttgargcacatcagagtcctcattctagacaccagataggacagtaaaggatggtgagtgtggaaaacaaaaggttagggcgacagaggacccatgaaattgactaggagagttgcttcattacacaytgtctgtgatggcctgcgtgtggttacttttcccttatatgttattaaagaagaacctgagctggggaagagactggcaatgtgcgtcccctggttgcttagatttaatggtcacttcagtgcactggccatgtctggaggctgcagtggaatgtcacctggtccctgggccccctgttgccttcctcagagcttaaatctctcttatgagctcattacctggctggatttcacctcaatcagcaaaacaccaagaaaaaattgtaaattgctcccaataggatgttgagaagcttgatcttaatcccttagccccctatcattagtacttaaaaaaaaaatcaagtcacatacgtagagtgccaagtgttctgcattggtgcagggcttttgcagcatatgtgaccaggctcccactatgatggtgtgtgtgggttccatggagttcagggaggcaaggagtaaagaaatcaacccctaaatgaaggcagtgttggagtggtggaaccagcagggaaggctgcctgagctgagctgggtggaggaggaggtggtatcatgtgagctgagactgaaagatgaagaagcagcctccagagatgtcaggtaagggttagtgggagcaggacctgccccaggcagggacctatagggcaccaaatgtggatgcgtgaggagtaacgagaacccagtgtcgggagagagagcgggagtggccagcaaatagtaaatgatgtggggccttgtaggccatagtgaggagcttggattttattccaagtgtagtgggaagccgttgggggacaactagagaagtaataaaatctggcttatattttaaatgatcatctcatctcccacatggaaaatggattatcgaaggctacaggtagaagccagtgaccactttaagaggccattgtggtttaaatgtgagatactccagccccatctcagaggcagatggagagaatggactgattcgagctcgtaggatttgctgttgggtttgatggggcaatgagagaaagagaagaaacatagataacatctaggtttggggtggatctaggttcgaggtgatgctgtttgctgacatttgtaatacttagagttgagcagggaaatcaagcgaattctgttgtaggtgtgttaattttgagatactttggggactacattgcaaataaagttcttttctagttctgtaaaatgggtgaattgagaattaccattaaccctctgattaacgatctcagtgaagttcatattctttgggtactatataaggtataggtgaatggaggagatgaatttaaatgtacatgtgtgtatttgagtgtgtgcatgaaattttgaattcaagccatcctattcttgaccagttagtggtgaaattgccacctattatatgtgcatatgcactttcatttgggacttttgtgtgtcttggaaagtgcccaaatatctcttgatttctacttatgagaaagaacccacttttgagttggtggacagatcttttggagacaagtagagtactttaattaaggcaagcatgtatcagygaagactarggggtcttgtcctggaaggcccttatggtagagcaggccagcatcggcacgggcagttcagtggctaaagtggaacaaatggttttgtaggctgggttggggatcagagcctttccgggttgagcggcttctctaacccattgcctgaaacttcagatgactggggcttaattaggtgagtcagaatgattagggtgatacgatgaaggagaagtgagggaggcaacaaatctattttaaaatttcttttaacaatggaaagtccaactgcttttgtctttttcctattaagattttatgggcagagcaaagatggagatgagtttaataattcaattcgccagttatttcttgctttcaatatgctgatggacaggcctctggaggaagccgtcaagatcaaggtcagcctggcagcatcatgggtaactcttcttaggctgtggtaaggatgttctgggaccgcttaraattggccatcatgagggagaaacaaagtgaatcatggttcatgcatagcttatgaattttagtatgatttacagaaaataaaggaaaaaaaatccattttaacttctacagagcttgtattttcaagtgtcaacttgccaaagacaagctacccaattagacatcccttgaaaggccattgtgaaccctgtttgaccccatgatttcagcaaactgatcccaatgcactacaggtgacaaatttttattttttgtccctcattttacccagaagtgcaaagtcaccatctttattatcataattttttwaaaaaatatgaaatatataatccctgaaggctcaaatgtgaactttactattaatatttattttttgctctttatggccatgttgcaagagaggcttcaagaatttaaccacctccttaggcagagaaatgaactccaagtggacagagcctgctggcagtagaaaccagaaagctgtaccccctggcatcttcaggaaaagcattttaggagatcgtgtagagcaatgccagctttcctttttattgtaagggtatctgtgtccagttccctatataagttccaagcacagccttttcttcctgggatcaagcagtaaatactgtatttgtcttgcctggcaactgaatttgcctttggtgtttttcttacagggggcagctttgaagtaccttcctagcataattaatgatgtcaaacttgtatttgatcctgttgagctcaggtaaatagcaaaacaaaattttgttccttaactctaacagaaacagctcccctgcttggctggagcctgggctgctacacctggcttttatttttctaagaagtattaactgaatacctttttgtgctcagttctgtggaagatgcaaaagaacatccaaaacctgccctgagagaggtttgcactttctctgggaaaacaagacatgcagacataaaatcgattacaaaagatagtgtataatgacatgcttccagccctacccctaagtatcccagcagtgcaaagtcagactgcaatcaacatgagagtggagttgccaagaaagccattttcataaaggcgggtctggaaagtgatgatggacgtgggtgttctttggcaatttaaatactcagctctaaggcagagccctccagtaagtgaggataaaatctcccttgctgccatgtcataaactctcaggtcattttgtagttttccaggtaaatctctccatgcccaaatctcagagtggaggagaaaagtttataatgatgccttcaatttggcagaacgaagacactactaaccctgaggtttctctcccagcgtgctcttctgcaaattcattcaaagcattcctgacaaccagctggttcggcagaaacttaactgcatgaccaagatagtagagagcactctttttcgacagtcaggtaagtctccttcaaaacttgctgcatgaggttgcagtgagctgagattgcaccattgcactccagcctgggtgacagaacaagactccatctcaaaaagctaaaacaagctgctgcatgctgagatgacagccccatttctgcagctaacacttgggttttgttgtttgtttgttttttcttgtttttttttttttttttttttttttgagacggagtctcattctgtcacccaggctggagtgcagtggcgcaatctcggctcactgcaacctcggcctcccaggttcaagcaattctcctgcctcagcctcccaagtagctgggactacaaggcacctgccaccaagcccagctaatttttttttatttttatttttagtagagacggggtttcaccacgttagccaggatggtcttgatctcctgacctcgtgatccacccgcctcggcctcccaaagtgttgggattacaggcgtgagccaccgcgtccggcttgtttgttttttaagacggaatctcactccctcacctaggctggagttctgtggcactgtctctgctccctctaacctctgcttcccaggttcaagtgattctcctgcctcagccccctgagtagctgggattacaggtgtacatcaccacacccagctaatttttttttttttttgtatttttggtagaggtggggtttcacaatgttggccaggctggcctcaaactcctgacctcaagtgatctgcccaacttggcctcccaaagtactgggattacaggcataattaccgtgcccagtcagcacttgacttttcttttttaaaaatgtcattaatattcttgccagttgtttgttggcaacattaatattgttgccagttgtatgtaaggacctcctgggagagcggttttaaggagaatctaaagtcagctcggtatttccaacagttcctaaaagagcaaaatcatgtgttccttaatctttaattagaacaatctgcaagtggttcattaattagagaattttgtctttaaaacaggaacctcaggaagtaacaagcaagtaggaaaagatgacccttttaaaagaaattattcttctttagtctatacttattgcatgaccttaaaaaccaggggacagggaaacagcaatgtgttggatcccacaggagagctggttacatgcatcccttctcaaccccacgttcagtgatatcacattagtagctggaaattgaccatggtggaagtctttacaccagggtaactggcaaacatgataaagcaagcgtttttttgttttgttttgttttgagatggagtctcactctttcgcccaggctggaatgcagcagcatgaacttggctcactgcaacctccacctcccaggttcaagcaattctcctgcctcagcctcccaagtagctgggattacaggtgtgcaccaccatgcccagctaattttttttgtaatcttagtaaagccagggtttcaccatgttggccagcttgtctcaagctcctgacctcaggtgatccacccaccttggcctcccagagtgctgggattataggcatgagccactgcacctggccaagctgttttctttagggggtaggctggcagaagccagattactagtattctgctgggagaggagtggggcatggaggggaaaaactcttacactgataaaatacttttcattttgtaagtagagtctagcaaatagccaccaagtgtttctgtcccaaagctgatataaacaggaggtccagcacctgggccttcccaataaactcaagacttgctagagtgaggcagccacggagacttcttctggggctaactacctggtcaggggctcccagagtgtaacctcattttatgtatgtatattgcctggagatctgaagaccagcaggactcctcaacgttaaacaagttgagtggattgttggtgggagagccttcctggctttgcccctggctagttatgtaactggacaaatgagtggccttctctaagtctcagcctccagttctgtggaaggaaggacttgagctagatcgtatcagtagcctccttgggctctgatattttctgaccctatgaatttgcactttgaaattgcaaatgttcctaagacacaattggaggtagaggtaatgcctgcaaaaggttagtgaatgctcataagtagaaaacatttattactaaagcaaattattactaaacattttaatatgctttgatcactttttaaggatacagaaaaggtaattgagatagtaaagataaggtgtttgagcagaagagcaagcatgcactggatagttctacttagagtgtgatcayggttaacagtcatttctgtagcattcagagtacctgaactcattataaaatgtgttacaatagcaaagatctcagaagacataataggtcataccttactttctgaaatccacacgcctgcacagacatgagcagaatgtcattgacatgtactagggaagctcagtatttataggaactttatttataggaacttctttcagtaaattttctccattaggtgaaaaaatttttgaaaaaaaaaatgtataacttgcttggttttatttgtttcatatgaccctcaatttcgtgcattaggttggcgttttgaaaagctagagaaattgttaaataatttaaacattttgctaagttcccaccttcacctgtgagaagggtcattttttttttttttaattcattcatctgcgcattgaacaagggtaaagttccgtgcctaaaaccaggtgttcctgggtggcctggaggggctgcatccctgcagggctgattgcagagcttagagctactggtactggtcraggragagttgcaggaaggagacaggcagttcaggaggtggcactgctgtgtgtgagctgtctgtgttttccttctcagagtgcagagaagtgctgctgccactgctgacrgaccagctcagcggccagttagatgacaactccaacaagcctgaccacgaggcaagctcgcagcttctgagcaacatcctggaggtgctggacaggaaggatgtggtgagttgagtcatcactgatgctgcacagagttcacactgtcccctttgcaccagacaggagtgactccgtggccttcctattctcaggtagtttccagctccggtattagggcaggctgtgcccattttagagataattagggaggccagagcctccagtgcaaagtcagattactgctggggccttctgcaggctgattttcctggcttgcccagtgtgcgcactattgagatccctgtgactttttttttttgagagggagtctcgctctgtcgcccaggctggagtgcagtggcgcgatctcggctcactgcaagctccgcctcccgggttcacgccattctcctgtcccagcctcccgagtagctgggactacaggcgcccgccaccacgcccggctaatttttttgtatttttagtagagacggggtttcactgtgttagccaggatagtctcgatctcctgacctcgtgatccacccatctcggcctcccaaagtggtgnnnnnnnnnnnnnnnnnnnnttcaggcatgagccatcgcgcccagcccctgtgactattcttaagaatcaaagacctgactgggcatggtggctcaggcctgtaatcccagcactttgggaggccaagtcaggaggatcacttgagtccaggagttcaagactgaccagcctgggcaacttagtaagactttgtctctctaaaaaataataataataataaaaaataaagaatcaaaggcctttctgtttttatgcagacacctcttccttcttatcctctgatgcctaacaacctgatatttctgagctgctgagaagttctcatttccatatcctcttggacactgatactttctctggaacctaatggaaattatgttttctcatcttgygttttctctgtgacctggcccccatccctcttgaaaacacagggctaaggccggrcgtggtggctcacgcctgtaaccccagcactttgggaggccgaggtggatggatcacgaggtcaggagatcgagaccatcctggctaacacagtgaaaccctgtctctactaaaaataccaaaattagctgggcgtggtggcacgcgcctatagtcccagctactcgggaggccgaggcaggagaatcccttgaacctgggaggcggaggttgcagtgagccaagattgtgccactgcactccagcctgggtaatagattgagactccaactccaaaaaaaaaaaaaagaaaacatagggctgaacctgtctggattcaccatgtcctagaaatagtgcagcccacaggcctagcagagcccccacacaggaagctggagaactttgcagaatgtgttcactcgaacagttgagggctgagaaaaaaaaagcatcttaccacaaattatagttaccacgtctatggtggtttcatggcacaggtgttcccacagaacaggaaaaccactctttgtcatcacctaaagtctttatctttccagtatcttgggattctgtcctaccaaaggatatgaatactacaccttttcccatagctaaaccgttagttcacttgtcagggtccaccaccgtttgactacagcccaccttttctcctgctcatggtttgcactgggatgtctacatttctgtgaatccacattgcagcctcagaagtatgtgagggtaccattgccatctctagctgctccgccaatctctgtccctccacttccctaagcccctgtagcccacttactctttgcactgcttacttgatatttattcattatagatcattccccctttttttcattaagtatgtttatagaaaccacattataaaatggaatacattttctcaaagcatgttgcgattggagatttggttcctaaccaaggactttgcaccaaatacgtaaatgtgaccaatcacgtcataaactcaatacttttttaaaagtaactcttataattcaataattccttaaaataataaagtaaagctccacgccctataaatttggcagcaatgtacctggcacattggtttagccagggatcagtgttctagaaatcatatgtttatgatccaaagttaatgtaaaacacaagaatcagagcattggattctagtcccaatattaccactctgcagctatttgtccttagtcaaatatctcagtgcctcagtctcctaacccagtccattgtatgtaggaattgttctagacgacctctttagtctcttccacttctgaccctattgtttaatacatcacatctctaccaaccttctcaccacccagaaagactctttggaaatgacttgaatgtatttaaatcctgtgcaaggagatttaagttagctttttattttggtattcccaatattatgttccctgtaatgagcagagacattcaaaattatcgatcttggagctctggtaaagtagtaagtccaatcgttttttgtccatcatgatggtacctttttttcttcataaacattttgaaatatgtgcactagttcaatatctcttctcttatcctctcatctccttagttaactcaaagctctaattactgatatttgttcttcctgccttttgttttatttttttaaacattgcaggattccctcctctccccacagctctgttttggaattgtcctggttctttcaagtccagctgcagtaagcacctctgtgaagttgtctctggtgtggtcctgccaaattctactcattcttttcatgctccctttgagtttcttttgaggattttatcactttgtacattgagttaggaatgcagctcacaaatccttgggaagctgctcttatgctccaggcactgggatcagctagggctatgacagtgaactagagaagcaagcaccctacccccaggagcccaccttctagggagattcttgtgttatgcttatttaaatgtatgtcccagctgggtgcagtggctcaggcctgtaatcccagcactttgggaggctgagacaggtagatcacgagatcaggagttcgagaccagcctgaccaacatgataaaaccccatctctactaaaaatacaaaaattagctgggcgtggtggtgcgcacctgtaaccccagctactctggaggctgaggcgggagaatcacttgaacccgggaggcagaggttgcagtgagccaagatcacaccactgcactccagcttgggcaacagagcgagactctgtctcaaaaaaaaaaaaaaaaawttatgtaccactcacccgcacccccacaatagaaatctctaaaggctcagaggagccttattcatttcataccctccccacaaggcacagcgtgtaacttgcacaactatttagggccmcmctaaggaaatgttatgtaaatggaagtgaaagcagcatctcctggagaggctgattttatgaatcactttcattcagggaaatgggaaacaagtaaatgactaataaaaagtgaaggaggaagagaagaagggacagagggaagcagagagggagggtggaccccaggtacttgatactgtaattaaaatacatatagccataccataattgagaagtcaaaaaacaatagatgtgggcatagacgtggtgaaaggggaacattgttacactgctgggggaatgcaaattattagtacgacgactatgaaaaacagtatgaaaaactatgaaaaacagactatgaaaaacagggaatgcaaattattagtatracaactatgaaacatgtttaaagaactaaaagtagaagtaccattcaatccagcaattccactcctgggcatctacccaaaggaaaataagtcattatatgaaaaagatacatgcacgtgcatgtttatagcagcacaatttgcaatagcaaagatatgaaacccatctaagtgtccattgaccaatgagtggataaagtgtggtatatatgcatcatggaatattactcactcataaaaaggaacaaaataatgtcttttgcaataacttaggtggagatggaggccattattctaagtgaagtaactcaagaatggaaaatcaaatattatatgttctcacttataagtgggagctaagctatgagaatgcaaaggcttaagagtgatattatggactttgtggactttccggggaaaggctaagaggtgggtgagcgataaaagactacgcattgggtacagtgtacactgcttgggtgatgggtaaacaaaaatctcagaatcaccaataaagaactcatccatgtaaccagaaaccactcgtacccccaaaactattgaaatcaaaaagaaaattcctacagccatagacaaatcctacctgatctgacttctatgtggaatctaaaaaagttagactcctagaagcagagagtagaacattctttaccaggggcaggatggggagatgttgatcaaagggtagaaagtgtcggttataggatgagcaagttctgggaatctaatgtatggcatgggtggcaatagatgtgttaatttgaccgtggaaatcattacacgattacgtggatcaaatcttcatgttgtacacgctggataagtacagtctttgccagttaaatttgtaaaagataataaaaatgttaagcaaaaaaatacaaatagcaatgatttagttatttgaagcattaagcaggagtttcaaagtatctatcataaagcaaggacagatagaggctatgaaaagtcaagttgcatgtgggtaagtcggagccaaatgagggtaatatctagctacaaaaaaggaaagaaggtgaaagaaagaatgtgtacatcagccctactaattccaataagaaaactgttactgtcccccttttgcagctatgaaaactgcaagctcagcgaagttgaataattgctcaaagtcacacatgacacagtcagaatacaaaatccttgtattagtctgctcagtcagtcttctataacaaaataccacagactgcgtggcttaaacaacagacatttattttctcacagttctggagactgagtttctgagatcagggtgccagcgtggttaagttttggttaggtctctcttcccagcttgcagacagctaccttcttgctgtgtgctcacctggtggagagagagatccacatctgtgatactcatttactaagagcatttatcccgtcagtccagggccccaccctcatgacctcatctaaccttcattacatctcaagagctgcatctcctaataccatcacgatgggggttagggcttcacatatgaatytggaggagacacaaacatttactccataacaattcccttgacttgaatttcttgtttttttccctccaacacagaaggtggtaagagctttgtatttttgcctttaatttcccacacatgtgcctaattgacctgagcaattcttttatttttatttttatttttatttttttgagatggagtctggctctgtcacccaggctggagtgcagtggcgtgatctcagctcactgcaagctccacctcctgggttcccgccattctcctgcctcagcctcccgattagctgggactacagatgcccgccaccacgcccggctaatgttttgtattttttagtagagacggggtttcactgtattagccaggatggtctcgaactcctgaccttgtaatccgcccgcctcagcctcccaaagtgctgggattacaggcgtgagccaccgcacctggcctgacctgagcgattctaatctgctcaacctcagaacagaatacgtcatgctaatgggggtcccccaaaactatttgttgagtcagtggccacagtgagctctcagtgaacctgagcaatctgagttattaagaaggcactcatccctgcacagccacattcatcttttaagtgttatgactgatcattttcaactattttcttcataaagttatatattattctgtgagaccattttccacttttggacaagagattgctttgtagggaaragccaaaaagagatctaaagacaaaactcatctatctgaggttccttaaagaaagtgaaactgagtcagaaggaatggagtcaaatcctgtgttccctgcagggtgccactgcggtgcacattcagcttataatggaacggctgctgagaaggatcaaccggacagtgattgggatgaaccggcagtctccccacatcgtgagtatctctttgttggatcccacggccgctgctgtttctctgtcccctttgcctatcgggaggccttcggggccagtggcttgagactattcttcacatgggcctctcacatcatgggtcattggttataaccttagcagatcttgattctgacatggattttctgttgagagaaaataatccagcctaggcaatatagtgagaccccatccctacaaaaaatttaaaaaattagctgggtgtggtggtggcacgtgcctgtggttgcagctactcaggaggctaaggtgggaggatcacttaaacgtgagatgtcgaggctgcagtgagctgtgattgcaccattgcatcctagcctggacaacagagcaatagcctgcctttgaaaaagaaaaaaaaaaaaaaagcagcaagcagggagggaagggagggagggagggagggaggaaggaaggaaggaaaaaaggagagaaaagaagaaaagagaaaagaaagaaaatgatccagtatgaaccacccagcccctttgattcaaggaagaaaccaaacattttaaagaacctgtggttagcatgcttgtggaaaggccattgttggtctggcctcttattttctgtgcactctatctaaacagatgccgggtaacaactatgatagaggccataggtagctgttgaaaggctaagtggtgtcatcattaaagtgaagcatcttttacttcctatattaaaagcttcctatattaaaatcgaattagattttaattagaggacataggaaaagaactatttcaaattcctatcagataagaaaaattcatttatttcacaaatacgtatttaaaaactgccataaaacaggcactgctctggacactgaagaggtacccataaacaaaacagaaaaatcactgcctttgaggagctgacattccaacaataatgacagcagttacagcaaaataaactacatagtgttaggaggcaacaggggctagagagaaaaaaaatgagcaggataagggaagtgagggtggggagtcacacctttaaataagatgattaggaattttaccagagagggtaaaatttgggtaaaaacttgaggaaggtaagggagtgagccatgtggctatctgggaagggtcttccagggagaggccacagccatagcagaaaccctaagacatgcctggtcagaacctgtagggtgatggagctgatcctaataagaataaagagaaacgattgcaagtaaaactgtctttctgctggattaaaacccaatctctgagccgaggagttcgagactggcctgggcaacacagcaagaccccatctctacaaaaattttttaaaaaattagccaggtgcagtgattagtgcctgtacgcccagctactctggaggctgaggcaggaggatcgcttgaacccaggagatcaaggctgcaatgagctatgatctcgccattgcacttcagcctgggtgactgagtaagaccctgtttcaaaatataaaataaaacaaaataaaataaaaatccaagctcatccaaaacatattataaaaggatttagatcttgtattagtggattatcagttaactagactagtcctacatctttttctcaaggaagtatctgagggaacaaagactaatatggaaattggagaattcctcatgtaaaatcaaggcttttatctttagaacagtcagattgttggcaaggaaatactatttttttttttaccaacagaaagagggaataaaacctaaaatctatcaattactttttatttctaggccctgataatattgctgttaatcacttgtgcaaaaataaaatctatagcttaactgatctgtcttttccacccattgactattgaagggtaagaatgacttaggaagctgggtgyggtggctcatgcctgtaatatcagcactttggaaggctgaggcgggcagatcacctgaggtcaggagttcgagaccagcctggccaacatggtgaaactctgtctctactaaatatacaaaagttagccaggtgtggtgacacatctgtaaccccagctactccggaggctgaggtaggagaattgtttaaacccaagaggtggaggttgaggttgcaatgagccaaggtcacgccactgcactccaccctgggtgacagagtgagactttgtcttaaaaaaaaaaaaaaaaaaaaaaaaaaaaaaaacgtaggagagaaaactagtcaaatcacttatatgttttatatgtttaaaagttgggcatgttttaacagcattgcttcactaatccctttataatttactgaaattactaacagatggagtgcaatttagcagatcaagatggaaaaaaacaggattgaagaacattgcgttatgctaaaactgatatacttttagagtattttacatattttgtgaaatttaagaaaagacaatgtaccattaattgctattgccaagccatttctatcatacattataaagaaagattgatatgggaaatgatatattggctatagataattacatacttgaattcaaatttcctgagctccttttaggaatcaaattgcatgttgtctcccttgtttaaactcactcaaggacatcagctccatatgtttgaagggaagggcaggactggatgtaaaggcagcagtactcccgccgtgcttccgctaacatgaaatgagagtgggaatgacttagatccacggagtgatggcggtgccaaaagaagcaaagtgaagtgggaatgataagcataagaaggaaaaaaagtgaggggaaaatgtacagacagacacagacagtcgcgaagagagatgtggaaaaagaaaatctacatggcttgatacagtttattccagatattcaagaatggttaaatattaggaaatacatttataaaataacatcaattcaataaaaggaaaaaagccttataattttcttcatagatgccaaaatggtatctgattattgttacattttttcccaaatcaagaagaggagggaactttttagcgtgaaatcaccaggcatcatgatactcaatggtcgttaaaaaagggaatcaagatatttaggccaagcacaatggctcacacctgtaatcccagcactttgggaggctgaggcaggagtattgcttaaagccaggagtttgagactagtgtgggcaacatagcaagaccctgtctctacaaaaaaattaaaagttagccaggcatggcagcatgtgcctgtagccccagctgcttaggaggatgaggcaggaggcttgcttgaactcaggaaattgaggctgcagtgagctgtgaaggtgccactgtgcttcagcctgggtgacagaatgagaacctgtctctatttagaaaaaaaaaggtatttaatttcaacactgttgtttagctttttctataatttctagccaatgtaataagaaaaagatactaaacataaatattgtaaaagtaaaaataattgtcattatttttagctgaaatgaccagcatatctacaaaacccaagagggtttactcaaattttagtaaaactaataaacaatttattaaactaacctgtttatttattttgttttgagacagggtstcactctgtcagccaggctggagtgcaggggtgctatctcggctcactgcgacctccacctcccaggttcaagtgattgtcctacctcagcctcccaaatagctggggttacaagtgtgtgccctgacacccagctaatttttgtatttttagyagagacgaggttttgccatgttggccgggctrgtcttgatctcctgacctcaaatgatccacccgccttagcatcctaaagtgctgggattacaggcatgagccactgcacccagcctctaacctgttttaaaataaatgatatttaatgmctgttctttaacaatggaagctatttagagattataaataagaaattctatttaatttagtcacaaaaatatcagagtaaaaataaatactagttacaaataaatagccaaatagaaataataatggggcctggcatggtggctcacgcctgtaatccctgcactttgggaggctgaggcgggcagatcatgaggtcaggagatcgagaccatcctggccaatatggtgaaaccccgtctctattaaaatacaaaaaaaaaaaaaaaaatagccagttgtggtgatgcatggctgtagtccgagctattgggaggctgaggcagggggaatcacttgaaccccggaggcagagctttcagtgagctgagatcgcgccactgcactccagcctggtgacagagcgagactccgtctssaaaaaaacaaaaaatacataataatggagagcttgcctgtcagacttagtggacacatatcagcagaacagaaccatgataagtgaaaaggagactttggattatatgaacatttcattacctttctaaagggaaaatgaaggtttttagtaaatgttatttagaaaattagttaacaatttggggctgggtgcggtggctcatgcctgtgatccyagcacttcgggaggctgaacctagcagattgcttgatcccaggagttggagaccagcctgagaaacatggcaagaccctgtcttaaaaaaaatacacaaaaattagccaggcatggtgacatgcgyctgtaatcccagctactcaggaggctaagatgtgaggatcgcttgagccccagggaagtcgaggctacagtcagccatgatcgccactgcactgtagcctgagtgacagaacgagaccctgtctcaaagaaagaaaaagaaaattagttaacaatttggaaaaaatttgttcaacttcatgctatacccacaaaataaatgtcagagtgaagtgttcaattaaaaaaagttgtatcataaagcactagaataaaataataaatagataactgatttgaggaggaataggattcatggattttttatagttaaaatacaagaaaacaattttactagataaaattttaaatccctmtatatgaagattatatatatatatatatatatatatatatatatgcaaattaaatgtcaagtcccaagctttaaaaattttgtaatataggtgacaggtggctaataaacttaatatacaaaagctattataagccactaagcaaagatattgttttagtagaaaaatgagtaaagaatgggtgcaaacagcaacatgagaaagctaaatggccaaaaagttcatggacagactgtttaatttagagaaaaggaaatgaaagtgcaaagtgagattaaacctctgagtattaaacctcagtgttaaattctgagtattaaacctctaatactcagaataggcaaggtcttggagaaacaaattgtgttagacaccgttgggaaaacaagctatatgataatttggcaatatatatatatcaaaggccttagtacaataagtttayactgctttataattgaaaaaataaactttttttttttttttttttttttgagacaggctctggctctgtcacccaggctggagtgcagtggcagaatctcggctcactgcgtctctgcctcccaggttcaagcaattttcctgcctcagcctcccgagtagctgggattataggtgcccaccaccatgcctggctaatttttgtatttttaatagagatggggtttcaccatgttggccrkmctggtctcaaactcctgacctcaagtgatccgcccaccttggcctcccaaagtgctgggattacaggtgtgaaccaccccaccaggcctaaaaaataaactttttaaaacaaaagagacagtctaaggcatacgttcagaaagagatagacatggacagtctttcattgttctgcttggggaatctttccctctgttttagaaacagctgtatgttcatctgtcctgtgctaaattcctttgtgttattttcatagctgcatgaatacaggaggttagcacccctggatctttactccctgtctaaaaaactaagtctataattcacatttttttggtctaggggatagcaccttgaatatgtaattcctgaactcacaaatggaagcagtgttaatgaatcatctagttattgattttttctcttcaagtcagggtcacaattcacgtgggtagtatgttggaacaactggctgaagggctctggagttggagaagcggtatcaggttgtattagtccgttctcatgctgctaataaagacatacctgagactgggtagtttataaattgggtagtttatagaggaaagaggtttaattgactcacagttcagcatggctggggaggcctcaggaaacctacaatcatggcagaagaggaagcaaacgtccttcrtcacatggcggcagcaagaagtgccaagcaaaaaggaggaaaaccccttgtaaaaccatcagatctcgtgagaactcactcactatcacgagactagcatgagtgtaaccgttcccatgattaaattacctcccactgggcccctcccacaacacatggggataatgggaactacaattcaagatgagatttgggtggggacacagccaaagcatatcacaggtattctagcagggagttttcatcatcatcgcttgccctcctctcctycatgctcagtgttgccacctcttttcctgctagccttcctccccgttaagatttgtttaactaatctaagtatttcagacatttctccatggaattctatactacagctctgtctcaacaagaaacccaaagccccacaagttgttacatcttcactggtaatctcattgaggtgtcctgtctataggattccacacttcwtagctgttaatgagatttcttcactcagacctggaaggaggtggtttgaagcagaaaccgcaaagcacgtggcctttggacctttagaatgcagcgtgtttccagtgtggtgggatacctgcrtggctcagtgggtgggaaaagccaagttcatggggctcacatagtgtttttgtcagttggtggtctaaggagtcttggatttgtgctttccttttccttccaggggagttttgtggcttgcatgattgccctgctgcagcaaatggacgacagccactatagccactacatcagcactttcaaaaccagacaagacatcatcgtaagttgcctttactggtcctggtaacctgaagacttcttawatttggtttaaaaaaatgactgaagctgagcatcgtgagtccagggttctcttcccacgcacctccggtgctatgtggctgtccacagtgattacagaaaggagagagctgattcctactttctctctttgataggatttgaaaaagagtacaacacatataccaagaggttatcacacactttaatctctcttggatttagagagagcccttatttagcaacatttgggagatgttttttgctctgaaaacaggacttaatacttggtacagtaactactcatgtcatggcaaggattttagaaggcaggggtgtgcaaagtctcctaagacgtggttgataccatcattttggagagggcaacaaaaagaggtaatccctgccctttacaactggtccgtgtggcctgttaggaacctggccgcacagcaggacatgagcagcaggccagcaagcattaactcctgagctccgcctcctgtcagatcagcagaggcattagattctcataggagctgaatcctattgtgaactgcacattcgaggaatctaggttgccagctccttatgtgaatctcactaatgcctgatgatctgaggtggaacagtttcatcccaaaaccattcctgcccccatccgtggaaaaattgtctttcctgaaacctgtccctggtgccaaaaaggttggggactcctgctttacaatatttgtaagttatcttcagatgaaaatattttgttctctattgttttaagcaggaaaattgttctcatagttgctgtgaagcactcatctaagaagctgagttaggcctccggctgtggcttcacggcaccttcccttcaggggattattagtggcccttcagacgtccmtgaaggtgttattagactttgcagagcagtggacaggatgtgccgctggattagcacactgttgtcatgktgacactagtctttggataacttcccatcatctgtgcgtactccagtctctttgttctagattttccactttctgcctctgtcatgctgagtagatggccagtgcccccatggattcgcagctccttccttgcccattacccacctttctgccatgcccacatggtggacaaacatacaaggaattggaaggaaagtgctgtttgttattattagttggttccatggtggactctcaatgccgtgttagactacgtggctttagctgaaggtctccatgagcctctgcttgggccataccctggcaggcrgcatggcatgggaaccatagcaatatgtagatgtgcctgtggagaccaggcgcaagaggcccagkatggggggtggggggtggaggaggaagsccaaggttagccatgtgttctctacaggcaggtggtgtagcgggtaagagcacaggccttagaacacgcagctctgggtttgaattctgaccattccactcccttgtatgcaatttggggcaagcrgtttaacctcactgaacttcagtctcctcatctgtaagatagtacccaccttgagggttaattaagtgttgcttggctccatgcatgggaaatgcccagcttcgtgcaggtaggcatgtagctaatgcctatgaggactagctgtttgtaacaataattgtattattattgctatataaagtaaaattaacaataaaaattctagggattttgtttcaaatttccttcagagagcaggcaaaatagggaggttttaaggtcaaaccgtgacaatttggctccattgttaagtaagaaaaaaaggggcgtacctcctgtttgccagcatggtgttgagctcctccagctgtattatgtaattaaaagaggatcattatcctcacgagggaactaagacctggagaaatgagggaacttgcctgaatttagtccccggtggctgagctaccgtgcacagctaggcctttgcctcccagtggcctttcagtccctcatgctgccttctgagtgaaccgcatgaaggcccttgggaagtggtggataaaaccaggctttgggattccctgtgagttccatcatgccgtctcattaatttagatttccaggagttaaatagagrgtctgtatctgaagcaaataacaagtatctaaattcaatccttgcttcacaaaccatgaattcttatggatttagaagaaaagttaacagaatggcyaataaattggtggaagcacttaaaatatataatgaggccggatgtggtgactcatgcctgtaatctcagcactttgggaggctgaggcaggtggatcactggaagtcaggagttcgagaccagcctagcccacgtgatgaaaccccatctctactaaaaatacaaaaaataattacccaggggtgatggcagacacccgtaatcccagctcctggggtggctgaggcagcagaatcgcttgaacccgtgaggtggaggttgcagtaagtcgagattgtgccgctgcactccagcctgggcgacaaagcaagactccatctcgaaataaataaataaataagtaaataaaatatatgatgaaacraatttgaattcattaattatgtctaggatttcagaactgagggtgggtatgtctaactcgccataaaaccaggggagaatccacagttgcacacacacactggccggccagggagagtcattccccatgccgttcagcatccaaagtataggaagttacccagcttgaccagcatctcagaaaaatatggttagcaataggacctgggcctcctgtctctcacatactgtgtccaggcagaactgtgtaggttagtgccagagaaactggacaggrctttcaagaatcccagtggaaaaggtctaaatttagctaactaataaaaatgccttcaaaacattttagctttgatttcaactctgattgttctatttctgaattagtttttgctcacagccccctttggagcagaagagctctgtatgcttaagtgattagttattagtcatcaccagccactgttacgatccattttgaaggaccgtttaggacctttcttccaggctgcacatgataacgtccctggcgcaggaagagtggtgattctgcttcttgtgtgtatcactgtgtccttttctaaccataataaaggagaattgaactgaaatctattaaaagtatccatttccccacaattgttggtgaattatgtttaagtgcatgagatacattctgacaacctgtggcagcagaggaagaaagagataagggttgcaaacttggggtccaaagctccaagttctcatccagctcttctccttcccactttctttttttccttttttcttttcttttcttttcttttttttttttttttttttgagatagagtctcactctgctgcccaggctggagtgcaatggcacaatcttggctcactgcaacctctgcctcctgggttcaagcgattcccctgcctcagcctcccgagtagctgggactacaggcatacaccaccatgcccggcaaatttttrtatttttagtagagatgggatttcactatgttggccaagctgcccacctcggcctcccaaagtgctgagattacaggtgtaagccactacacccaaccctccttcctactttctatgcccttaagtgagtcctttagtttttctcagcctcagttgtaccatttgtaaaatgtggatgattctttttgtcctcatcttccttatagggtcctacaatataaaaatcaaattgcatcacagccagctgtaagaatgctttgttattcctaaaacccttgaaagatgggctgttactgtggggctaggaacatcctgttctgaggttgtggttctgcttgtatacacgccagaataaagactatgaacgtaacccagttttcccccaaccactcctctgttctccgcaggacttcctcatggaaacttttatcatgttcaaggacctgattggaaagaatgtctatgccaaagattggatggtgatgaatatgactcaaaacaggtgagacagcccatggctggccctgaggcatttgtctgaatacctaaggctgctgtgtgaactttgggaaatgtctttaaatccctttgcctcaaacccatcatctgtaaagtgaggatcttcctgctccagaggtcctaatttatgtgctygtgatcttgattttcccagggtaattgcctttgctccacctcgggctctctactcccttctctagcgtcgtctcttcagtgctctcatggtaattgtcatcctcaactctccactgcacctttccgtggctccacgtggcctgtgtcatcctgatattcagggctcaccagttagtgtctgttctatgaccggtccatgatgtatttaaccagattcttcttatgaacatttagattctttccattttctattaatgtgaaatagcactgtcatggccttccttgctttacatatttaaaaatatccatggttattttatcaggatatactcctaaaataatttagtagttcaaaagtttggtgaaattatagggcttttgatacacagtgccaaactaactagttgcttctgctacttccctgtgtatgctacctgtactccaaccaaactggcctctgcccagtccctgaacacatggtctgctctgcctcacaccggtcttccrctagcagtgccttccccataacctctggctgtcagcattccagctattccataaggttcttctgaagcgtcacctccagaggaagcctttctgacctggatgtcatctcttcttccttcgattttccataccccattcaaaccttcttatagaattgttttcagattctatgttgggtaatagatgtacatgttgttaatttccccaaccaagctgtaaatttcttaagatcagaaactgtgtctttcaacacagacgtgagcctgtgccttgcaattgctagcccacaacaaatacttgttgaacagaagtgaaatgaactgaatatatattatattaaaagagtgttagagtttaatgagataaataaaccattattgtaagcattattattaactctacatgatacccaattctgagtaattctactctaacacctgattagaagaagccttctctgctatgtacagattagatttaaaaaattacaccagaaaccctaagcttaaacagaaggatcataatagagtctatatatattaccctcctctgaggcttaagagtcctggtttgcagtctcagatctaccttcaattacctaaattgggatgtggccctgagtggctcttcttgtttgttctgtaaactgacctcctgtgccccatctgyggatggtgttatgctgttgtctgcaaggacactgttagattatgaggtcttatgatgccaagttcaggtttggtttggtttagttcttaatataggtgggaaaaggtttcaaaggacatacagttggcttctttatctggtgttttccttccgcagggtttttctccgtgctataaatcrgtttgctgaagttctcacaagattcttcatggatcaggcaagctttgaacttcaggtaggcatgtgactcacctacctgcttctagaattcttggccatggcaagagarctatatgaatttggaaaatgtctcctcagatttcactgttttcacatgaaaaaggttttcctgtgttttttcatttcctaaagcacatatgcctgtcacactgtcctccaaacacaacaaaataggggtggtttcttctttctataaaggtaacatatgtaaaaaaaaaatcttaaagagtaatagtagaagatcaaaaatataaatagtcctccttgtcgctataaacatttggagttgacccyttgtatatttacacaaatgcacatagacacacatggctacaaataagcacacaggtaactctcctaccgacaaatgagtttggttctaaagaacagttcttatgcacagtttgttgaaagtccaaaggaattgcaaaacggatgaccgctagctctattttcattcattcattcatttacttatccattcatccatttaacaaatgttagagtacttacatgtacagggccctgttttgcgccctggtaggggcatttccctggtgaaggcagataagttccttgctgtcatggagcttaccttccagagtactctgcattttgtgggtgatgtgctttctgtgttctttgtctttgcgtgtatctgtggaactgttatcagtggaggtccttgactacagattgtccaagttcttgacgttttgaacaaaatgcacaaacaaagcaatgaaagaatgaagcaataaaagccagatttattgaaatgaaagtatactccacagagtgggagcaggctcaagcaagtagctcaagagcactggttacagaattttctggcgtttaaataccctgtagaagttttcccattggttacttggttacaccctatgtaaatgaaggagtagcatgtgaccagtctgaccctcccaccaattgtgggaggggactaatcagaggtactttcaatttttcawctgccacagagtgcaaaggggtagcctctgatccttttgttacttgggtgtggagaggtggggttttccttttgattcagttctaggaagtcagtgtgaattggccttcagtgccctgcctccaggccctgttttcctgcctcagaactttaaaagttgaaaatcataagtagaggaaagtatacacacatacacacacagagatgcatgcacatatagatgaatatatattgtatgtatgtgtatgtatatttgccaaaatggaattgagctgtgcagttctttggtactctgttaatctgttttcctttttcaatgatctgtgatcttttcaataatgttgaatattttcctgtttttaatggctgaatatcatctgttctatgactggtccatgatgtatttaaccaaattcttcttacgaacatttagattgtttccattttctattatattaaataacactgtgatggacttccttcctttaaatatttaaaaatattcgtgcttggctgggcacggtggctcacgcctatagtctcagcactttgggaggccaaggcgggcagatcacctgaggtcaggagtttaagaccagcctggccaacatggcgaaactccatctctactaaaaatgcaaaaactagctaggcctggtagtgggtgcctgtaatcccagatactcgtcaggataaggcaggacgcttgaacctgggaggcggaggttgcagtgagccgagattgtaccactgtactccagcctgggcaacagagtgagactctggatcaaacaacaacaacaaaattcatggttatttcatcaggataaagtcctaaaagtgtttactaattcaaaagtttggcaaacttttaggacttttgaaacatagtgccaaagtacatactataaatagatacacttcttggcagcagttttcctttatcccaggagtaaagaaaaatataatagcttaaatttttttaaaaagcttaacattaagtctcaaaacttttaggattgaataatcaaaacctaagaagaatgtagattgtattttgttctttcattaatctcttgttaatgactttttaccatgtgacattgttttattatggcccttattaatgttatttttcatttccctttacccacacaattaattttgaacagctctggaacaattacttccatttggcagttgcatttctcacccatgagtcccttcagcttgaaaccttctcacaagccaagcgcaacaaaattgttaaaaagtaagtgtccttttaaagttaagatcgkgaaggggcttcttccrtttgtttacattgagagcaatattttaggtatcacagaaattactatttagtggctacccatgttgttagtgaggtaagtcttcaactaattacttaataggcctcacattcacccaggttcagctctcttttcttaaggcccaaccatcttcccatcagtcatcccatgctttttatcaaatctgtacctggagacggaccttggctgtcagcktgcccatccccaagaacagctgcgcctctgctggcagcttccccaaattgcaggcatagtacctcctcattcatagcgcttcacaaagcacactccttcagcacagttgctccacctccctgccatttcagcagagaaagccaggtctcagacattgcattaaaatgccctccagattcctggtttggaattcaaaatggaattatgtgcagaagtgataagagatttagggaagcatttcatttcattgagagactggaatccaaagaccatgtcgttaaaaaataacttgaggaatgtattatttgaagactttgaaattttagttgtgttccccttgttgggatatctgcgatatgtaggaaaattatttagtgtccctctacttctggttcctccctcaaaaactgcctacatatacaaaaacagcaaagtattttttgctcccaaggaccaatatttatccctttgtggacagtatcactcccattgagagtgcatggtgtagagccttccaatgtgaatattttgaaaaacacgctrgaatggatgtatattaccccaatatcagtctataaagtatataagtatttagtcacctgttaggcattagtcacagtactgtatgatcatacttcattcaccttccttttcatcagtgtttgccgtgttttgtttggctttgtctgtgcctcactcttctccctgaagtgagtttgttaatctcatcttctcagctatttttcagcgtttccatttggctttattgcggcacaaggtcccccggcctctgtgcgcctcattccttttgggggctcgtttaggtatgaacctcatctcttaaggttgggccttaagagtgaccaagagagacacagactgtttttactttccttcttattgtgtttatgcaattcatttctactgaaaatcctccttctagtttatgatcttcttcctagatatggggacatgagaaaggaaatcggctttagaatccgggacatgtggtataacctgggtgagtgtctagccttgarcaggcctgatcacaacctytgagtgataagcatcccacgataaagtcttttttttattttaatccagataaccctgagatgtatttgtctgtgtgtctggaagtgaaagttgatttgtgggtttcattgacaatgaactgtctcttactctggcatccacatgctatcagaatctgagtcactcacttctgaattgagttgttttaaccttttcttttcttatggaacttgtggaggaagattttaacactttactttcagtgaaataattttttaatatcttcattcactttcatttcaggtccccacaaaatcaaattcatcccatccatggtgggtcccattctggaggtcactctgacccctgaagtagagctccggaaagccacaatccccattttctttgatatgatgcagtgtgagttcaatttcagtggaaatggcaatttccatatggtaagaagtggcagaccgcrtaatattagtaaatggacatatagtcaaatcataactcatttctttctatatagagaagcagtaaccttaataatgcaagtccatgttgatctgaaagttcactttacatttcattttrtaaagcaattagagatagagtcagacagtgcaacccagagcctggaaaagatttttttgctacatgtctttcctaaggcaacacctgtctgtagaaaattaaaggaagttaacttcatgcattttaatcctagctgtttcagtatagcctagagaataatgtagtgaattgaatttaaaaacctatctattatagtacggctgaaagcagtgcagtggattaagttctaatccattaccctgtagctttgagaatgtcattttcctggtatgtcttctctgtgcctctgttttcttatctacaaagtgtattaatattgaaaggacgatttcgcatctatgaacctctgcaaaagcaatctcactgcagagacttagacatgaaactgaagtaaaatagaaaaacaagaattattattctatttttatatgmatagttgtaacagaaagcaatgttttggataatatgtttttaatcaaatgtaatgcaaaggacaaagtaacatgagactttgttagaagattttgatagggccttggtgcacagtttatgagtgaccctctgtgatcctccctgtctgtgctggaaacagttcacaactcagcgaatgggttggccaagtctagaaagttggccatgtcttcttctaaggatgcaacattatcctgtgaaattctgcctctactttcagtttgagaatgagctgatcacaaagctggaccaggaggtagaagggggcagaggagacgaacaatacaaggttcttctggaaaaactgtgagtatttcaggaacgaaacctgaagtcagtggtgtcatttagtaatagagaaaaacaggggtcctkttkcaccratagagcaattgagtagtctyagagtcactagggccacccccactgtggtcttcagtatggttatggggtgtatactgtccacagctgacattrtttatctsgtgggagtcaaatgctggtattttcctggccagcctggccctagagaacacagcagatggaggcaaggaggaggtgcagagtggtggcattttgcccagtgtttgaatttttgaacttcaacaaaagtattagcacttctaattataactgcaaagtaacaatttaaaggaaaaaatatttcaaggtctgctgtgtatgtaaaaaataccttaggacccataaaggacatataaccaaagcagttctgtctccagccaggttggtctttttcctgccctgtcatccaccccatccaacacatctgtacctctgtctgggctcccattatcaccactgtcccctcttcccccaccaccacactcacctataaccctcttgccctccttggcacatgtggagtaatgaagagtgggaaagtgattaaaaacacataggtgttggcctcagtgagagattgaacttcaaaccctgttttcgccacatattaagagtttggctttagtccagtgattctgcttatccaacacttcattttttttccctctccaagaataacatctattttttgatatcatcatgagaattacaggagatgatgtgctaacatagcatctgttgcagagttcatgactaataaatattggctgctctrgtgttcatggttgttattattacaatttgtttytggtgtttgtttttaagagatagggtctctctctgttgcccaggctggagtgcagtggtgcaatgatagctcactaaagccttgaactcctgggctcaagcagtcctcccgcctcagactcccaagtactaggactacaggcatatgtcgccattcccagctgtttcttatttttacttgtgtagaaatggggtcttgccgtgttgccaaggctggtctcgaaattttgctttaagtgatcctcccacttcagcctccctagtagctaggactgtaggcgtgcaccaccatgcccagctggttttcatttttatttttgtagagacagggtcttgctrtgttgcccaggctggtctgaaactcttggcctcaggcaatcctccagcctcggcttcctaatgggctgggatttacaggcatgagccaccacgtctggcctagtattattrttattattatttacaggcctacccttcattcaggttgtaactactctagaccattgctttctcatgttccctgaacttttctagtgttgaccaactgcatctccagctgggtgcttgcctcagtcacttagttgttcacctgttcgcctgttgtgtgtgagttttgtggatgagagtctgtgtttgaggacagtgctcccaactgtattcttttttgaagattctctaaggaaccagcactctgaataccgagaaatggaattgaattgtattttcagtagagatggggtttcacgatgttggccagggtggtctccatctcttgacctcgtgatccacctgcatcggcctcccaaagtgagccaagtgagccaccgtgatggatgcctgtagtcccagctacttgggaggctgaagcaggagaatcacttgaacctgggaggcggagattgcagtgaaccgagattgcaccactgcactccagcctggctacagagcaagactccgtctcaaaaaaataaaaataaaaaaaataattgaattgatgaatagtctgtattttaaaggactagaagcctttcttattttgtttttaatagtgacaagaccttttgttggtcttttttatcctgtttccattaagtctctccatttgagcttcaaacctcccagtttatatcttttgcaattctgatcttatatggaattaaatgaagttatgcacatatacacacaatatttatacatgatatgctacttttttaaatcctacagctgatttgttttacataaggatcttactttgttttcttcattcttcctagatcactaacttagaaaaaatacggatacataggtctccagtgcccaagaataaccctaaatctggattaatgtgttggacccatttctttctctttccctctccctcttttcccaggttttcttttaattatctaatctaataagccccagaacttggctctgtgtgggtccaaagggacaggatttagactgaaagtttagcctcagtttgcttctttataactctgcatttttttctgaagctaacacttttatctaaagagccgcattgcaggagatgtactaggttcccaggttcctctaggctgggcatccatacgaagcattccagaatgttcagaggatgccctgagtgccaggccttagggagaataaagacataggaaaaatggtctcatacaactaattagagtcctcacagagcacacacgaaccttttgagcaagggtttgttgactgaataaaacacaaacaaaaacagacattgaaagaaggacattgtgtgctcrgattctaagtgatgttgggacttgagctgagtcctaaagaaaactggaactcgagtccacaaagaagcgcagcataagtgaaggtcacaggataggaaggtgttgcatgaggtgtgtgtgtgtcggcttaactgtgtcacttaatatctaacattgacgttctgtgtcatcaaatcctgccccagccactgctgagaccctggtcagtgctggtcagtgctgctggaatgatagcatggaacctgggcttttgtctctccctccgcccctccaggctcctagaacattgccggaaacacaaatacctctccagctctggggaggtcttcgccctcctggtcagcagcctcttagagaacctgctggaytatagaaccatcatcatgcaagatgagagcaaggagaaccgtatgagctgcactgtgaacgtgctggtatgtgacatgcctccggtgtgatgsgagggyactgtcaggccgcccctgcaccctacagctcagctctaggtagatcccacaaacacagaggcgccctgaggcacctttgtggagccggtgtcttcctaagtctaattggaatggctggctcagctcacaggtatcagcagccacagaccctgaggataaatttggtgtgtttttgattgtttgttttaatttttatttcagtaggtttgggggtacagtggtttctggttacatggataagttttggggatttttttttttttttttgagacggagtctcgttctgttgccgggctggagtgcagtggtgcgatctcagctcaccgcaacctccgcctcctgggatcaagcaattttcctgcctcagcctcccaagtagctgggattacaggcacgcgccaccatgcccagctaatttttgtatttttagtagaaacagagtttcaccatgttggccaggatggtctcgatctcctgacctcatgatccacacgcctcagcctcccaaagtgctgggattacaggcgtgagccaccgcacccggctggataggttatttctttagtggtgatttttgagattttagagcacccgtcacccgagcactgtacccaaaatgtagtcttttatccctcaccctcctataaccttccccactgagttcccaaagtccattatatcactcttgtgcytttgcatcctgaggataaatatccccttttcttatggggatatttgttaaagggaaacagtgatctctttggaaaagtgaaactkttgaaaagcaacaatagtggtttgtctatttttgtgtcaatagctcttgatttatgttgggattctgtgatccttttttttcctggcagaacttttataaagaaaagaagagagaggacatatacataaggtaagctgaaggaaatttcttgcttctgctgtttatttcatggctttgtgattgatttcttcagtaaacaaatactttcccaacaccgtgtttgctgctttgagagacccctaaaagtacatgatacgctccattcaccctgaaccgacaaactctttagacagatacatgaataagtacgacaggaaggagtgcctatgtgaggtcatgycagggatcaggggaaggatagacaacttctggcctgggtgggcaggagaggctgtacaggaagaggcaggaaaacccacccaagagtcttagcttgaagtctgcgaayccctgaacatgaaacaaacttgtacgtaaccaacgtgcatgttgttggggagagattccatagctttcattagcttcccagaggggtccaagacctaatatttaaaaacattaaacaccactgccttaaagaaagaagagaaactagtctaggtggagtcagagaaacacggaggcaggaggtgcacagtgtattgaagaaatggggaagatccgacttcttggctcaagaggaaggaattgcttctgtacagtagtggggargggggtcaggcagggaagcaggctggggtctggttatggaatgagctgaacactaaatcaactctcgagcctgggcagcatggtgaaaccctgtctctacaaaagatacgaaaattagccgggcctggtggcacgtgccagctacttaggaggctraggtgggtggatcacttgagccctggggcttaaggctgcagtgagccatgatcggaccactgcatactgcagcctgggcaatacagcaagaccctgtctcaaaacagaactaaaaaacctataaaactctcgagtgacaaaatgcttccttctccccttcttgccagatatctgtacaagcttcgagatttgcaccgagactgtgagaactacacagaagctgcctacacgcttctcttgcacgctgagcttctgcaggtgaatggctcagagagcttgtttcaacagggtggagtacagtgtcctttcagactaaattctatacatttcatgattttgatgggaaagaactttattccaggaatatccttttatacaagtttttttagttctttctaaataggcacagctaatttgtagatcaagtatgggaaaatgtcagttatcttttatttaaaaatccttagaaagcagagcacgacttatgaacctttggtaattgacactctaattaaagcaataaaacacacattgatgaatacataaaaaaatttgtaaaactgcagaaaacygcagaaagatgagttataagtgaatatagtaccatagaagtactctatttttattctctccctaaataaatgtatgttgtggtttagatataaatacatctatatgttatgaatcccaagtaattatttctagccctgagcaccttctctaactttggatttacatataaactttgattggccaatatgcagctcaaactgaacaaggcrgtaacaggaacytttatttctcactctttgctcctccccagcccatcctacctcactttgttaccatgttactaataacattcccatccatttagttgctcaggcaacctcatagtcatcttcaatttctctcttttactcaccacctcccacattctccacaagcgagagatgtggcccctctgttcagaacatgcccctaacytatccgcttttctttttctttctttatttttttttttaaagagatgagatcttgctatgtttcccaggctggtctcaaactcctgggctcaagcaatcctcccacttcagcctcccagagtactaggattacaggcatgagccaccatgctagccaatccacttttctttatctccctgactaccaccttggtccatcccgtaagcatgtcacaccttgagcactacagcagcctcctgtttggtgtctctgcctccagttttgttctcagctattaatattcttttacagtttatattttatactaaagtaatatatgggcattgtccgaacatatgagttaaaaataggattcctatgcctcaccacttcccaaaggaaattcacaattcatatttaagtttagggcattaaaaagcttattgtataatggactgggcctggtggctcacgcctgtaatcccagctctttgggaagctgaggccagcagatcacttggggtcaggagttcaagaccagcctggctaacatggtgaaaccccatctctactaaaaatacaaaaaattagcaggcgtggtggcacctgcctgtagtcccagctactcaggaggctgaggcaggagaatcatttgaacctgcaaggcggaggtttgcagtatgctgagatggtgccaccatactccagcctgggtgatagagcaagactgtgtctcaaaagaaaaaaaaaaaaaaagcaacctactgtatatagcttagaaagtgaggcttgttgactgtggatttcgccattgtatgatcagaaagaaatccccagtgtctgtaactgtaggtcttttcatttgggaaactcaggaaggtaaactctcctatcctggtgtaagatatgaggtatgaatgcagctttttttccccccagattgctattcaatagagatgctgtttgttaagtatagttcacattttgcttattggtataagatcccatctttattactaaattcttattttggggggagggaatctctttctagattgtatatgcttttacgtgggtctctgtctgttcatgtaccagtaccatactgtattaattattaattcttgatagtgtgttttatgacctggtagttactcttgattgctcttctttttcagagttttcctacctattcctttttgttaatttttccatatggactttggaaagatgaaatttaaaaattaatttagtgagaatttacatgttaatgaaatagaattttcttatccaaaagcatggtatgactttccatttgttcgagtctgcttttgtgcccttcaatggcgtgtgaaagttttctgcatataagtcttgcatattccttgtaatgttcactcttagaaatgttctttttggacttatttttgtttggttccattcttctattctgtatatttagtctccgtgtatctgaaataaattttatttcaagtatattaattgttyttcctgctgcgtaacttaattctcttattgygtgtcgcagtttcttagtsaactgccttgcattgtgaggaatacaaccataatgtttgcaaattgtggtagttttacctcttcctattcatttttatactcctaatttgttccttttatctgactgtgttactgatgccccagtacaacgacagtcatgtcagttagcgaccttgctttgtcgctggcattttggggggatgctgtgagtgctccttcatttggcatgatactcttgttttggagctggcatgtgtatatgtgtgtayatgtaacttttgtgtttaatacataatctaaaatacaaaatcaatgagtcaaatatatatacaatattttcttgatgttggggggctgaatatttgttgtattaaccgtgtgtcgcttttcttccttttcagtggtctgacaagccctgtgtgcctcatttgcttcagarggacagttactatgtttatacccagcaagagcttaaagagaagctgtatcaagaaatcatatcatatttcgacaaaggcaaagtgagtattggattgtttttgtactaggggaaagaggaaaatgaccgcagtatcgcaatacaattctgatgctcaccacttggagttagcactgactacccaggttcagggcacygtctccaacgagactgcccccgcttcagatgccatcttcaaatttgggggtccccagtccattcacagttctgggcaactgggtatacatctggggggcttccactgccccctcaggtttaatagtctgctagaacaaccaatagtacacagtgaagtgctatatttaaccattccagtttcatcaggaagaaygtaaactggggccagccacatgaagggacccatagggaacagtctgggagaatctcaagcgtggggcttctgtgtcttccccctgtgaactcggggcaccttcccagcaaatcagtgtgttcctcaatcaggaagctcacccaagccatgggtgtacagagtttttattggggtttcttttttttttttttggtaaatatggggtctcaccagttgcccaggctggtctagaacctagaactcctgggctccagtgatcctcctgtattggcctcccaaagtgccaagactacaggcatgagccactgtggggtttcattatacaggcaggattgaatgaatcrttaactacacaatgaacttgatctttagccttccttttgtccctgaagattgggctgatatcgcatggctcacagccctaaccttctagtcacatgattagtatttctggcatggcagcccccawcctgagactaggagaccaccatgagtcacctcattagcatagatttgggtatgatcctggggtgggggcaccaggaataacaaagacactcttattatttgagaaattctaagaaaattcaccrgaactcaggaccaagaccagatacatgatttaatatacaacaataactcacagctactgtttattcttcccttgtgtattcttgaattctgagatttcagagggggacagattttgcaaacaatgattttaaaagatttaattttgaagtgtttcccaatggcttgtgggctctgcacacatttcctcagaagccagaaacaatggaacatagcaccttgtgaacaggaatgaagcaggaggtgacccgatgctgcaagttgaatagtatccgtctaagagacagctcatgaaataccaaaggggttagaaggctcaatctgggctgctagcctcagacactgaggacgtgctttagcctgtaacttacatggttatacatgctcggaggcatttcctaaaactcatccactaagtagggaaatcagtgccctgcatkgaaatacagtttgccaaattccacactatcggggaaacccacccccaatatttcaacataggttctttctattttccataagtgttggccrgctgakaaataaagagaaagagtacaaagagaggaattttacagctgggctgccgggggcgacatcacatatcggtaggaccgtgatgcccacctgagctgcaaaaccagcaastttttgttaaggatttcaaaaggggagggggtgtaccaacagggagcaggtcacatacttcaaggggcaaaaagcagagcaaagatcacatgcttctgaggaaacaggacaaagggcaaaaggcagaaactcctgaaragggtctatgttcascggtgcacgtatwgtcttgataaacatcttaacagaaaacaaggtttgagagcagagaagcggtctgaccaaaaatttaccagagtggaatttcccaaccctagtaaacctgagggtactgcaggagactgtttattcttccttatctcaactgcataggacagacattcccagagtggccatttatagacctccccccaaggaatgcattcctttcccagggtcttaatattaatattccttgctaggaaaagaatttagtgatatctctcctacttgtacgtccatttataggctctctgcaagaagaaaaatgtggctstttttgcccgaccccgcaggcagtcagaccttatggttgtcttcccttgttcccaaaaaatcgctgttattctgttctttttcaaggtgcactgatttcatattgttcaaacgcacatgttttacaatcaatttgtacagttaacacaattatcatagtggtcctgaggtgacgtacatcctcagcttacaaagataacaggattaagagattaaagtaagacaggcgtaagaaattataaaagtattatttgggaactgataaatgtccatgaaatcttcacaatttatgttcctctgccgcagctccagccggtccctccattcggggtccctgacttcctgcaacaccacacaacagtactgttarcctttttccatctccacaaacaacatcactacacctacacacacacacacacacacacacacccatacacacacctgtacacacacatttcagaaccaaagtcccacagaaacttcccttccccctccaaccagacttgcatgctttccgaacctgggctggcagagcttcctctctactttgaagtgctgtaggtgcttgacctgttaaacacagtattgcttttttgggcgacacatggtacttattcttaatgtccgtgcaaacagaactacagaagaygcccctggcaaagctgccaatatacactgtctttatgatgtcaggaaatgaaggtttcactgatctaagggataaagcgagtgaggaatatctaccgaaactcaatcccccagaccacttgctcattcccagtgactcgccagtggcttttgccactgaatcaatgactgccttgttctccacttttaaccytactttcctttttctgaagatgtgggagaaggccatcaagctgagcaaagakttggctgagacttacgaaagcaaagtatttgactacgagggccttggcaacctcctggtgagtctgggtcaaaatatgttaggcctctgacagggttgctaaaattagcrctcatgaaaatgtttccgtaagttgaaagtcaggatgaatggtgtttttttacaatggaaaagtcaactttgcttgaaatgagaatgaaaaaagatgtagtccaaaggctstgatcaatatttctgccaaatatccttcagagaaggttcaggacatctctggaagtggagtggggttgtctcgacagtgtggtggaatattgagtttcagatagtagtgactygctttccacatccctcaggatctctgtctgcagctctctcattcttcctgaagccatttttctttctgtgggccctccatattcccagccatcagtaaagcaaaacaaaaatgagtgcccagtgttasgcagccaccattctgaaagctcagtggaggcagccaccattccgaatgcccagtggaggcagccaccattccgaatgcccagtggaggcagcaccattccgaatgcccagtggaggcagcaccaytccaaatgcccagtggaggaggcagccattctgaatgcccagtggaaggcagccaccattctaaatgccccagcggtaggcagacaycattctgaatgcccartggaaggcagccaccattccaaatgcccagtggtagacagccactcttctgaatgcccaatagaaggcagccaccattctgaatgcctgatggtaggcagccaccattctgaatgcccartggtaggcaaccataatattaaatttaataatttctagtagaggagttagaaaagatcaggtcacccatagtcatgaaataatcatttatttgaggagctgggtgtcaagatcactttgtaaaaagtttaccagtgtrctattaccagcccctggcttcacatgcaaaaaactgacttattaatttcatcaactgggctgggcacggtggctcatacctgtaatctcagaactttgggaggccaaggcagatggatcacttgagcctaggacttccagacgagtctgagcaacatagtaagacaccatctctacaaaaaatataaaaaattagctgggtgtggtggcaccttcctctagtcccagctacttttgggaggctgaagtgrgaggatcacctgagcctgggaggtcaaggctgcagtgaactgtaatcatgctactgcactccagcctgggcaacagaatgagaccctgtctcaaaaaaaaaaaaaaatttcatcaactgaactgagctgaaatattagtaatgtaacatgttacataccggtctaagaaaatagtattttgacgagaccatcacctagatagaagagtaatggcatgctaaccattgtaggggagggggctcaggtcattgctcaaagctgtccacgtctggctggctattttgctttctttaaggctgaccttgtgagccaaagctggaaagcccctcatcttgtgaagaattaaagataaagatggtagcagatactgaaaaaccgaacatcaccaccaccttctgggcacttataatttaccagacactttcatccagaccacctgcatgaactacacagtccttctttttaaaaatgttctttattttattattattttttcaaaacagggtctcactctgtcacccaggctggagtgcagtggtgcagtcatagcccactgcaaccttgaactcctgggctcaagacatcttcctgcctcagctgctggctaattttttaattttttgtagagatggagtctcactatgttgcccaggctggtctcaaactcctagcctcaagcaatcctcccacctctgcctcccaatgtgcaaggattatargcgtgagccactgcgcctggccttggaaggttctttatcttctcccatgggtgtctggttaagtgcagccgccttctgtgaatctcagaatgcactttttaaccttttrtagtccctgagcccactttgagaaactgctgaaagttgtgcactgccccgttacgcagaagaattccaacgtgcacacacttcagcatacaccctcagggagtcacagccttccaacgtccattcatggagcccaggtccaaaacctgtgatccgagaataggataacccttttctgcccatagggtgttttccaaagacctttcattgctctgggttacrtgggaaacaacaaaacaaagtctgactttttttttcccccaactgtgtacttataacctccccttggaatgtcttgttttgttttccagaaaaaaagggcctcattttatgagaacatcattaaggcaatgaggcctcagcctgaatactttgctgttggatactatggacagggctttccttctttcctacgggtaagaaacctgatggtggtctcccaggccattaggaggagggaagagactcatttcttttccagatgggcaacagggtgttagcagctgccgacccgtgttctcgctgtgggaggtaggggagggaaaccacttcctgagcagccggcctcttcaccccacacccccggacacccgtggtgttctgcaggtcttttgtgaaatgacttttcccaggtgcagtgaaaaagggaaaaacagaaccatcccccgcactggtcagctgctacgggtcacgccagggaaaagtgtggactgatgtatttcgttgtttaccatgtttctagccagagctaatttgaaaataggtatcccaagaaccagactgcaggagtatcccaaaataaaacattttattataataataatgacaaggatggtatttttcttccatctcaaaattgtgtataatgcgatattcaatttatagtttaataaataaaaattcttatctcttacgaaaagtttcttttagagctgagctttgcttaaacatttattatccatctgctttctcctaatttgaaaacaagcgataaagcaagcaatttacattcctaacagtgcctaatgagacagtttattcattcagtcagtaaatatttattgaacatctactgtgtgccaggcatagggaaggcattagaaagatcttgctgattacagtcaaacatagtccctactctcatggattttacaacctaaactcatgaggggagattttaatcacacatgaatgtaaaatttaatctgcatgtcggacgcagtggctcatgcctgtaatcccagcgctttgggaggctgaggcaggcagatcacttgacgtcaggggttcgagaccagtgtggccaacatgctgaaacgctgtccctactaaaagtacaaaaattagctgggcgtggtggtgcatgcctgtaatctcagctactcaggaggctgaggcaggggaattgcttgaacccaggaggtggaggttgcattgagccgagatcmcaccactgcactccatcctaggtgacagagcgagactccatctcaaaaataaataaataaataaactrtaaccaagaaagataccctgtgctataagaatctgtaaccaggaagtatttacccaagtgaaatagaaacttacccttttacaaaaaatgtacaggaatatttatagcagctttaatcatagtcaccaaagacaggatccaatccacgtgtccctgaactggtgatgggataaacaaacttcagtgtatccacacaacagaatactgcagcagccaaaggcagtcagctcctgatacacacaactgygggcatgattcccacccacatgcagcttgctaggtaaaagaagttacacttaaaaggctgcgtactctgtggttttatttatacgaaattcttgcctaggcaacgcttcctatcaggacagaaagtagatcagtggttgctggccagggggaggttggctgcagaagggcctggggaaatttttggtggcagtgaaactgttctgtatcttgattgtggtcctggttatgtttgtcaaaactcacagaattttacactaaaaggggtccattttactgtatgtagattatgtcttaatattattattttatttatttatttatttatttatttatttattttttttttttttgagacagtgtctcgctctgtcacccaggatgaagtgcagtggtggaatctcggctcactgcaacctccgtcttctgggttgaagcgattctcgtgcctcagcctcccaagtagcagggattacaggtgtgcacgaccaggcccagctaattttttgtattttagtagagatggggtttcaccatgttggccaggctgatctcgaactcctgacctcagttgatccccctgcctcagcctcccaaagttttggaattataggcatgagccaccgtgcccagcctatgtcttaataaaaaaaagaatcagggcctggcacagtggctcacacctgtaatcccagctacttgggaagctgaggtaggagaatcacttgagctcgggaggcagaaattgcaatgagccgagatggtgccactgcactccagcctgggcgacagagccagactccatctcaaaataaaataaaaaaaatcaggaaagactttccagggatcctctgtttcagctgcaacctgaaaggtaagctgggagtggagcaggtaaagggggtaggaataagcattgcaggcagaggaagcatcaggcaagagcagggcagtgccttgmaaggaagggccagtgcagcaggcacagagagagctggggtgccagcggggaggcggggagccctggaagagcctgcagggccttggggtttcctggggtgttctgtctacatcctgagagcagtgggagctgctgcagacttttcgtgttggaaaggtcatctggcttttgtctccatggtcatccatggagaatggatgggaggtgctgcaggtaaaccactaagagaccattgcagatgttcagaaaagagatgacaggctagactcgggacrtgggggtggtggctttacagagaagcggaaatactagaggggtggagatgaggtcacagccatctgatgattgatgggctgtgtgggtgaggaagygagagttgtcaagaatgatttctgggcttctggcctgcatcattggagggggtagttgaaccatttactgggacaggaggaccggaaaaggccagagtcacagaggagagaatgaatttattccttgagtaaatatttattaaactcctaccatatacttggctctaatataggcatgggagcagagtcaaaacgaaccaaaatcttgaaattatctagcttatgttccagcttggagagrtcaaaaaatgagataaatcaataaactatttagtatgagagatggcctagaacactgcctcctacagtgtagctactcagtaagtatcatggagaaaaggacttagggaaggggactagagaggcaggtgttggggatggagttacaattttaaatacagtaaacaagaaagacttcagaaagaaaatggcatttttgcaaaaaccagaaaaaaagttaaagaataagctatgcagctatcaagaggttgagcaaaggtcccagaccttgagaatagcaggtccaaaagctatgaggctggagtagttgtgtacaagagggtgtataggagaatggggcaggtggctgttggtaccagatagcagagggcctcccagggctttctaaagtgtttgcaaagtttggttttgcacgtactcaaggggaggtacatttggaacatccaaaaggcacaagtcaaccattagctgtatagatctggaactcaagtgaagttacagacaggagagaaaagttggtgagttacttgtatggagttaaaataaccgtggttggggatgaggtggaccaggcagaggaaagaataaagagtggaaggtctgaggccaagcatggtgactcatgcctgtaatcccagcactggtaggccaaggcaggagtcttgcttgagcccaggagtttgagaccagcagtttgaggccagcctgggcatcatagcatgaccccgtctctataaaaaaattttttaaaaattagccaggcatggtagcrtgtgctatggtcctagctactcagtaggctgaggcaggaggattgcttgagtattggaattagaagtgacagtgagctgtgatcaagccactgcactccagcctggatgacagagtgagaccctgtctcaaaaaataaaataaaaaatagaaagagtgtagggtctaaatgcatcagggtctagtgttagctcagcttcaatccaggtcaacataaaagaacaacccctgccatagccgttacatatgcctgcatgtcccatgaaatcagaaatgtgaccacagasacagcagtgattctgtgaaatcaagaacaccagactttcaagtcgaaagcattctmgtctaaatcacctgctgagcgagtgtgcaattttggtgaaatcacgtaatcactgagtcttggttttctgatccgtaatttagaaaaataatgcctacatcgcaggaaagttttgagaattaagttaatagcatataggagtgctttataaactgtaaagtagtttagagatgttaacatacctcaaaggcatactgtagaatataaaatcctcaggagtgatataacctcactgccactctcttctatgggatatttccctgaattcagaatatttaaaattacatcatcctctccttccaacccaatgagatctcattatctcttttgtttctgtcaggggtaccactgttcttcctactccaagaccagtgacttttttttttttttttaagagacgaggtctcgctctgtcatccaggctgaaatgcagtggtgtaatcacagctccctgcagccttgacctcccaggctcaggcaatcctgcctcagcctcctgaggaggtgggattacaggtgtgcaccatcacgcccagytaatgtttttattttttcttagatatggggtctcmctatcttgcccaggctcaagaccagtgatctttgaatcagcgtcgactcccctgtctgccytgcccttctcccgacaccaaagaagcaaacactgaatgctgttacttctgtctctccttctgttacttttccttcttctgctcagtccagcctgtgagctttcagttgggcatagatgccactgttggcttacattgtctacacttcttctttcatcatgcatctcctgccttccagaacctccagtgaacattccragtctttgaaacctctgcctgccatgcgagaccattcattttctggctcattcttccagtccaagctcatttcttctcccagaattctgtgctttccgcccctgggcctgactctttccacatacccacctggtccttcgcaccccttctctttacgcttycttatcccattcatctgtctatgcccatctaaggcccatgtcttgcttgaagccttctctttccagtcgagctaattcttcctgayctgcttctgtgattccttttacagttatcgtctrcatcatacaactagcgttgtattacactctgatcctttacccaccattgtttcatctgaatgatggaatttcaacaggcttgagtcccatagacttttcctaacttggaaaagttttatcatatattccaaaagatccagtagtttttactcccttcattcagtgtttgcctggaaagtgtaattgccctcacggtacttacactatcatgtttactaatatatttacttgcttgttttttattctctcctctagaaggtaagttctgtgagagcaagatcaccattgtattcctgttgtccagctgatcttctctttgtgcaatacatatttttatatgaatggacaagtgattttgaaagacattttacaagacaacctgggcccaagtgttgcttaaaaaggaatcatgtgtgggctaccaatggaaactgctcatttcaaacatggctatgtttgcacttgcccaggcaaccacacctgtgagacaaattactcccatgcctggggcctaggaaatctctttggggaaaaaaaaatgattaaagagattatatttacagtctagagtggagaaaatagtatttaatgcagtaattttctattagactttcaggattggctggggactgtggtacattgcttctgttctctgtcactctgtttctgtgccagaagacacattgcttctcctcattctcttatgcagtgctgtttaagtggtggtccacaaattgttgctggatsgtgatragatcgattaggagtttatacctcaatgtaaattaatgcacttccttccttccttaagaatgtcttgccatgaaaatatcagcatgcctgkggatgtcattgatttaaatgagggcacaagttccgtatttccttgcagatgggtccagactgtttgcagactggccatggtccttgggccacactggaagaagaactgggctaagtattttttatgcctgtgatttaacttctccaataaaccgcagctcttgtaggatatgatggtcgctgtcaggcaaggactagattttcartgagaacttgatggtggggattgaacgttggctggggagtgcagtggctacctcagtacccggaactccagttgcctctccactcttcctatgtaatgacttccctttctgtgtctcacctgcagaataaaatcttcatctatcggggaaaggagtatgagaggcgagaggacttcagcctgaggttgttaacccagttccccaatgcggagaagatgaccagtaccacgcctcctggggaagacatcaagtcgtcccccaagcagtgtatcctttccggggggagtatggccycsaggctcttatggctgtgcacagccccagctaagccagagaacataggagctacagtcccttctctgcagacacaccatcttctcaagcattctgacacaggttcccattccatgtaaaatctttgggaccctaatagcattagctggtggtgatgacataacaaaagaggagagataatagacaaatgatggatatgaaatatacttcgtagccagatggggagcttaagtggaatatatactttctattgtgaattctggattctgttgtagactttgagacagtatctctgtcctggtgggttggggagctaagactttctaagacttgatcattaaatcagagcaggagcgcttacacttgagctgcttttgaagcctaactttaccatttaccagttgtrtgatgttggattttaacctctcttatcctcagattctccatctgtgaaaagagaataagaatatccctcatgtagagttgttgtgtatagtagagataacacattcaaaatacctagcacagtgcccaactatggcactggataaacagacgggatccaaagataaaagtaattcttgttgcctgggctctgattctggtgatttcagagggatgcttgtcccaagaaattgtttaaatccatttctaagtacctatttcctgatattgcattgatgtctatttccctatggcaaggattgtttgccagatgtctgaccgaaaaaaaaaaaaagggccctaggattaattataatcactgaataaggcattccagtgatacacaaaggaactcccattttcagtgtkgtcctggcattggggtcaaagggagtgattggtgctggtggcatttccggctgtgaagcaggaggaacaggggtgtttggtgtctgacaccttcacgaccccagcccctctcctttccttaacgagctcttcagacatgcagtgcttcactgtaaagccagtgatgagcttgccgcccagctacaaggataaacctgttccagagcagatcttaaagtaagtggtttttcatttaaaaaaaaaaaaaatctgtgtctaggcacagtggctcacatctataatctcaayattttccgaagctgagggaggagtattgctcgaagccaggaatttgagaccagcstgggcaacaaagtgggatgctgtctctacaaaaaagagaaaagtttgtctctccctcacacctgtttggagtacatcaaaaccaaagccttacatttattacagtttgcaagacctactgtctgttctactttgagtgtaagataaaagcttggtaatacaaagggatgtgggggttttggtttttttaggcagaggaaaatcagaaatttcacacctagcttacagatccctgagcttttattttcacccaamagcatcgcagaggagtggctggtccccagtgatggaggggctcattccttgtcttgaaaagctgaatgctaayagtattgaaagaactgttataaaactagactaatgagatcacaaatgtatgtgtaagtgcatacacctttttttttkktttttttgagacggaatcttgctccgtcacccaggctggagtacagtgcgtgatcttggctcactrcaacttctgcctcccaagttcaagcaattctcctgcctcagcctcccaagtagctgggattacaggtacacgccgccacacctggctaattttttgtattttaatagagacggggtttcaccgtgttgcccaggctggtctcaaactcctgagctcaggcaatccgcccactaagagacagggtctctctgtcaactaggctggcatgcagtggcacgatcatagcccactgcaacttcaaactcctgggctcaagagaccctccctcccacctcagcctcctaagtagctgggacatacaccaccacacctgkgtgtgtgtgtgtgtgtgtgtgtgtgtgtgtgtgtgtgtgtgtgtgtgtgtaaatgggatcttgctgtgctgcccaggttggctggtcttgagttcaagcgatcctcccacctctgcctcccgaagtggtaggattacaggtgtgagccaccacacctggccacatataccttttaaaattgtgtgctgtgactttgaggctgaggcgggtggatcacttgaggtcaggagttcaagaccagcctggccaacatggtgaaaccccatctgtactaaaaatacaaaaaaattagccagtcgtgatggtgcgtgcttgtaatctcggctactcaggtggctgaggtaggagaatcacttgaactcagaaagtgcagcctgcastgagccaagatcgtgtcactgcactccagcctgggtgacagagttagactctgactcaaagtagataaataaataaaaataaataaataaaattgtgtgctgtgaaataaattcctaaataatataaaagtaaggtgtgaaataaaatcaaattgtacactttctcaggccttcatgtggaggcactattgattatgagatagcttagtgggtaaaactcagaccaggcagatgtgttataggttttgttgaagtcaagtcaagcagtggttgttctaagagagaaaaatacagcattgctttgtccttctccagctactacagagccaatgaagtgcagcagttcagatactcccggccrttccggaaaggagaaaaggatccagacaatgaatttgctgtgagttcaccccttttgtcctttaagaggtaaaattaacgggctgagyacggtggctcacgcctgtaatcccagcattctgggaggccgatgcrggcggatcacgaagtcaagagatcgagaccatcctggctaatacggtgaaaccccatcggtactaaaaatacaaaaaaattagccgggcgtggtggcaygcacctgtagtcccagctactcgggaggctgaggcacgagaattgcttaaacccaggaggcggaggttgcagtgagctgagrtcgcaccactgcactccagcatgggcgacagagcgagacttcgtctcaaaaaaaaaaaaaaaaaggtaaaattgacatcccaagtggagatcttccacctacctaaccagcttccacaggagaaacgatggcacccctgggaacagagacttyacctgctaattacctagacagcaagtactaattacctagacagccagctgtcatctccatggaaaatgctagactaggagtccagaatctggtctcttcctgggcctgctgcttgtaatgaccttgggctagtcatacctctctagacctcacatttccctctgtagggtgagaagtcccaagtagacgatccctttcagctttaaacatccagaatccttgaattttatgagaaaatttggctcagtctctacgaggcatttgagaatagaatctcacttaagtgaaccagggagtcttgctgttttccctgggaattgaccaacatttcatgttttcctcctgggaattgaccaacatttcatgttttccttcttgccaccagacgatgtggattgaacggaccacgtatacgactgcatatacctttcctgggattctcaagtggtttgaagtcaaacagatttcaacagtgagtcatttgaaattggcatttrgaaaaaaactttctgtttccaaatataataacagcctttgttgaattccctctgcagttcacaccagcttggccagcctcctctggccaactttgtttttcaaaagagaaataaaaggcatgcttatataatagagctcctttgtaaaactgatgtgacaacaccagccctaaaggtcaatcacagtgaatgactcttttatgtccagaggagtggtgtctgctcagcgatcctgccagcacccagaaacatttttggaatgctgctttggagtttcttgtcaattacatcttccctcccaaagcctgttctcttcttttattctctgctaatcatatccacanttaccctagactcctccctcttcatctcgcccaaaagntgcttattttacctgtttagtattgattaaatctgttttatttcccacctcctcattggcctccctgccatgsatggccttctcaggtccagttacctcactgcctcagtgggaattccattaaggaaatctcaccatttcgtccattctcgtgcttaaagtccttccatggctccaagtacctggagtataaagcctgtcctccttagcacacacacgtatggcctaactcttctgccccatctcctaggcaatctgttggaaccatactgttcatcccatgctaatttcagtcctctgtgacactggatcgttttctctgcctgaaacacactcttgcaatttctgcacctaactaactcccatcaaggttcagtttaggcaccagcttctcaatgaatccatctctggaacacccaagttgggtgacctgccctttgtctgtcccctgtggcatcctgggcgtgtttctaacctaccatgtttacatgtcctgagaccccgctaacaccatcagctcctccaagccatgaaatacatacatcttaatcacttttgtatctgtggtgcatagcatggcacttagcctaaagtaggtgttcaagaaatgtttcttgaccaaagctgaactgaagtttgatgtgttataagtcatggctaggtacagtggctcatgcctgtaatccctgaactttgagaagccaaggtgggaggatcacttgagctcaggagttcaagaccaccctgggcaacatagcaagacccccacctctacaaaaagaatagcwgtatgtggtggcatgtgcctgtcatcctagctacttgggaggctgaggcaagaagatggcttgagcccaggagttggaggttacagtgagctgtgaataattgcactactgcagtccagcctggtcaactgagtgacaccctgtctctaaaagaaaaaaaaattagacattattcctcagttatggatatgaattttggatggagacttttggaatcaagtctggaataggaggtcatgttgactgataatgggtaaaatgaagaaggagatactttttttttttttgaaacctgattttgtagacatttccataggaagaactctctgaatctgtactgtgtctcattttcttttcattcaaaattcagcctgtatattcgaatacatcctattatttckgacttctgatacacatagaattcatactaagattatgtatggtctgaatgcatggcctccaagatcacttacctctttcatggaggaagcatcaaacgttttgccagtggacattcttggtggttcagaagtgactcagatctgatatcctgctgttctcttgtcgttgatcttctcaaaagtctccaaggaagtgttgcctaggaaatgattcttactacaggtccagttcttttcttctcaaattttctgtagacattttgtccaaggaataatcattaccatagctccaatgtttaagtcatcattctactttgtaaggagattttaaatagcttattttgtatcttaccactattccaaaaaattgtggtgtccttataagctagcagtccccaatctttttgacacagggactgctttcctggaagacaatttttccatggacctggggtgggaaggtggggggtgttgggggataggggatggttttggaatgattcaagcacattacatttactgtgcactatatttctatcattattatattgtaacacatattgaaataattatcatgtggaatcagtaggagccctagcttgttttcctgcaactagaaggtcccttctagaggtaatgggagacagtgacagatcatcaggcattagattctcataaggcatgcacaacctagatccctcgcatgtgcagttcacgatasagtttgcactcctatgaaaatctgataccaccactgatctgacagcaggcagagctcaggttgtaatgcgagcgatggagagtggctrtaaatacagatgaagcttccctcacttacctgtcgctcacctctggctgtgtggcctgtttcctaataggccacggactgatactggcctggcattttgggacccctgctataagtctaaccttgattagcaaatcttcccttttctatagcttgtgggcattttatacctcttcaagggaagagttaaacttttttcagtctttacttggagctgacaagtgtcctctttctcccatgtgctctgtcactcaggaagagatcagtcctctggagaatgccatcgaaaccatggagctgaccaacgagaggatcagcaactgtgttcagcagcatgcctgggaccggtccctctctgtgcaccctctctccatgctgctcagtggcatcgtggacccggccgtcatggggggcttctccaactatgaaaaggttygcttggtcccagaatcccctagggattcacagacctgggtgtctgtgtgcctccctctgtgccatttgccactgacaaattcatttcctacagctgctctaagaaatgttcactttcccttctggcaagtgaagtgaatgaaacgattgtccctsacttcttagagactatcagcaacccagctggtatagaacttacctagtaaagcgtcacagaaaaaaaaccaacatgcctctggtcaaagcacctgttattctgtctcccctgagggttatacaaactrattggtggaccccagaacccaggcgcactggaaatgaagcagcatctctggggatggcagagccacactctctttagaattagcttctaggggccargtgtagtggttcacacctgtaatcccaggatttagggaggccaaggcaggtggatcacttgaggtcaggagcgcgagaccatcttggccaacatggtgaaaccgcgtctctactaaaaatacaaaaattggccaggcatgatggtgcatgcctgtagtccgagctactcaggaggctgaggcacgagaatcacttttaaccccagaggcaaaggttkcagtaagccgagattgggccactgcactccagcttgggtggcggaattagcttctaggacccctgcctgacttggtgtgccagaggttgtatggacaactgatggccctgactctacaattaaattagttcaactaagtattcttagttgagacatgaaagcagtacttggcacaatttaatccatgggatagggttaggatgtaacagcatttaaaatacacatcatgcattcagtgtatgttaggtataattaatggaggcagaatttttcattgctgtggtatgtttacagtggttaaatattttttgaatataaactttttggatataaatcaacatttgycaaggacgcccctgtggagccgcctggagagtgggtagaaattaaaggagccagaggggaagggtgagcagcattaattgggtggcactcttgtgtccgtgtgtgtgtgtgtgtgtgtgtgtgtgtgtgtcccrggaagagcaggagctttgcactcagttgctcccaggacccagttctggcttccaattggccactgtgtgctctgggcaacatgcttcacctctctgagctccatatatctgcaaagtgagaagaatgcctgacttggccaggcacggtgactcatgcctgtaatcccagcactttgggaagccgaggcgggagatcacctgaggccaagagatagagaccagcctggcgaacttggcgaaaccctgtctctaataaaaacataaaaaaatcagctgggcgtgatggcgggtgcctgtaatctcaggtactggagaggctgaggcattagaattgcttgaacccgggaggtggaggctgcagtgagccaagattgtaccactgaactccagcctgggtgacagaacaacactccgtctaaaaaaaaaaaaagaagaaaaatgcctgactcacaagatagatcacaggatggtttggaagattaagggagacatcctgtgtagaaggaacatcagacagtgcttgacatagagtcgaggcttcaccagtgttggttttcttcctgcctacttggagcagacggtgtaattggaatgttcttcatgggtggtgacatctatgctctgtggctgccactatgatcrtcttctttctgtcctttttctcaggctttcagccttctgtagccttattatactcmgcagctgggaaagactcaacaccagagacaaattctagtttctccatgttaggtgccataataatatccagtgttacaatggcagtcaatataaaaataggatctaatatacactactttttaaatactgtaatactttcagtgtgtactttttcatatatattgtttgatactaatcttcatgtattttttccaagtattaatttttacagaatacccctaatcacagatttatatatgccaatatctgtgactgacacataatatcatatgaagtttttccagcgtgagtgttctaattaaaatgaacaaaaagctaggataaatacatacatacatacatacatacgtacatttcgggacctttggcttaagatactaatgtattcatttagttaatatgtatgactgcacatttctaaacgtaagaaaaaggtaaactcattaatcaccatgatgtattgcaatcagtggggwagcccgtcattacatatttgatgtaatatgtaatggtaataggtagtaggtaaactattctaatccagctctttattcatcgccaaaatgataagaacacaggagctgtgtgctgtaattcatctcccctttctgttctgaggcagaaccctactagaaaaatgaatttcagggctctctgctccagtgttccctgatctaaccaatactttgggaatttccatgtgtcctaccatttaccaaaaacaaaattgttacaactttcaaaaatttcaagtacttgtatttgaaaggtaaaagtcaatgaaaacttaagtaaatactcctttttcatttatactgacagtccctctaaatacgatcctggctagaatgagctgttttgctaatgtattatattgtcatgcttctttttctgataattatttcatatatattcatattctctgttgtattagtttgctagggctgctgtaacaaagttctccaaactgggtggcttaaaacaacaaaaacttcttgtttcactgttgcacgagcaagaagtctgaaatcaaggtgtcacagtgttggttccttccaaggatgtgtgaaagaatgttccatgtctctcgtcctggcttctggtgtcttcttggtgctccgtggcttgaggatgctcctccatgtcttgtcgatggccatcttcttgcatctcttcwcataatgttctcccagtgtttgcacttctgtctccaaatttcccctttttataaggacaccagtcatatgggcttaagggcccaccctactccagtatgtatgacctcctcttaactaattaaatctgcaacagccttgcttccaaatagggtcacattctaaggtaccaggcattaggacttcagcataggaatttgggggacataattcaacccataatgtctgctcgcaagataggctttgcacatactttgtttgccacgcaaaatgggccattcacttttataagtctgtcctgtagttccaggagctcttggttttatataatggggggtttggctctcawggcattaaagcagaagaccgaaggggaatctgaaggctggtcttcgaaagcactttcagaaatgaatgttaaggtctgggaagaaaacatgtcactccaattttggastctgttggaaacgtttgctgcaaacttctatttctctttcctgatgaattctgtctttaaaacagtaccctatataaggcctgtgtttggaatttaagtttgggttttatttacctgttacagggacttagctggggggtcatgagtgtttactgatgagcctggtgctgatatataataataagggcaaccagcatttaatatatttgaaatgtcttcacatctacatctcattttctttttaaaatagcacttgggataggggactagtaagaaagtgcaaatattaaccttcacttaatataggaaaaaagcgtgatatagccaatgtcacgggacgagcagaaaaactgtcacctccatcttctgttttttaactttttgctctttcccttataatatctatgcacttaatttaatgattagccttgagatattgccatttcgcctttgctttgttctttgggaaagttattttaacgaatgacgttttgctttgttgatgatgattatttgattagtgtgtgtgtgtggtgggctggtgactgttaagaatgtagttttgctaagaatttgctaattaaggaaagaccacacaatagcacacacttttttgcattgtccaacatagtataagagctgtctgaggaaagggatgcatttttagttagacacatctggttcttccrcacaggacacatgtttcacccttccaggctttcctgcacagataggaatgtgttctaattaaaacttgcatatgcttttttttaggctttttttacagaaaagtacttgcaggagcatcctgaagaccaggagaaggttgagctgctaaagcgactaatagcattacaggtacaggayggctttcctctrcactcccagggaggccacagtgtgggacacccattattctccagggcttaagtctacaagcccactcagggtgacttttctttctttttttaacccttgtgaaagcaccacctatctatgtatttgtttgctcggccggcagttaaactgcccagggttgacggagccttcttaaagctgagatcaaagttcatcggytggggccaggcccagtggcttatgcctgtaatcccagcactttgggaggctgaagtgggtggatcacctgaggtcaggagttccagaccagcctggccaacatggtgaaaccccatctctactaaaactacaaaattagccaggcatggtggtgcatgcttgtaatcccagctactcaggaggccgaggcaggagaatcatttgaactcaggaggcagaggttgcagtgagccgagatcacgccacagcactccagcctgggcaacagagtgagactccatctcaaaaaaaaaaaaaaaaaaaaaaagaaaagttcatctgttggtttcctggcatgtgtttccagctgagagatgctggcctcatttttttctctcaagacttcagtgggcagtggtagaaaacatgactaccaaattcagtctaagacttaaacctatcagttgctcatccacggaagtgccccaggactccgttagatttgcctcatcccacagtccttccccagtttagggccaacctgtattcttggtgtgcacattttcccacatcattgaccaaagtccatccagtccacaagtcctacactgagaagtggccttcccattggccagcactatgtctagcagtttacctttccaccccatccctcccttccccarccaaatcaaaacgatccctcttcctgaagcacactgcactcattttttgcccttctttcyagatgcccctgctaacagaagggatccgcatccatggggagaaactcacagagcagctgaagccgctgcatgagcggttgtcttcttgcttccgggaactcaaggagaaagtagaaaagcactatggggttataacactggtaagcatgatctaagtagccttcacacctttttctaggctctgtgaccttttatgacactgattcgtttttcagatgccaagtgagttgtaataacttagctatggcatggaaatagtgaggctggtgggagagagtgtgttcccctcttggtgaccttgagcagtccttgtgctggtcagaggttctccaacttgaacaactatcagaacctcccagagcgcctgtgaaaatacagatggctgagccatcataaccctggagtttatgattccatagatctgggggtggggcccaagtagttgcaattctgagaagttcccgggtgatattgatgctgctggtctggggacaacactttgagaaccactgtactagaaatcaggccaggtgcagtggctcacagctgtaatcccagcactttgggaggccaaggagggctgatcacttgtggtcaggagttcgagaccagcctggccaacatggtgaaacaccatctctactaaaaatacaaaaaattagctgggcatggcgtcaggcacctgtagtcccggctattcaggaggctgtggcaagagaattgcttgtacccaggaggcggaggtttcattgagccgagatcacaccattgcactccagcctgggcgacagagcgagactctatctcaaaacaaacaaacaaacaaaccaaaataactcaaagttttctgaatcctagacactggttattcttgtgctgtctggccaaattcttacattttttcctaatcttagaaatagtatctattttgatgaaaagtatacagttttcacgcctttgaagggaagaaggaattgtgaattacatttcatatgcatgtagctgctttcataattgtttttgacgagctcctcacagctacaattttcttttctcctcctgagcagttcagtggatagtgcrtgtatgtactaaccttttctctccagtgagtgatggtgtaatacgttctagctctacttatctgcatttttttctttgaattcatcctgttctctttaatggtcttattctttttgttttgttttgtttttgtttttgagacaggatctctctttgtcacccaggctgaagtgcagtgcgagatcacagctcactgcagccttgacttcccaggctcaagccatcctcccacctcagcttcctgagtagctggaactacaggtgtgctccaccacacccagctaatttttttttgtttgttttttgagacagagtctcgctctgtcgcccaggctggagtgcagtggcacgatctcagctcactgcaagctctgcctcccaggttcacaccattctcctgcctcagcctcctgagtagctgggactacatgtgcccgccaccatgcccagctatttttttgcatttttagtagagacgaggtttcaccatgttagccagaatggtctcaatctcctgaccttgtgatccgcctgcctcggcctcccaaagtgctgggattacaggtgtgagccaccgcgcccggcccacacccagctaatttttaaaacttttttgtagagatagagtctccctatgttgcccaggctggcctccaactcctggactcaagcaatcctcctgcctcagcctcccaaaatgctgggattacaggtgtgaaccagcatgcccagccctttaatggtcttattcttaaaccccttattttcacattatttcctcaaaccaaagctctgagtttcttttcatgctcttttctcccccattcctgtctgcccaccttcagtacagtttcctccagggtatctttttgagcgtgtctttcagccattaagtgttcagtcgtgccttcttcctaagattgtgcctcctaacctgctgctacttaagagtttttctaggagcatttgtcttttgcacacacattcctagacagcaaagactgtcttcgatttaatgagcttagtcattattagaacttggccggtattagtgagtcattttcatatggtggcatctgggggtaatcctactggtgacatttctagagaacataggattcaccaggttaagctgcatgtctacagtgtcaatctaacaattttctctaaccccaatattccatattttaaaagactgaaagcagctgagctggggaagcagacggaaggttttgctatttattggagagtgtgaggcacatcttaattttttcctgtctcatttaggtagcagaaaattatgacaactttttctctagtcttagcatcagggaggtttaacctaagttgtacctatagctaacagtatcagtacatgcaatatttaacaatagaggcagcacaggcaccaaccaatcagaatggggtgccagccacataaccagtacagatgggtactggttagccacaagcaaacagggcagctgtggccagttcataggggctggattccaggtccgctaaccatgtggagtcatatgttttcagccacccaacttgacggagaggaagcaaagccgcacggggtctattgtgctcccctacatcatgtcttccactctgcggaggttgtccatcacctcagtcacttcctctgtggtttccacctcttcaaactcgtctgacaatgctccttccagaccgggatctgatgggtaagggtttcatctttaatctgcaggaagggtggggtaaygccttactaatgtttgcctttagccacgcatcactcctttgagaaaaatagcctttgggtcattctcattgtcttcctcatgaggaatgtcatgattagcagaataataacaacagttactaaaaatgaaaaatgacaaagaaatcacccataatcctaccacactattacatacctatagtcattacctatttttttcatcatttccattttaaaaaataaatttttacatctattttatgaataggttttataatcacatggcatgaaattccaaaagaaccaaacgatatatcacaaaaaatctccctttaatctgagacttcccactacagtagaagccctgcagtagccccacccctagagccagatgatgctaacattcaggttcttggtagccccatggcagctctttataggttcacaagcattgcgtaattatgtgttcttccccacactttttttatatgaatggtagaattttctttactttgctttttttcatttamtattatatcttgaaactctttccatttcagaacataaaaagccccctctttatgctttctgtagctatagatatggctcattgtatgtatgtggcatgatacagattgagtatccctcatccaaaatgcttggggcccgaagtgttttgaatttcggatgttttagtatttttggatatttgcgttatacctgttcagcatccctaatccaaaaaccccaaatctgaaatgttccagtaagcatttcctttgagcgtcatgtcagcattcaaatatttcacattttggagcattttggattttggattttgggattggggatattcaacctgtatattctaccagtgcttactggtggttattcagttgctttcactctattactgttacttcagtgtgacaatgaataaccttaaacacatgttattttgtacatatacaactatatcaatatgggaaaaatctcgtatgtgaaattgctctgtcaaagatgtatatttgcaattttgaaaattattcctaaaccgacttccataaagattataccagtttacactcccaccagcaacacacaggagtgcctagttactcaccctagccaccaaactgtactcttagtctttttaaattttaccaatctgataggtggaaaatattttcttgtatactttttgtttgttttttggtttttgtttatttttcttgttttgcctgaagttgaacatcttttcatttgtttgtagttttattttctgtgacctgtggtcaaatacttttttctgttgaattgttggccctttgtctgtgaaatgagttgaaatgttttctcctaatttctcctttatcttttgacttctaatttgttgcttctaattttttattgagttgtgctgatttttttatgtagttatataatcaatcttttattttatgacttctgggttttatttcacaattaaaggcctttcccactctaagataacaaaaaaggtactttttttttttcattgacttttagggtttcactatttacaattttgtctgtaatcctttagaatttattctaatataagatgttaagtatggagccaacatttttatttccaaatggctactcaattcttcttataacatttagtgaacaagtcatctttttgttttttttgaaatgtcaatcttataaaaaatcaaatttccacatactctttagtctgtggacattttttttctatttcttagatttacctgtctattcatgtatcagtactatgcaatcttaattattatagatataaaacattttttatttcctaatattccttttcagaatttaatctggctagtgtcgctattgctcactgttagattaacttgtctagaatcctattgctatttttattaggatcatgttaaatgtatggactaactttaggaagagtgatggctttttgatgctgaggcttccttgccagaaacataaaatgcctttccatatgttcaaatttaaaatatttgaaaggagttatagttgtgttctttctgcctagcaatatatttaaataatatattgctaaaatacaggaaaggtttaaaagaaaacaatgctttattacttcatcactcaaagataaccaccgttaaagctcaggtatataatatcaaaaaagtatgtttattttttattttttatttttatttctttgagatggagtctggctctgtcacccaggctggagtgcagtggtgcgatctcggctcaccgcaagctccgcctcccgggttcacgccattctcctgcctcagtctcccgagtagctgagactacaggcgcccgccaccatgcccgactaattttttgtacttttagtagagatggggtttcaccatgttagccaggatggtgtcgatctcctgacctcgtgattcgcccgcctcagcttcccaaagtgctgggattacaggcgtgagccaccacacctggccctgtttattttttatacaagtggaaaagcattgcatctatcatgttgtgacctactgcttaatttaatataggtgatgagcatttatgcatcattaagtatttaaaatagtcttgaatataagttatcagttgactcaccattttttcacaaatgtttaattccataatacaataattacatcataaaaataacctacctgaatgccaccctgcctggaaatcaaatatgtagtgtttcttaaattatgcattcttttccgttgatataggtatatttacatagctccaattatagcatatagtttggtactttgctgttctttcttacctttttattataagcatttgtcatgttgctgtgtaatttttatttatgtatttttttttgagacagagtctcgttgtgtcgcccaggctggagtgcagtggtgcaatctcggctcgctgcaacctctgcctcctgggttcaagctattctcctgccttagcctcttgagtagctgggactacaggcgcccaccaccacgcctggtgaagttttatattcttagtagagacgaggtttcaccgtattggccaggctggtctctaactcctgacctcatgatccgcccacctcggcctctcaaagtgctgggattacaggcgtgagccaccgtgcctggctgtgtaatctttattactatcagcttttaccatcatttttgatggcarttgacattgcatcatacaaatatgccatgattaattattcttctactatagaatatttaagctgtatccttctttctaaacaattaaccataaaacttcattatagattttaatacaaaaatatgtatgtaacttgtatcagtataaaatatatttttattaaaaactatagcaaacatatttggacatgtagctttcttattaggatgcattcttagaagtggtgggattatttctagaatgtagtaatctagattctagattacttctagaatctagattacattctagtagtatatagtaatctagattactacattctagtagtatgtagtttgtgggtaggatttgaacacaggctatctggctccagagttgtgctcttacccactacataaaactgyctattgaatctcttactttaaagattctgtctttgcctgtacattgaattaagcccttcacttcctgggrtaagatactccctaatattttcgtccagtcgtctgatggtcttgtttctgtacattaacaccttgagatgtttgttcagttgtaattgaaaatttagatttagaatctgagagtgaagtcataggtcaagagtaggttgaggaggccgggcatggtggctcacgcctctagccttagcactttgggagggctgaggtaggagcatcacttgagcccaggagtttgagacagcctgggcaacagtttgagaccagcctgggcaacatggtgaaaccccatccctactaaaacaatacaaactttagctgggcatggtggtacacacctgtagtcccagccactcagaagtcaaggttatagtgagmtgtgatcgcaccactgcactccagcctgaatgatgggagaaagaccctgtctcaaaaaaaaaaaaaaaaaatagcctaaagagtcataactgctggtactttcatagtgaattttgattgcaaggtgatcagtatttgtgatgtttgtccttgttcctggccaatagctcaatcttggagccacttttggagcgcagggcctcgtcaggtgccagagttgaagatctgtcccttagagaggagaacagcgagaaccggatcagcaagtttaagagaaaagactggagtctgagcaagtcccaggtcattgcagagaaagmaccagaacccgatttgatggtaaaaaacagaaaagaaaaaaagaaatctctggaggcttgcccccctctcccctgtacccaggcatatcaccatcccctcccagattgaagctgggctatggcttgtttcaggactcagcagcctgggttagtgtcaggtcgcagattgtggtaaggaaagcacatacctcatgagaagttcgagtctataaatcaacattggtgaagatcttgtacccacaatgtaaacatgtgggttgatgcttagagctgtygttcttgccactctgtcccctgagtcaatccaaacattgtcatttctcttctttaatttttttaaaaggtacttttccttccatatcaagttgttaaatgtggcaagaccaccttttcctgagaatcagggtggcttatttccaacataaatgacacagcccaactgtgatcagaagaatcaagtctgtggccattcagaaaataatctgtggttcagtggttctagtcagtgcctgttcggtgttgcccatcatatgacaatgcttaaaaatcgctccttcagttaagtccttttccaagtgtcttctcagaagacaaggctgttgagagcattgttgagctcagccttcctcaccgtgaaaatgttttgctttttctctctggtcctagagcccaaccagaaaagcacaaaggccaaagagtctccagttgatggataatcggctatcaccatttcacggttcttcacctcctcagtcaacacccttgagcccacctccactcactcccaaagccaccaggaccctaagtaagttttcctgtattccttatagtctttttactagggaatggagtatgtttatgcatctgggcagtttgtaactaaaccagccagaatgtatgtaagaccattgtaaaactggttcaatttcgtgttcgtgtattatacagttagactggagtttggcaaggaggccactaggactcattaaacttttctggatagtgatccaaagggcattagtgtcagttttataattgtgaaggtataaatgaggcagatctgcactaggactagacagataacaagtaacttacaagctaaccattagttaggtagacctgaacagggacaagaaatagacccattccatctactgcttatagtctggcttggggaaccagcagtgcacaacacttgagaagaattgcaaagtacccatagtccagaggcatggtagagggataaatctatcgagccagatgggagacaattgtcaaccaagagttagagataatcagttacagtttcctggaggaagtggatattttcctaagcacttgggctatatcagagaacagaataataccatacattccagaaaatgttgtcatcttcagcttaatactaaaaccctgaacaaaaaaagttttggccaggcacggtagctcacrcctgtaatcccagcactttgggaggccgaggcaggtgaatcacgaggtcaggagatcgagatcatcctggctacagtgaaaccccatctgtactaaaaaatacaaaaaattagctgggcgtgatggtgggtgcctgtagtcccagctacctgggaggctgaggcaggagaatggcgtgaacccgggaggcggagcttgcagtgagctgagatcgcgccactgcactccagcctgggcaacagagcgagactccatctcaaaaaaacaaaaataaaaaaaataaagtttttgcttcagaacaccttgtggagctcttgaaacttctggcgagggcgtcacctgtgtgatgtggggtaagaagtcttcttcgttctatccgcagaaaccatagaatgtggctttcatcagttggttgaccaggttggcttaggtgttacagtgccagcaacatttccatgagcttccttgctcagtgcctctctctgccgcctgcactttctgtcatttctaggctccccvtcgttgcagacagatggaatcgcggccactcctgtcccacctccacctccccccaaaagcaagccctatgaaggcagccagaggaactccactgaggtagggaaatcacagctggcaactgtggccagggagcgccactcctgggaaggcagcatcaggttttccaggctctttagtgggcaggtttgctcatagacctgtcactgcagtcgattcttggctcattcctgaaaccacaggagatagagaagttttcaatgggaaggacagacatgcaagcagatgatgaaggtagaggcaggtgttctctgtacctcgtcctgggtacctgtgaaataagccgtgagttctagttcacctttttaggggggcgggggcagggtctggctctgtcacccaggctggagtgcaatagtgcgatcatagctcactgcagcctcaaactcctgggctcaagtgattctcctaccttggcctctcaattagctgggactacaggcatgtgccaccatgcccagctaattttttaatcttttgttgaaatggggtctctccatattgcccaggctgatctyaaactcctggcctcaagtgatccccccccccacctcagccttccaaagtgctgagattacagatgtgagccactgcctgcccccagccctctatttcacatttgaagagtttacttcttctgaataaaggacagtcattctggagtgacctcagatgggtttccttcagtcatttaacaaatgacttttaagtgcctcctgtctatacgccaggaacccaagtgttggggatatggcagcgagagagagagagagagagagagaaaatgtgwgtrtgtgtgtgtgtgtgtgtgtgtgtgtgygtgtgygtgtgtgcgcgcgcgcacgcacgcacgcgtgtgtctgattagctcatgggaaacaaggaggataagtcagtgtagttttccatttcactttgcaaagcctgtgtagataaactcagatcaattagaagctaaagcagaatatgagaaataggaggagaaggcagaattgggaagaaagctaagacctgcttctaattttgtgtttctgcttctgcagctcgctcccccactgcctgtccgaagagaagccaaagcaccaccccctccacctccaaaggctcggaagtctggcatccctacttccgagcctggatcccagtaaggatcttgccctccctgcaacaccgagtgccttagacagctgctgcctgagaactggcctccagccggtgtcctcattccatggggctccctgctgactgcatttcctgatctgggatgatgtttaccagcccaaaaccagtcatgttcttccaaaagcttctctttgatagaattttgaggccatgccacctcccttccagtccacatggaattccagaatcagtcacagcctctgattttttccaagaagagattgccttcaccattgttaaatgtcagcctgtamggcagagacatggtggtctgcacaagcctggacaagttcttccatattgatggtggagcaacccctgtaatctactccttggaaggattttttgctttgcttatgaaaagctgtgcttgagacttaggtacttttctcacgtggacacactgatcccatcccatattgcatctttgaagagatggatatcaagtacactttggtagctgaaataatcatatctttctgatgtctattgtatctcctttgaggaaaagaacacacatttttaatggagattggctgctttcaggtatgtgtgtctatcattgaaagagcatggactcaaacatcagccctgagttcttgagtccacccaactcccatcttcttgtggcacaggaaagctgccctctccctctcccaccacactcctgactaatggccttcactgcgtcgcagtcactccttccctacggacttctttgaagctcttccttttgcacatacggcttttttttttttttttttttttttgtcctattacctcctctgagcgcaaatcactggctacaagggacttaccagtctggattcagcagtttcttttctaaaacccatttgggtgactcagcagccgcatctgctacctgattttatcctggagaatacagtgcaatatttctctttgattatttattcctcttgattgtggaattaatttgattgcttgctaatggtactagtagtactcctttcagaagaaaaaatggagcgatttaggtgaccaaatattacatacataaatagccacatgaagttttagacgtttggacttgaagcctcaaagatcaaccaaccagtccccttatttagtaaataaggaaattgaggctacacacagaaaattgtrctacagattattactaataacccagcttgctaaattaggctatacctaggtaatctctagaagacaactctgacagactctttaatatttacccctggttggaacaatatttgaaatgtcccagatatttctatgctacttagatatttgtggcaaagcagaaagctttttgactgtgaaggcagaggtcagcactgggggaaacttgctggtggtctctcccacaaccttgcccagagtcctttccactaaggaggtgaagagaacagagaaagagatttccatttctgctgccagagctggtatttgcctgcctgattctctgtgtttcctgtttcaccgccaccctttcaggagagaactacaccagttcatcatgagggtcagggaagcaaaagctctcagatgtgtccagggcgttacttaagaaatgagtatgcagattctggaaggggtgtggaaaaggtgatcctttacccccacccaggaaaacctgcattgtgctagcatggaagaatcatgggctttggaattaaacccatttggtggaattaaacccatttggtttcaaatcccagttatgacatctgttaactttgcaaactcacaaaaattatttgaaattatctgagttttcattttctcaccttccagaatggggataatgcctcctgcatcggttgttgtgaggtttcaatgagatgaaatatgggaaagaagaggtactcacctgatggtccctgctttcctctgctaggcctgagtaggaactggaactctctaagagcattactcatactttttttttcttccaaggtagtttggaatgtgagtgcaagttagttctgcacatacagcccttctccaaatggtggtttcctttgaggtcttttacatgattatttatgactagagacaaacttaataagaactcaagaggattttaaatggagagaactcaagctgtagagaaaggaggaggcaacagacaggatatgtaggggcttacctagagcctggcacgacttctgagaagtcacccagcagaccggctagaggggatttgtgtgccacactctacttgccgggctgccattaaaatagaaagatataaaactgggtcaccaaaaaaaccaaacctcaaggctatccttccagagcagtagaaatgagtcccacagcctggtctttgagcagaggctgggaagataggatacatcactgtctggataccttctctttttaatagaatatattccgtatgattccctttccaccttaatggaaataatagctctctcctgcctgaacaaaagggattccaggtagtattgtggctaagagattacagcggacgatggaaggttcattttttagggaaggtgttgggtaggaagagtcacatttgacagaattcataaataatgtgtcctgaagtcagaggatgactgcaaagaaacacctcatgattccattaaatataaagagataaggagcaaggaggaaaaaagagaaagaattggtctttatttttcttgctaagaactctctggagtattgaaagacattgaaattatccctaaaattgtcacaacttttgtgaatactggtatacggttggaggtgtttttaaatctttatttcctctctttctttgttctagtgacttgtcttgctttaagattttttttaaagrattgttttattcaacatatatcaagttcttatggaatgccagtcatggtactagccccttgggatgtagtggttgagtgtgttcaatggaaacagccccagtatacaaagacagttcactctggtgtgctgtaggattggaaagggagtggtaccagatgaaaatgaaaccctaaagaagactgctgggccatgagttgcttcctcctcctccaccttaaccctctgattccagaattgcagtcattttcttctgccaaggaaatccattaaaaactgcagccacactgcaatttcctaatgtagaacaagatataaagcaggctttgagacaacaacctacctttgtttactctttccaagctggaagagtccttctcctctagttgcccctaggtcactggctaatttattttaaaatttagatggaactcatgtatagttaagtgcacaaatcttagccgtgcagatgggtaattttcacatagctatttgcccacatccgtgcctctaagatagagacatacactgttttcagcaccccagaaagttcccacatgcccatggtgccattttgtgaaaggtatttataaggcccttcaaatttgtggcttcctttctcatacttctcaggtataatgaaagggggagaaaaaccccaccatcaacacaaaasaaggctataaagactgtgcaccttttaacaagtcaatttgtagtcagtccctgggcctgtctttttttttttttwtttttttttttaattttgaagctacctgaggtttagaattccttcagccctagctgcttttattctgctttttatttaaacaaaaagagggggaggatctgaaggaaactagttttctgtacaaaggctttgaggtccatggactatacttgtcccatttatcatcccaggtggtgctttgaccctgccataccctggctattaagataaaaagatttgtggacattaaaattatgaatatgtcagtaataatccagcacacattgaaatattgacacagattaccataatttgtgcaacatcttataaacaaygtcatttccatagtagtctaaggcttcaccagcctggcccactgtatctagactttaggttcattttaataattatgctttccttctctgtatcatttgggaagttgataaatatcacttccttagataccttcattcagtgatatatctggcttttacaattaaattggaaaaggtaagtttctctttggtgggttgagagttggaccatcaattctaatctacaaaaggaaattcatgatttcactctgacgcctaggatctagccaaggctggtctgcagtatcagatgtccaaactcatctactattagccatattttgtgagtcgtttgtctaaactttgtcaaaaatgcctttgccatgattttgttgctatctggatttcaaacatggacagttaggaagatgtgcattgaagtaggaaaattttgttcagatttgctgttatttattttttaaattaaaaatggaaatgtattttaaagtttattgtgtgtttagtttgttattgcccttaagttgatgaaatcattcctgaacttggcagtttttccttatccatgcctccttcatgacacatcacacctagcatttttctggcttgtttccttacaggtcctgttaggttaaacctgcactgtggggtcctggagtcatctttgcccagaaataagaaaaattacaaaccacttgcttcctttcaccctatctatttttttttctatctaggctgacagttttctgatagcaattcatttaatgtacataggttctgtttctttacccattccccatagatatttagacaggtaaagagagaaataaaaaggttaaaggggatatctaataacttacatgaaaaggataggaactggttctaaaatggttgaatgtttgtatcacctggggagaggccattcccagaccaattacatcagaatttctgagggtggggagtaagatcccaggcatccatatttctttaaagtccctcccaagttattccaatgctagaccaaggttggaaaaccaccacataaaggaaatgagactttagaaaattggtatttaagatgtgtttcataaaatccctgctggtggtgggtcaagttggagagagggaaggggcagtcacacctgtattagcaccactgtttagtcctgagcttatgcttacgattttttttcccccaagaaagtgttctgtccaggagctgtggctcaagcctataatctcagcactttgggaggccaaggcaggaggactgcctaagcccaggaggtagaggcaacagtaagccctgatcatgcaactgcactccagcctgagtgacagagtaagactctgtttccacaaaaaatttaaagaaattagccaggcacagtgatgcgtgtctatagtcccagctacttgggaggctgaggtaggaggatcgtttgagccctggaagtcaagcctgcagttacccatgatcatcttactgcactccagcaggagcgacagaggccccatctctacaaaaaataaaaaaaaattagctaggcatggtggtgcgtgcctgtagtcccagctacttgggaggctgaggtgggagaatcacttgagcccaggaggtcaaggctgcagtgagctataattatgccactgcactccagcctgggtgacaaagagaaaccctatctcaaaaaaaaaaaaaagtgttccagtgctttgctttttagaagcaataatgcttcactgtgttcatatgatttgtaagagtcacgcttcttgaaaacaccacagcgtttgggccgtaaatactaacttgacagatctgggtaatcttttggctctaggatccccatagagaaatactataaagtgtcttcctctgtcaaaatccaagtgctattatcttatgcagtgattcttggcttttttccagtcatctgtaagctactgcaacttctaaaagttttgctaaaatgatctatttttgaaccattttttttactacttgatcatttaaagccatatgtatttgagaactcatctcattaaatgtatcatttgatatgtttccctaccctttattatgaaaggcttaggattttttttttcttaaagctacattgatgagttagastcttcagattcagtgtttatgatttttataaggaggccattttcattttcaaaatggggtctcactctgttgtccaggctaaagtcagtgttgcaatcatggctcactgcagcctcaaactgggctcaagcaatccttatgcctcagcctcctaagtagctggaactactggtgtgagccaccatgctcagctccaaagtggccattttcactctcctccttcccgttagttatttgggccattggagcatcaagggtacctcctgaaagcctctaacatcagcatcaggcagttggatgagcatctttttatcccattcaagggaggcctgcagctggccctcaagaaattgtcccaaagacaaactttggctaaggaaatctgatgcttcacacaggatrtgtaagttaagtgggtgtgttgctttttgttaatgtgttaagtaatgtgaagattgtatactgttttcattaaaaaaaaagtcaccgggtaattggctaatggaagcctctcatcttgctcacatgtattgattaatgaaataatgcagttttgcttttgtttcataaagcaggttgtggatcacatcattgcctaattttattaaagacggagtgaagacattatttgattccactttagagactcttccaatggaggtatttgggaaacctgtcattgtgcagtagcaaatatttgtattaaaaagaggcggttttcccccacgggatgtttctcacccctgttcaaatttcttagcataagtctttccttttttgagggagcagggtagggggtagggaggcgagttcatttgattaaaagaggaaaaagggcttagatctttgacaggtcagtttgttactgagacattgggcaagttatctgaaatttgtttttttttttccaatggtctcatagccacttggaagttatgtggctaaatgagaacatcaatgtcatagtgtctggggccttatggaggattagtcattgctaaatctacattgacctatgaaccctagtttcctgtttcagctccaatggacaaaataacccagcctccaaagtccagttctgttagctgctcatcatagggcaatactagaatagtgaacatggaaccaaacatggctgggtctcttaaactctctgagcccgtttcctcattttaaagcaaaggcaatactaactacaatccaaggttcttatgatggttagtaaaaatatctgtgcacatatgtagcacaaagcctgcccctggtctttttggagaaagaatggtggcaatgctatctgaccaggggacataggaacaatagagtcccatctccaacggtctgtctgtactccattgtgtttcttaaatgcaaaccaaacagatcaagcagatgaacactctattattttttaggtctcagtcccaaccctcagtgtgcaccacttggatagattgcgtgggaccagaaggagcgctggactaggagtccttggaggccccctctccttacccccaggcctcatttgggttccagtaaactttcaaagggtttggagacgatcaagggagggaacttctttccaagtggaagaaagccttggccgtggccccacctcaacttctgaagagtatggtcgaagataaagttataatcccagagaaactggagctgaatcagctttttctggctggaccagtatgtggctgttctgcttgtgggtagatgcagggtatgggtgctggagagcctgagatcccttttgtcaacaacagacactttatcttacctgccctcccatctgccacctgtatacacacatggagggctccctttggtgggtttacagtgatccttcccccggagttctgagttggagaaagatttaacaggtatgccacttcattcacaacacagcactttattatggaatatgtgcaacttggtgtaaggatttctgaaattcataccatttacaggtatttaatgggttataaattttcaatgtcagaattatacttaagtcatgttagtaatggtcattccttctggcccaatggatttaaatcttcttctgcccagtttcctcttcaatcagactttcctgaaaaatatataacaaatatatcaagactgactttaccagctgaatttcattacattttgacattttaatttctaaaatatcagtctggaaggaattggtctgtttgattttgtgctctagttagtgctagggagacatgataaattgggtttgtttttctggttttttttttttttgagacagaacctcactctgtcacccaggctggagtgcagtagtatgatctcagctcatggcaacctccaccttccaggttcaaatgattctcgtgcctcagcctctctagtagttgggattgcaggcatgcatcaccgcatctggctaatttttatagttttagtagagacagggtgtcaccatgttggccaggctggtcttgaactcctggcctcaagtgatccacttacctcggcttcccaaaatgctaggattacaggcatgagccactgtgcctggccgattgggtctttttaagcacttaatatacataaaatctacattaatagtttaaggatgagttgtgaggaaggaagtgaaaaaaaagtctggtcaattactttgctattaaaccagcctttgcttcaatttcttcataatgtcatgtttgacaaatttcactgcttgccatttttgtaatgcagtaagcaagattagaaaaagaaaggaaataggctgggcgtggtggctcatgcctgtaatcccagcactttgggaggccgaggtgggcggatcacaaggttaagggattgagaccatcctggccaacatggtgaaaccccatctctactaaaaatacaaaaattagtccagtgtggtggctcatgcctgtaatctcagctactcgggaggctgagtcaggagaatcgcttgaacccaggagatggaggttgcattgagccgagattgcgccactgcactccaaaaaaaacgaaaaaggaaataacgacgtctgcccacttttttctttgttctgtgggtatattaagttgaagtcactgtagacaattaaaattacagcttatttttatatatgatttatttgggctttcccagctcctaggcataactgatcattaactgtaatgccttctgattgctgcagataagtggacaatagagatcagagaatatcaacattgaatccaagattcaacttaagtcaggcacagtggcttgcacctttaatcccagcactttgggaggatcttgaggctgggagtttgagaccagcctgggcaacatagaccctgtctctacaaaaaattaaaaaataaaatcagctgggtgtggtggcaagtgcttatagtcccagctactagagaggctaatctagtctccagaattgcttgagcctgggaggttgaggctgtggtgagcattgattgcaccattgcactctagcccggggaacagagcaagatcctgtctcaacaaataatttttttaaaagattcaatttatacattcaattctctttatactttttcatcaaaaacctaatatgattagtgtatttccattttggggggcggaatttggaggtgattattgtcctatcaggaaactggaaatcaagtccatcactctctaaattataaatttagtagtttggcatttttcattccaaagaagagaaaaaaaaacccatctacagcagtgtttctcatgtctctattccccaaggttctggaaaaccatgtaagataaagcacagttgcaggatcaggtggagggctgtggagtagcctggagtggagtagtctagggggtttggtgattttacttgaagaaatgaaatgcagcagtgggaagaaatttgttttgttagttatcccaaaagctagaaccaggattaagagataaaagttacagagagatttcaattcaacttcagaaaaaacaaacaaacaaaaaaacgtttcagcccctagtgctgtctaaccaccaactgggattgtcatgaaacacggtcctaccacaggaggtaacagaggagtcaggaatgtaagccccacagtatctgggaggtagctgtcctaagtgatccccaaaggcttatccacctctagagctctatgctgtgatcatgttatgatcactttaacttaccagagctcctttcaggtctcggaggggagaacgtggctggtgcgtggtgcattcgaagcgttgggtttctgccagttgaccaacctctttgactatctgaagaaagagaatgtgatgctttgagatggagataaagaaatgaaatggtgttttccatttccaccaaaaaattgtggagagtggggtcaagggggatgtggggctgggggagattgggaaagttgcaggattagcatagggactttaaggacacagatctgccatctgacatttctactgaatggcatggggatctggagataatggagacagtaagaagatatcatattttccccttaaagatgaaaagagggaggcactttgagcctcatgagagtcagtatacccaaaaaaacaaaaagcaaaaaacccccaagagtttatagttgtaaaaaaaggttggtttttattttctaggttttactaaatatgttatagttcaatgagatttgcttcatgtataacctgcagagaagaggcttcagattctgggtcttctttaatactaaattatctttattatttctcagaaaagagataattccttccaatgataatgaaatgatttaaaatttttcccattctcagtcctaggttatttttcaggttaatcagctaacatagatggcttctttccttacatgaccctgatgagtggtcatattttataaacaaaaatcctcccggcactttgggaggccaaggtgggaggatcccttgagcccaggagtttgagaccagcctgggcaacatagggaaaccccatctctataaaaagttttaaaaattagttgggtgtgatagtgcatgcctgtggtcccagctatgcagacggctgaggtgggaggatcacttgagcccaagaagtcaaggctgcagtgagctgtgatcgtgccactaaattccagcctagataacacagcgagaccctgtcttagaaaataaccccaaaaaacaagaaagcaagtacctcacgttagtgttggtgccagtcctataatctaatctatatgaatttaaatcagcatgttttctactacgttatcttatcatcttgagtttgctaattcctgtattctaccagtctccaactttgcttaaatgcccctatcagtgaaaagaaattatagggcatgcatccttgataaggatactcatttataaattataaaaatgtactgatctaatagcatagatatgtttaaaagatgaaatgaggaaaaaaaaaacgaagttctaacgttttttccaaatcccaaagaatcatcttctgatacagaccttgaccctatcccattgtttctaattcctttagcaatcccatacactcagagtatgacgtgctgtctcacacttgttgctattaatatattcttttggaatttttccagctctttgtttagtccctgtgtgaactgaaagtaggaatgggacttctactttgtaagtgccttatctcacctggagcatctagggtacaacatcatagaatattgacattggggctatcctgaatgtttaatatagttaaattgaatcaaatcactatgtcttattttgaagctgagagaaacttacctcttggaaagaatcaatcaaattttcggcatctctctttcctccagggcgcagtccataggaccagtgctggctggagcagccttccacgcaccaagtcagtagaataaggccagctaggagtttttgaattggcttcattctaaggcacatgaatgcacaatcaaattagatccagacaaggttgagtataaactaaaagacctctttagtgaaaaagctagcatctgtatcactaaccctgcagaagatggaagtcagagtcagtttttacatacagacactgaaactcagagacacttgctggcttgcctttagtttcttagccactggggacaaaatgagtacttaagctcacatgttcaggacctttttagtactaaaatagtctatacttttatttttattgtttggttatccaaaccccataattcatcccttatcaagttcatcattttgccttaacatttcccctgttgtggattggtcttcaactctttcattcctgagataaagagaactgagtcatctgttaagaaaagtagctcctactaggaatctctggctaatataaaattgcttgacattacatggctaccccatggtactaatgacatttttctatttatccttcagtcttcctagcattactgctggctgaaccatctgtgggagagaggactcaacactgttcaaagtagttagtcccagaccagatgccttcctagccaagggggcctctaattttctaatgaaatgtgtctccaagttaattttcatttgatgggaaagaggctaaaaactaaatcaaacactggtcgataagctgtgggagtccccaaagcctggatctctgtggctggtgatggcaaggacagtgaaggacaggak

SEQ ID NO: 96193 - DNA, 388292 bp, Homo sapiens
  misc_feature (1)...(388292): n = A,T,C or G
tattccatgaaaatgagtaagatttacctcattcccttcctttaaaaaaggatattttccccaaatatttaacaattacatttccatttttgatgcatataagcataactcaaaaaggaaggacactgaattggcatgttttgggaagatgtgtcttgaaccactagatttcttttgtgattgacaaagaatttaacaatatactgtacttctgtgcactcacagtgaacataggttattacagtccaattagcaattactcagcatgtcttaaacctatctttcaaacagctgaaaagtaagatttaatctggaaatgttttggtattcttaccttcctttcagccattcacctttttcttgatatactttaatttatcagcatcttcatttttacataggctttaatatgtagcttagttcataaaaatgatttgcagctgcaggcagagcttgtaattgctacataaggcaacggtagttttgaatattgatcattttgagctttaatagaataactcagataaatatatgaccatcaatttcactcctatgcatatgcccaggagatatgagtgcgtgtaccacaaaaataattgttcaagaatgttcatagctgcttcatttgtcatagtcccaaattggaaacaacccaaatgtccatcaattggagaatgaataaacaaattgtggcatattcatataacgtaatgtcaaacagaaattttaagagaacaactttctaatccacacaataatgtggattcacctcaaaaacattgagtgaaagaaaccagacacaagagaaaacacactgtatgattccatttatatgaagtattttctatgttgttctgggaggtgattatacaggggcatgaacatgtaaaaattcattgaactgaacatttaggttttatctattttactgtactaaattacacatcaacttaaaaaattatcactctgaacatttatagcccaacattttgctttgagcctatattcatattaatgcatttaggtctactttattcttttacctgtatttatttaaggaaaagattatttatgctgtgatagagtttggcccggctgacaggtgtgttaagggagcaccaattactgcaacaaatcaacacttgcctttcagtgacttaacacaaaagaagttgattacttttctcggtaatagttcaacatgagtgctctagttctcctccacatggtggtaaaagactcttccagattgtggcttactagttcccgcccagggcctcagaatcttctacctgtagttggaaaacaaggtaagagaatgtgattagggagttttctagccaatgacataacatgttttctttagggctcttctgatcgtcccggtgcacagtagttccttaaatgaagggctagagagatgtctcatgactgccagaacatgctcaccttttccagcctcatgtgcctatccaataactccttgtgttgcatgcaggtagcatgatgagctggttaagagtataccctctgtcacccagtacccaggcctgagcttgagcagattatttgatcttcctaatttttaacatctggaaaatgaagtacataataatactgtttcacagggtcctctggcaaactttaaaagatgtatgaaatatttaggacagtacgtaaaacataatacatgtctaatacatgttagctatgttatgtactccttgctataaccagccatgccagcatgtctactgcatctccaacatgccctatgcttctaccacaataaaggatcaagttttttccccatggccagcttcatgggcatgtgatctggacagctgcatacaacccatgctgggaagggcttggtgcttgaggcctggcacttcatttaatgctctgttgtcaccgtaatgaaattcctaataattttatctttgaacttttgttttgtaaatgaaggctgatgggacaatggagcatgtgcatgaacagaggaaatacagataacatgcatagctgctgccattctttacttgttccactcacacatagcattcttgttgccccataagcacagaatccctgtgggcacacaatgtgtgggagttctgcaaaactcaaattgagtatgaggtaagcatgtcacatcaatgactaagtgaggacactgacaaccccaaaatggggtttgccacgctttccattccaaccaaagcctgatttgaatgcaaaaagaaggtaacaaccaaggaaactttctctgtcttttcttatgttaatacttctctgtaaccacttagtttgaaaatgatgacatagaaggaaagagaaagataaggcaacctatagttccttttcctttctggtctcctttattcaaaagtaagccaaaggcagagtgttggtaaaaacgggcatatatcaagatatgaaataaaaaagttagttttgtgctgtgaattagagtgtacttgaattagataattttgaccctgtcatcttccccaagaagctgtctttcctgaagggttggagttcttacccagctgctatggaccagaatcactggagccctcatagaaaaaataagttccaagaactaacaatgaacagacagaagcagaatctccagggctaggtcaggtggctgcacagccagcttgagaagtagctgaataagcaaaacaataccaggggttccagtcccaatactccctggcaaaatgtggtccatctttgatggattggttcaagtgccaccattttccatgaaatcttccctgatttttccctcccctcacgcccacgtctctaactccctgaccccaaatccttcactatatattaattatctttgacatctaggacattctaacttgaactttgcttctctgaaaagactctggtaacactgagggcatagcagggcagggactaggtttaggcaagtgaggcactcatccctggtgtgaaatttaaggggatgccaaaaaagaaaaaaaaaaaagcctcagtaaatcaggagaaatattttaatgcactattttaaaaatcaaaattaatgcaacaattattcatgatgaacaatacatcaaaattttaaataaaggcaggctcagaccctgcacttgtatcactggcctcactcacttctgcccaatccgagccctatgaggttctgtttcattcattttcttacaccagtagttgctaaataaataaatatatgaatgaattgctttcttgaactgagtcatcagcttaaaggtatagatcctggtaatgaggatgtctatggtgaaatatgggaatgggtcctggaaacagccttggtgtgccctctcaagtcagctggaacacatgaccacataatctaaagtttgaataaatgttcttccttcaatcaagtcatcatgacattctcctccattgtcctaccttgtgtaaaaccagaaaaataaatgacatgatctcttggtaacccttctttaccatcatcatgcagcctgtaggacagccctcagaggtcctgttcaaaatggaaccctagtagttcacgttatcattaacattgcagtaaaactgccctcccccattgttgtagaacattgttactaccacagtctcatggattgtttgaataatgccacgccctttatttatttcatgctttaattggctcatttctgaattttctgggcaaaatgagatcagaaagacaaagcccttgaacaaagagaagcaacagtttttgttacatttcattttgtcctctgtatgtctccttcttaaataatttagctccaagttatactcaggaagagaaaaaaattaaaagttccagtaggccgagaagcccatgatccaccgtgttgaaggaagatttgcttcacctcaccaccccccaaccccctcccgcccccccgcggtaatactaagctgttcacacgctgtgaagaagacccgaagactaggttgtcaactgttggggcctacctgcgccagacttcttcctcagtggccagctttctcaccccccgttagccaccagggggccgcctgcttggaacaagtggtgtagacgccacagcttttctccaaaccaaccaaaacattccggggcagctttggagcaaagcccaggaacttccctgcaaaggagaacagctctccaactacagaagcctgcaagtcctatggtgcagacttattaagagtagagaagaaagcacggacttctcaccgaggaccaaagggaaatggggtctctggggcctgcaactttcttaaaagtgcatcagtgaaaccctgcttatccagcggggtggttgttaatgctgtcagcaggggtggggggcctctcacccctttccctgggacgctcagaagaagcgagaataaaacatacatgtcactggctggaaatctagagaaccttccaataaataacctatacattgtcaggcagctgaggatccatatcgtcataactctattatactgcgtgttacacgaatagatgtgaatattaaattatgatgtcggaattattttaatactgtctataagaaattaattgtactctgttgtcaaagtagttttgttgcaactatagttccttattgactaccttttagctgagtgaggactcggtatttcccaagtatccttctagctcagaaagcaagtctcttcctggtctccaggacttaaggtcgggggcatttgagagacctatatttgcccgggaaagatctcttgaagagtatacattatttttgtcttcctggttttatctatacatttccagggcaaagacaaattaatagggcggccgttctgggacctgaggagtgtctcagccctgtacgcgcctctcccacgatatgcataatggcggtgggggcgggggtgtcctccttaagggcaacccaggcacgtcccaaacttccattcgtggggtggccgtggtggttaagagagctgccagatggtcggaccagcggaggccccaagaagagccagagcgccctgtattcccgacacgcgccacaagtggtttaggagcggagggaggagcgctgcggcacgggtcgggccggtcgggccgggcaaagaaggccgagacgtgctcctggaagactcgccctccggtcccggtgtcactcgttccccattctttcctcttctccaactagagtaatgacgcccaaacccgcacctatgcgcgcaggcaatcgggtgggtggacgcgcggccaccaaacccacagcaccgtcaccaaccctgggagggcacggccgggattaggaggagggggagcgcccacacctggggaggcaggtgcggaggcggccggcccggggacctcgagtgcgtaggactcggggtcggggtcggggtcggcaagccgggcgctgtgagcgcgtcggagcgctggcccggagcctggcagggggcgtctgtaccggctgggcagcccggggcggtggcgatggctggcggcggcggcggggtgtgcgccaggaggccatttcctcgctgcgcccctggcggagccgggtttgcctgctcttggccgccgccgccaccgccgcgcaagtcggacagccgtgagggctggaggggaaaccaggtcaccggttcgcagacgcggcgcggagcaggcgccccgggcccggagtaagacagcgcccgggaagcgggccggggcgggccgggcacgcgggggacccggagaggcggggactctggtgccccagccgcagtagcttcctacgcctataaaagtggagagaccggggaggtgcggcgcggccctggctgcggccgcctctcttcgcccaaggagttgacattttgcaggactcgcgcgacgcccagtcgccggcgctccccgggaccccgccgccgggaggagggggcggaggagggtggagactgcggggcttggccaaggaaggcgcacatcctcgggcgggcggccgtgacgcggcggggattaactttgcatgaataatgtgagtgcgcttggaaaagagacctcctgctccgcgggctcggggcaagagcccgcaggctaccttccccgggcaggggcgctcaacccaaccggctccagggcactggtaatttggctagaggaccgcgcggaggcagcggggtgagaggaggagggggcgacagttccaactgtccacagggtgggcgggatggtgacggagcgtcgcaagaacccggaggggtgcgggcggctaagccgagcgcgcgcgggcgggcaggcgggtgagcgtgggtggtgggggtgtcatcagcctgattacctgcctccgcggggcttctgcgccccggatctgggaggaggtgccctctcgtgttcgggcaccgcgcggcggcaggctgggagctacggagtggacagtggtggaacagggtggccgggctctgttccaatcgcagcggctctgttcctcaaaccccaagcccagctgttgacatgttccttgtgaaatggagtttggcatcctcagcgccgaacccagtggaagtttccatgatgaggaagttgtgtgacatgggggttcggaaaaggttggcaggccaggggggagggttaaagggactgtgggtctcccatcccccctttttcgcctgccccggaactcccgggcttggaaaggagaattatcctggatgttggcgtgcgccgtggccggtgcctggcgactgggcttctctccgcctcctgggggcttggcggggatttcgctagcctcctgggtcgcgctccttcgctttgcttctcttggcgcagcatcttcctctgggtctcctcgagttggttgtgataccaattgtgccaactgtgtgacctccaccccctcggagaaggactcatttgggggaattttcattcttagtggattttgcccttcttagcggcagttgtcactttgggggaggatttcccaatgaccattgtgggattattattagtgttaattcttaagccttcttatttattttaaggagggggagggagaaaatgagatgaattttttttaaatgtacaagtttccccaaatggaaaattttaaaagaaggatctagaaacataacaattcataaagtgagtcaaagaaaggaaagagtttgcatgaacagccaagttcagattctccattctcctttgtccacataaatttagaatttttgaagattcaaacactgtgtaatcagtaaatatatttgaaataccttcttcctcagcacattattggtcttgggtactagtgagattcagttttaaagacctgtgtggaagttcaagaaattaagcattccttgcacagtgtattaatatcaagcacagcagtttatataatgataaatgtattaggtaatgtagacctgttgggcaatcttcacattatttggctttagtttagtatgcttatttaaattgtaagaatgtatagcatgcaatgcactgcaaagaaataaaaattgcattttaacgtgttcatgattcattctgaatattcagtgactgacctgctccccaattcacttctgcttaattctttctaattccgaaatcagtcagaggctaggaaacaatgaaaaacgtgtttcagtgcaaagtattttaagcagttgatgtttttaggatgttttcatgccaggtggctaagtgttttaattgagtcaaacagaaatccagtaccaagtgatttgtttggagtgttttatacaaagacattggtgaacgatcatttataatttgagcatgttaaagaaatactaacagaatctatttttacctgatctcagaggtttattatatattggaagtgagaccatctgctagtaaatacagtttggctttattttatagccagtgaaaaataaataatactgagtatagctacagaactggttttttaaagtgaaataattcctgttggcattacaatgcaaaggtatacttttattgacattggaatattgttacataaagcaactgacattatgtagaggaatgaatattccatgtatctcctttcagtttctttgtagtaaattctgccataattagagatgaattaagacaactttttaatccattatctttgggaaaggtgatttcttaaaatcgccttaaaagcagagaaagctgtggattcctttcctctcctggggtttttgcagttgtttaaagcatgagttgtgtggagccacaaatggtattgcatgtttctttttttagtaagcccatctttttgatggaaatcagagtaaaggtgattggtttcttcgccctggtcttctcattctagtgtaagattacgtgtcaccttcttagaaagcccttccctgaccacttgagcaaaggcggtccctcattccttttcagacccatcacactggtttttctctttgtttgtttgttttgttcttctttttctttcctttattgtatttgcaatctgaattgttcatttcaattgatgcttgttgatcgcctgtatccttgcctagaatatcgaatccatgagcacaggactcttgactgcctcactcactcttattttccagcatctagaacaatacttggcacacagtaggtgctggataactctttggtgaataaattaatgattgtgtccaaatattatgttctcaaaaatacctgactacacatcctaagtgggtgccagttgggcatgccaagatctattctgtgtgtgcatgtgtatgtgtgtgttgcacacattccatgcttatatggttcactctttatttttctctctctctctttcttttcgaaataaaagctggtcttccattctgtgtagtgacaatgcaaagagctatttctgcgagttcctcctaagggcatttgccttgaatacatggaaatcctcagcagcagaatttttctgacatgttaccttgatccctggaagacattgaccttcaactccctgawtttcagcagaatctttatgagttccagaagcattgycagtgctaagagtgaaattccagggactagacttcactgggtgatggcagtgtcttctcactcagcaggtcctggcagtgcctctggcaatggcagccctaagtggaccaaccagtgcatggtggtacaatttgggctgcaaaagtggtggttggtgagggggcaaaatgtaatggtcaggatccaacacaagatagaaataaataggtcttggtgatagctttgaaaataacctgatggttatcatatgttattagttaagtcagccagcctctttttgccctcttttgccgcttcataaaagtattctgaaccaaatgatggtgggaaatattgcattatttgagttttcaagtgaccagagcataatatcaaaggagtcatcttcaaattagttattcatggaaactcttgccaattgagagcaaaaggaaattataattgaagattatggtgatttgtttttgtgtctagagtattgactttcataagtgtgctgagtaaatgcatagtaaaaatttcacaaaatcagactgttaaaaatgggaggggaagaaagatcaaaatcttgtagaggagggaagataattaaactacaatcctaagtgcttactgctttagagtatttaatttggctctgagcttcttagtagtagccaagttaacagaaaaaaagggggtctggaggtggcatgcattaaacttgtaaggatgacacatgtagagtgcctgccatggtgcttgccaactagtatatactcgtatgaaatatcaaattatatcatggataatacttgaacttcaattctacataaagtgaagtgaggttctttatatgatcttgtcttgttaccaactctggaatggaaaaaaattgcagaagacataataatgaaaagtaacccagtatgtttattgttgggggcctgagctactatggcctatcagtggagattctggtgatgaatcccaatgcagaaataaagctcaggaaacctagaggaatgagtggttaccacactctgtaagctaattttcccaaatatctagtgtgtcagccaacttttgattagagcaatttgagaggacaggacaacgaggtacttgaaaatgaccctatggccataaacacccctgaatatgtggcccctgatgctttgggctttagtctatatagctcttatcaccctgcagggcagtttgtttccatttctgttcccacctctaagttgtgatgaggcacgatgtgtgggtttattcatctttgactccccatagcctagcaaagagcttggtacatgggcacaggtgaaacactgttggaagaatgaatggaagggtagaaaaggcagtgcttctctttcccttctgggttggtattaagtgtcatatttggacttggatttgtccagagtgaacgtttgctgcctgcattgcatcatatgtccagatcacagctgtctgttttgcttgaagggcttgttctagtgtcaaagctggttgagcaatggatggcaagttaactccttgytttatttaaagtcattctgattctttgatttgattcctcattcagtctacaaatatttatgtatctactatgtacctggctctgctagccatttttcagttcarcatgcagcccagtgacctatgagacaacatattaatacaaaaggattctgaawttgtctccattgtgatgagatgrgtatacctgttggagtctctcatatggcccctaaaaatagttattttatatctgaggaggtgattgtttgtgatttctatagcccatgtatattaatgtaaattccagtgagattcactcaagaatctcttgtatccaagtagtaggggagttgaatatatttagaccggtgagcttctgatttaaaatgttcattctccaatttaagttcccaaacttgttagtcaattttggcatttaaacaagtgggggggagtatccaaatcrctgagtcacaagtaatatatttccatatcttcctctcaggaacctggccaactgacagctagaatagtgatctatgctcaatgctaatgttgtttggtccctactgtcctaatttcaaaggactttgaagtctttatatactgtcagctcttgtgcagtgctatttttattgagttgagaaactgagttctgctgtgaacttcaggatcttttccaaatagcaaatcaggggagtctggaattaggacctaggaaccttgactgtcctgagaaccatattgtagcttttccatcatgacagtcagtcctaacaatctgatatactccctggaaagtgtttctgatagatgtagatgtgcttgataacagggctcatctcccttgctcagacacattaaatttgcacagaaggcagatctacctgtagcaacccagaatacttgcatttgaggcttttgcaagaagataatctgtgataatcttgtactgtctgctggtcagtgcttaccagaaattaaatgatattggtatagtggtttaaatcttttttttttcttattttttttttgcgacagagtcttgctctgttgccaggctggagtacagtggtgcaacctcggctcactgcaacctccacctcctaggttcaagggattcttgtgccttagccgtaattacaggcacatgccaccacacccagctaatttttgtaattttagtagggacagggtttcaccatgttggccaggatggtctcgatctcctgacctcgtgatctgcccacctcagcctcccaaagttctgggattacaggcatgaaccaccactgaaatcattcagttgattttattgattgaccaacatccatcgatatgtttaaaattattctaagaagcaatattttttatttaaaaaatcttttatggcaaaataatttaaaggaacttaacgaaaaccctctgtgatatcatcttaccactttatgtgctaaaagcaaacagttgtttgctatttgtcagacagtgccttctgtctattaaagctatttttccagttactactcattcatttaaggcagtgaaggatcttgaagtatattcttttagcagttaagatatattgaattgtattgaatagcttattttattctagttatttgaaaattactgaacaatggacaatgtgcaaatcattgacatctgtctcagatctgctgagacaatcgtgatttagagattaaaaaaaaaaaaagaaggcaaattcatggtccaactcatcacagtgaagaaacttgtggcttacatatctcaacttacgtttgtcttgctgatctgcatgttttatccaatttttatttttcctaatcctattttaacaaatactatctatagtttatttcatatcatatgcacacatgcacaaacacctcaatacatacatgtctctgtgttctaagagtggactgcagacgaggcatacacaattaggaaaggaytggtctggactgaattgctcattcaacttcctacttcccaaagagggtcttcagggagtcatggcttctcttctgtgatcaagaatttaggcatttataagaaagtcatgagtgacaagtttattaaaacaaaagtgtggacaaaggaatgtagactgaaagcaggcatatcttctttattagggaatatacttacttgactcctggaggctcaggaatgtttgtgatgaggaatgttgacaagatagtcatggtgttagtagcataatatatgatcctgacattcaggaacctgttgagtattgtaactcttgtgacatgttgttccttggttctcaagatggttcagatgtacttcttccctttgccatttgtttctcttgggattctgttttttctgatttcatcaatgtctacacaaagcaggtgctcagaaaataatgattgatgatagcaatcataatgtttcttgggcttggtcatctttttgcacatttctgtcttatagtcataaatgtcttaacaactggcatgtccatacttgcagaatctgtctctgtgacaagtgtgtgtcatgttctcacatacagtggaaaaggcactgcttgtctctggcttctgctgtgattcccatgctcagcttttaaatcacagtgagaaatgctacagtcaccctgatgtcccaagccacaaaccctgtcattgttttcagtcccttctacttgctcctgaatatgttgacagatcctcttcttatattattactttttgcttcttttactgctgtatttgtttattttactctaggctcaattatgtttgggaaatcttgagtttaacaacttgtaaaagtttccagagcctatttttatactagcatgcattataaatgtccaagaaaggggagagcaggtagcaaaattcatttgatcaccattttatttgtgtgtgtgtgtgtgtgtgtgtgtgcttgtgtgtctaaaaccttaagtggcaaaagttcagcacaataggttgtgaggaacagttcactatatcacactttttaaaaatcaggctcatatgttttaaccttttaatacagttcataaaaagtgacaaatgaccagtatctagcaccacaacagaacctttttgctttttcacacacacacacacacaaacccctagcaacttgtatacaacactggctaatgctgcctgttgttgaagtgttttgcaagaatgcaaaagtcctgctaaatttctgtccctttgaaaacattataatcataatctttccttgactttctttctgctgtttaggtgtattaatttatataagctggagaatggtttatttctgctgtatttctgtttacttttaaaattttacctaggcttcactgcaatttctgctatacttctaacatctggagatctagaataaagtacctatatctgaattgtagctgcaacagggaatagaataaggttgtttagtcttgtgttatttttctttaaaaaaaaaggaaccaagggaaccttacacagaaaatattttttgaaacaagttaagttatgacctatgtagatgataaacctatacatttgtcctgtaatgtagcagttataagggatttgaaaagcatctcatctccttgaggacttgtgagaaaaagatcctaggcatctggcttattaatctatctcccactctatgggttcataaacataaggtattgctaaagtgaagccatgcactagaatgtggtgcacatgcattcatgtatcattgattaagaatatgtgtttcaatttatctttattgaagttgccacaaaaatcaagccttataataagtaatttttttcttctggagtctgtccgttggtcacaaatgcatgggacatctgccaagtgccagacacgatggtaagtgccaagacaccatggtagagcatttaaaaattcttgtcgtatggatgagatgctcggaatcttctggggcaatctacaggaggtgatttagtgtagagtagtgtttctcagcagaggtactatttgagttttgagcctggtaattcctctacgctatggcatttgcggccagataatcctttgctgtggagggctgtcgtatatattacaggatgtttagcagcattgctggcttctacccactagatgccaatagctcccccaaccctccagttgtgaccatcaaaaatgtctccagatattatcaggtgtctactgggaggcaaaactgctcctattgagaacagctggtgtagacgtttggaactggggccgtggagtgggaaatgtgtggatttgtatgctggtttcacctggcttcattgcatgtgttcagtttcctcatctatcatatgtggagattaaatgaaataatatagtgcttgagtcacagtcaagtatttctaaatattagctatttatagtagtggtagcattaatactttagcagacaattaaaatatttgtaagtccaatgacatagttaagtacaatgtacattgtgggaacccataggggtgggagggttctaggcagaaataaatatgatatgcctatgaagtgaaagtaaaagtatgaagcatttgggaaattgtaaggagcccagcctgactcatgtgcaaaggactataaatgaggccattggagcaggcaggagccagatggcgaggaccttcctgggcacaataaggaagattgactttgtcttgatagcttgaagagacttaagaatgttcagcaaatcagatttttattttaaaagagttctttgggataggtcttgagtgagagactggaggtgatgagcccagttagagactcttagaatagtccactgagagatgatgcctgctggagctgaggcagttatacattgctgtgatgtctttgggaacagatttcactttctccgagatgtggcaaaatttttctaatttaattccaataatgaatatttttagcaagctagctctacatttgggggaatttcaagtttaatttgaaagcagattacatgatagattctctttaaaatgttttcaagtgaagcttaatttaaagaccatctcacagcctattcatagttgaatattacttcaagggtttctctgccattgtatgtacatgcctatagctcctctgtctgacaggaacgtgtttctatatgattacattgaaatagcattgacattgtcgtgttgagtttcattatttagtgtgaagcatttcagtatttaatgttaagtgattttctaactgatggggattttatttctttaatgatccagattagaaatggatgaagataatgaatgaatgaatgaatgcaggaatgggtggcattatggaaatatcacctaattaagaataaaaatattctggacaagtctcttggctgatctgagctttaatttttagtcataaaatgatacttgtaggtatattagataattccaaagttatctttagcccaggggttggcaaacattatctataacaggctatatcataaatattttaagcttttcaggacacacagtctctgttgaaactctcaagtctgccattgtagtacaaaaacagacatacacaatatgtgaacaaatggtgtggctgtgtgccaataaaattttgtttacaaaacaggcgatgagctatagtttattaacccctggtagcccaacactgtctaatagaaatagaacgtgagccatatatgtagtttaaattcttctagtagccacattatagacaagtgaaaagcaaccagtaaggttaagttcaatactatattttattttacctaatatatttagaatattattaacatgtaatcaatataaaaatattaagaatatattttactttctaaagagcttttgatatctggtgtgtattttacacttgcagcacatcttaatagccacttatggctagtagctactgtaatttgatgacaggactctagagttaaaactctgggattctatcaaattccatgaaaaagtaaattatatcattaattcaagtgattgagacattttctttttcttgccagatatattggttagtaaaacaccatctgcactcaaaaataaaataaaaaatgcacagtagctcaaacaaatggaagtttatttttcactcatgtgagttgaaaattgctgttcctgattgattgatggctctgttccacagtgattcaggggttcctctggtcttgggctcctccatcttcaggacatggctctgaggtcatgggctcattgcatcagaccgctgaaaggggaaccagaaagtgaagagtatgctggcttcttaaccaccttggcttggaagaaacacataatcactttgctcacattcccttggtgagaacaaatcgcatgtcccctacctaaataaagcgggatgggatgggaaatatagctcctactgggaagctgcttttcagcaatgtgtctgtactgtggaaaggggagcaagaatttggtgagcagtgaattgtctttgctacactatgctactattttttaattcaatgaggtaactaagttctactttttgtgccataccaccctcctatctgacctaattctgtttccttacttccttctcacccttatggggtcatctttaaccttgctagacctggttttacctttttgtctttgaccatcatttttatttccttgataaatctgtgtagttcatagtatgcaaagagtgttgggaacttgctgatgaatcctcatatcattatcagcacattattaacatgtttttttttttttaaagagaactaaaatttaaaatagagatgtcagaaagcaaaggccagacctgattcttggtatgttgacagaggtactgaacccatttttcgtggaataattttataacagttttagattatttaaataaatgactttacataatatcttgacttaaaaataccaattttcctaatatttaacctagtaattactctataatttcttactataatgggacacacacttttctaatccaaaagaatatttgcttgttttcttcccaaattataagtgtgttttattaaatactcagccaggtctatagaaatgaaagaaatataagggacatgaataataaaagtgaggtaagtaaaaagaacaaagaaaatcttttcttctaactatgcatattttacctttttgaaaacattattattttattattaaatattttaagaagtaagacacaaaggacagacacatgcattttagattattaagaaataagactaaccaatgataagaagtatcatgcagagaacatataaaagaaaaataaacagtatgtgtctttctatttgactgaataaggctgtcttctacttcacaagcctatttctgagtttaaatattttttataagggaaacttgcaatattaagaagttaattctgataatgtcgctcaggtacagaatctagccaactattaatattccataataggtgagaaataatgctgtcaatccccagtgtatttgtggtctgtgattaaggtctctaggactcagcatatcgcacagcagtgggctccaattatgtcctattttaatgccctgtcacggagcagggaagagaaacccccttctcttattggttgagtgtattgtgagagggtggaagctgggggtcctgtgtcctggattggttgggagctaggacattggagagagagagagagagagagagagagagagagagggagacagaaagaaagaaagaaagaacgaatgaatgaatgaatgaatgaatgaatcaggaagtggtgttgaagggaagggtaggtatctatgcttgcattgaaaggcagactgagttggatgcctggctttgccaccttccagctatggtctctggcaagtttaatctctttgaacttcaatcactctatctgtgcaagggaaagaatgttggtatttacttcacagcactgtggaagaaattacatgagataatggctataaactgcttagccaggacatagtacctggtgagtgctcaatacatggaaaacaattttattactatttcattattacggaagtagtaaaattaattttgttgagtaaacttgtaccttggatgtatggagcatgattgtccaaaaggcaggaaatcaaagagagagacccagaagtcagactccaaatttactcgatcattttgcataagttattctttagttagttttaaattgttactgtctgtttattgataacaatctctgttttatagatgacctagtatttttcagcctcaaagatgtgtgttctgtggtcagttgtccaagttaatgatccctcagggtttgcaaaaggtaataataataggcactcacttacctgctcaggattccagcctgctcaggattcccttgttctggattttttttttttttttttatggtccatattcaaacttttgtcccttggagtccaatgcatattttcccccacttatgtttcagtctgacttcccaatatcctttattcaaggaactcctgaaatcctgccctgattaattagaattgagattaaaatcctctctggttctgccccactgaaacatgccactccaatgacactttccctcacccctttgtccacaggtagtattacatgtctagtcacttgctatatatctatatttcttcactattcagtgtccacaccccttatttgtcaatgagatatttctttgctagattttaagttctaagagggcaaggactgtgtgttaaacaagttcagtgcaggttagaaggcaagcccagcaggtacgtgctgagtaatactttcctgatgttttgaccaaccacatgcaagctcttttcatataattaggatgaatctaattttaaaatgagcaaccgcgtgtcctcagatgaaccagaatatacacttacaaggccctgctgtcctgcattataaataagggaataggttgtcctgcagaaaagctctgctgttttctttttccgtaaaaaaaaaaaaaaaaaaaaaaaaaaaacagaaagaaactcatccacacatataaaaactgagatagacgatcttctcaattcctcaactaagttgggaagaatcatggccccaaagtggatgttctctgcaaagatgaaacctagcaaaaatccacaatctgatgatttgtaaggaaacttgcttaagaatggcttacggcaaaaagacccagagcttggcagcctgattcttcaacttgtatggcagcaataacttccttaggtgacaggttcaaatttctgcagggatgatattgtgagactgttcagaaagtgtcaagctccatcgctttttaaattttcttttcactgataggaggaactcactggacacagagctcctgtggcagctttcacaatgcctggctttctttggccttttatttcttaagatttttagcatctcagaattccattacatggaggatgagtgattggacattgccctgaagggattttattatacaattcatttctcttcattgtctggcagtgttttgaaataactgtttcattttggctcttttgtggttttaaatccccaccagcaattcattcaagtttcatttgaaccatggcagttgtcactcttcctctttgcctcttagaattatagtaagagtcccttcttggagccaagtgttgttactcattagagttcttgtacaagtttgactttagggacattggccctaataaggagtatgtttgtgctccagagtcatttgatccctgccatccttgagcaaaatatgtggttttgcttctgtcaatgggagagaatgaaatgttcctgaagttgtatttctaatggtctgaaggaagtgggtcctctgaggattctgtgcctgggactttggggatggaaaaattggccaatctctagtaatcctgaggcccctcctaagggaagggatactgtggacccagagagctcttacatcagaggaacctgaggatcatgtgctttccagtgcaatattctttcaaaagactgaccatcagtttgggctccccagaagcaaactctgagatgaaaattcaagtgcaagtgatttttaggggggaggtaaagaaagtaccagtaggaaattggggaagagccaggaagggacagcagccagtaaagtgggcattatcaaatcagttaagcattgtgggcacctggagcttagtcacactgggggactcttatacagcatggaatgcttgtcttgtggttgacccatcctagaggcaagggagtaggtatttattcaccaaaatctgtcaggcatttgttggggactgccttcagaggcaaatgattccctgtcatttcaggactatcacttgggcagccaagagtaatcctccaggcaaaggaatgcaggtgttggcagtcagaagacaaggtggtgggcgctgaagtggtgccatgggagtatagtcgaggcaccagcagcatctaccagcagggcagcctgtaaccccgacttccacctgaggattgttggcctcatttggacttttgcatggttctcatgaggggcaaactgcgtttagctggaacactaagctgaccacaccagcatttgatttgggatctactaaagagggatcccttgaaccaggagtcacagccagatctcccactgccttcctcagccccatcatcttcctcccatactgtcttcattctctaagaccttactttccacctgagacagcctactggtcatggtgagtgcatgctctctctcctaatagcttgttcttgtctctaccatgcccccgtgttcccctggagcaaggtttctcagcctcagacttgttgacattttagagcacataatttgttggggtcggaggggctgccctgtgcaatataggatattttaggaatttttgtttgtttatttgtttgtctgtttttgagacggagtctcgctctgtcccccagactggagtgcggtggcgcaatctcagctcactgctagccccgcctcccaggttcacgccattctcctgcctcagcctcccgagtagctgggactacaggcgcccaccaccacgccaggcaaattttttttttgtatttttaatagagacggggtttcaccgtgttagccaggatggtctcgatctcctgacctcgtgatcctcccaccttggcctcccaaagtgctgggattacaggcgttaacccccgcgcccggccgcattataggatatttagcagcatctctggcttctagttactggatctcattagcactgctccccctatcccctgccacagttatgacaatcaaaaatttctctagacattgcctagtatcctcttgggggcaaaatcatccctgttggaaaccactgtttagactttagttctacctcttaatctctccccaccccctaagcttttcatcasttatagctgctttttcatcatgatgatcttcgccctcatggggtagggggagatgtttccaaatccggaaaattggaacattttctccggttgattctgacacacctcctgctccgtgggccaatattctactccacccagaaattacgaatcattgtcctacacttgtactctgtctctcactgcctcttcctatccttctcccctctcttcctctatctcttttttcttttccttccttttttccccatctgcattgtaaacaattgtaatttggagaattccacttttcacttctgcctcctttttaaaggtttctgctcagtacaataaagtgaatatgttatggcaaattagctaataaagtatatagtaagatgtaacatgttatttttaaaattacgttcatccattcattcttttgttatcaaatatttattcagcaccaaatatgtgccagaggyatgcttgggtacagtagtgaacaacatattccctgcccctccagatacwtacaaaaaatgatgacataaaagatagcttcctcaaaactaaaaatatttttattttatcaatatatgcatactccaaaatctggagactgaaagtacaaaaacccagtattgtaccagaaacagttacaatgactggctcaacatttcctagtttggtaattctaactatatcgtttagaattatgaaatgatgctttgaatgataggatttacttcttcacattaagacatatttttaggaacatagaccattttgacaagtgaatttcacagtttaagttccttaaataaaatgttaatacatattccacactctttgtttggatcctcttttgctggttttctgtaaccagtttctgctttgcctgatctagtagctgtccacatattcaggtaatctattcctaagtagctttcaagcagtcagaaacaggattgcattgcttgtacttttttgggcgggtgtaggttatggagaaaggaaattggataaagatcacagagaagaagattatgatggtgccggtgtcactgagagatctactgacccgatgttgccttcttttgctgccttgtgtgtgctgtacgtatcctgcgttaggacccttgctttggcagcgttagctacaaagtagtggaatgtcccatgcagttatttctgtatttctgttaggtctgttcctctcaatctcctcagactgacttccatatcctcgtttctcaagagtgtggtgcccccagaccagcagtatacacatcaccaagagctgattagaaatacagaatctagagctccagcccagacctgctgaacccgggatctgcatttaaacaaggtccccaggggattcatttgcattggagtttggattcactctggagtttgagaagcacttttgttctcttcctacttttctacttctaatgaagtttaaaaagtgcagaaaacaaactataaaaggattaatgtagtaaccctgctgtgtattgactaacccattatacttagtttattgttttacagacttacctgccaacacattagtgggccttgaattaacataataagtcacgatcaacaaaagttttaagtaaacagactaaaatagaaaagtattagagtatatcaaatgtatttgaaacatttgtttcatccaaaaaatgtgaaamcacacacacacacacacacacacacacacacacccctttatatgtatgtcctggatcatgattgcaaaatggaattctgactggggttacagtaaaaaaaaaaaaaaaaaatcttgaaaaccactaccataaatacccaatgtctctttttatatattggccagtgttcaaatgcaagcatttgatgatgtttgtccacatgattgagataatgagatcattttcttcagttgagattcctgaatgagatgtccaaatagcaaataggaacgttaaaattgtctcaaatgcaaggcaataacaataagaattttaatttttttcttaattttagaaaaccatactctatcagataatttctcaaaatcccaaaaaccatacctttaatgaaacactcatcttaattcaagagaaaaacaacaaatgtaggctgcccaaaggacattcattaacttgaagggaataatacctttgawtccaaaagaaattcgccaggttatgggagacacaggatgttcccaaattggtagtgcggttccgtaaatgatacaaacttgcaactaattttttggaattttaatcatttacatttcttcaacactcatttagctttgcagatttaaaaagtaaatttttcattttaatttttttgtttcagttcctctgattgaagatggcaaccattgaaacaataccttaaaaatttaaaagattatacaaaattaacaaacctaaatgagtacttaaatttagatagtaaaacttttgtgttaatttgtacatttgtagcagtaatccctctgaagctatgaacaccctgtagagggaaagaaaaccaagttgctcttcaggtgtgatctgggtgaagccaagcctcagagaacccttggagagtcagatttcaccactgtgggaaagaaccagtccatggggtgaaaccaaggtggtttgtgcagcagggtgctaatgccaggctgagacacaattccagggaagtactttcgatcttgcaggcagaatctgtgccagacaatgagttgtctctgaaagtgccttttccccaccaaagagcagcagctgggtggacctagcagcttcttctgagcttcccaactgtgccctcaggctctttcctgatcttcagggcctcagattttcctgaaatgattgtttacttgagagattccttagaaagacctgagtgagctatttaaagcagtattatattaaacatgattttacatatgcttttaaggaactgtaaacatgttttctttattagcttttgtaatcaggatgtctgttatatagaatctttactttattagacatttttaaacagttgatggtgttcatattctttaaggatgatgtgttttgggggaaattttaaaataatttgcttgatagtgaagatgagatacctggtgttctcgcctaggcataagtgttacagtgtgtggttttgctcatttttaaaaaactgtcatgtttaattgttccagaactagtcactagtagtgtcatcttcttgctagtgcatggcctttcagattttatatctatctatatctatctatctatatatatgttgacatatatgattttcaaattacacacatatatacacacatacacaaattatacaaatatacagaaaaacaattctaacattgtatatatattaagtatgtgtaatttgaaaattagtataagaaagtatattgaagatattgcaaatggtagcacttgtaacaacttcttacatttatttatttctaaataagtaaattatagttcttcaatattgtgtttgatcattgcaattttcataaattatttttattctacaaaataaaatattaacttaaataatatcaaattatagctattcgtatttgttgtaatatatttttagcaattttttgctcacttgaaaaaaatccttacatcatatttcagactctcactttttgttgcatgatggttacagttgtagaaagtagccctgttgccttcaagactaattagaacatgaagaattttgaggcccaagccaaatagaacattttgtttttagaacatgaggtatagaatgccacgtattagtgtggtagttttcctttgtgatttatgatacacgtaatgttctttcaattaaaaagtgcagttcatcatattaagtcattatcctacctacagcgtattggacaaatttcatatatacttttcaattagtaagaaaagcaagtattgcagcagtcacctatctgatacaggtccttacagttgaatcagctctgcccatctgtaaattatgtttgaggcttgaacttttccctgtacttccagttccattattacctacgtatagcacatatggtctgcagcagtcttctgagccattgaaaaattgaggatttgtttttaaatgaactatcaaagaatccttcctggaaggattgtgtatttgagttgctgtagctgtattttgtttgattttgttttccttacataggaaacctgaaccagaacagtagccattgattctacaaattctggtagactatcacaaagcctaggatggcaaatagttttatgccaactccagtagattttggtgactgttagggctgatgtgtttggaagtattacaaggccagatctctgaggttagcagtaaaaaatactgtgattgattagtgatgtctgctatggaggaagtataagagtatgatgggccaaatgccatgcattttcttaccctgtgcccataccaaaggaagactaaattttgaggatagtatcctattgaattgcctttggctttatgcttcatgcttttgaaggagtactgtacttgctctgaagatatgttaatgttatttttaacagttaaccaggaaaattgtttgtaaataaaagagactacaaaagagtgtttgtttcttgattggcaggtttagtgtaataccacataaaacaaagcatacaacgaactttttttaaattatactttaagttctgagatacatgtgcagaacatgcaggtttgttacataggtatacacgtggcatggtggtttgctgcacccatcaacccgtcatctacattaggtatttcttctaatgctatccctcccctagcccttcatcccccaacacccaacaggccacagtgtatgatgttcccctccctgtgtccatgtgttctctttgttcccacttatgagttcccactccaacttatgagtgagaacatgtggtgtttggttttctgttcctgtgatagtttgctgataatgatggtttccagcttcatctatgtccctgcaaaggacatgaactcatccttttttatggctccatagtatatgtggtgtatatgtgccacattttctttatccaatctatcattaatgggcatttgggttggttccaagtctttgctgttgcgaatagtgctgcaataaacatatgtgtgcatgtgtctttacagtagaatgatttataatcctttgggtatatacccagtaatgggattgctgggtcaaatggtatttctggttctagatccttgaggaatcaccacactgtcttccacaatggttgaactaatttacactcccaccaacagtgtaaaagcattcctatttctccayatcctctacagcatctgttgtttcttgactttttaatgatcaccattctaactggtgtgagatggtatctcatttatgtggccaacaagcatatgaaaaaaagctcatcatcactggtcattagagaaatacaatgaactttttaattgtctcttttggttttctgagtcctgagactacgaataaatgcatcactaatcgtattttaaaaattgatatgccaaaatggttgaaacttttagaagaacatgctaggttctcagaataaaattataaacaatattttctattacatgttaaaatgctgaagtttctattacatgtttatttgtgaaatttatcatttgccttattgtctactctgtttcttaattataatactcatcctctcagaaagctttggccagtccatttacatgaagaacgggaaggaagtagattgtatataagagcataggacagatggtgagtcacagataagctcatcttgagtctcctaagataggaagataaaagaatgtataaatttgtaaatattaagaatttataaaaatttataatttataaataaaagggcacaagagtgcaaatttgctgcttgaaggtctcccgagcctgtgtttcttatttcaccaagaagaattgaatcttctgtcagtcaatttgattggactcccttgaaacctgtctgtgagagaaggtctgaatagtgttcccttccattattactcaactgtctgccaaatctggaagctcacaattacttaccttacagtaagtgactatcaggtcctcaggaattagggatgtgaagaaagaaaccttttatacagttgctgttggcattctttccacacagagatgaatcaccttctttaacaagtccaggacttgacttttccaagattggcagagagagtaggaggagataattggctttgtgtaaaagccccttgcacagttgacattcctttttaggggtcagtagtctccaggacaaaaggaattgtggccagatgagtcttcacgccttaggggattcttgcagaagttactgagggctggattcctatagatgtttcaagatgttgccattcaggtagctgggatatgtgttgttttgtccatcagtaattgagtttagtactctctggaatgaagagtagattaagagggtctcaaagatcctcaacatttttatttgtcctggcatgtatagacacagtagtattgatataacatagcaggcaaagtatgaaccttggtggacagactggactataaatatgggtgtccctactagctaggtgataagatctgagaaaaaattgcttaatttttctgagattcaatttctaattctgtaaaaatgtttttaaggmaaatgtcctactctgtaggactatgaagactaaaaatacctgaaagagaaaagaaactcttcttagcagaggtatgcctttggtctgaaggttttgagggtctgcctggcttccaggccatattcttctggttgtggggacaggaaagagtaggcaaagggaggaacaaagggaagcctcagaagaatatccatagcttccctactcataaggattgtttctggcttttatttttagaacaaagtaagtcttccgtggtgtaatcttggataaaatggagatatgcmggctgatagtatttaggaaatttcacaagttgaacaaccatatgcatgagatgtttttgtggattagcagcagactagagagggttgatctgccaaagccctctggctctctgcctcagtcctctctgtggatgttgtaagggacaccatgaagatatggatgacatgcttaccaaatgttcaagggccacaaagctgggaaggagagccaaaatgctccactacagagtgtggatttagagagatcttgagggactggaatggtgggtccaaatcaagaaggcctgaaaaaggatttaaaaccacaacattgcattagatakatgttggaggcccaaattctaaaagactatcaattattaatttagtatgcactgataagcatgtagatgccttaacccctattgcagatttaagctccatyaaaataatggttctcaaacttgagcggcgttataatcacctggagagcttgttaacatacagattgctgcatcacatccccagagtttctgattcagtcagtctagggtggaactggagaatttacatgtcacacaatttcccagacgatgctgatgctcctggaaacttctgctttctacaaaccactgcattagaagaacaattctactcaaatctgggaggtaatatttttattgtaatctgctgaagtattgtagcaatgttgggtcccacyctttcagtcagaacaaaatccagaaggatgtagaaaattcaggcaaccagttaatattaaggaccactgaggaaagaggaatatatggagaagagaaaaacttcagagatgtgtggcagccttcaaacacttgatagattgacatgttgaagtgtcttagttaaaagtcttggccgggtgtgatggctcatgcctgtaatcccagcactttgggaggccaaggcaggctgatcacttgaggtcaggagttcgagaccagcctggccaacatggtgaaaccccctctctactaaaaatacaaaaattagccgggcrtggtggcaagtgcctgtaatcccagctactggggaggctgaggcaggagaattgcttgaacctgagaggcaggggttgcagtgagccgagatcgcaccattgcactccagcctgggagaagaagtgacactctgtctcaaaaaaaagtctctacattggagccagataaacctggctttgattcacagttctgccatccttttatatatccaacaaacatttctatggggcttattaagtaccaggcaccgttccaagtactttacgtatgttaacctatttaatcctcgtaacagccttagaaagtagatttagagaggttgagcaactttcctaaggtcacatagctagtacatggtggaactgggatttgaatccaggcagtcacgtgaagtgtaagttcttaaatactccatcatactacctgtccactattggctcctctccagttgttgactgtgagtccttaataacatccttaatgtttctgtgactcagtcccttcatcttcaaaatagtgacaatttgtttctcataaattgttcagaatagtcaaagagagtattcgtaatgtgcctatctagcgtctggtgtttagagttctgtgatattcaagcaaagctaggagcagtgggtaaagttagtgtgagtcacatgactcaagggtaacaaaacctatcagtgatgggatccagcaaggtgccagggcttcagctttgggagtatttcttggattctaaatgaccctctagaagaacagtcatggatagcacctagaggaggaagctggactaactaaccttctgactttaaaattctacactatggaagacattgacttcattcatttgaagtgtcagtcttcatcagattgttccattgtttccctttgctcacttgaaactttatgcagattctaaaagattatgcctgtcacagttaaagcaggtataaaaataagttacccaaacggttttccattctttactcgtayctcactctttaccacgygctcatagtttgttgctcttcaacacttttctctaaataagttaataaaatgtattcttctatacagtagctatttcttgcctggttttcttacacctcattgtagtgtagcttgatttttgcatgtatctaacaccattgtgttttaaagcagtaataatcattttcatagatatttcattatactcttcagaagtaggttgaatgcttcccctgatttacatatttcaagtaatgagaacatctgagacataggaagacatctgaggggaaaagcttgtctagggttccctggtttgttggggagttgcacagtcagggatagggctaatggtgatgctaaaggcatcagtggagtttaccgaggtgttttcccagctcctgggtggctcctgtgcatatgagcaactcccttaatggggctgccttaagaattaattaataactcatgaacgtatkgagctcattatrtgctagaaattgtgctatgagcccagaaatccaagacggatccagctggttctggagtgaaatagatgttttgataggcaattaaagaggcagggaatacctgttatgatggagggaacccctgttttctatgacacatttaaattggggtgtctactgaggagatcagggaaaacattccagcggaggtgatgcttaatttgttttgaagaattagtagtagtcagcttggcaaagccatggggatgtgtctgtgtgtttgtgcgtgtgtcactggagtttggacctcagatatataggcatacctcattttattgaaccctgctttaccctgatttaataaattaagatctatgtgcctcatagatattaatttatttttttacaaactgaaagtttgtggcaactatgtgactgaaagtttgtggcaactatgcgtcaagcagatttattggcaccatttttctaatagcatatgctcacttatctgtgtcgtattttggtaattctcacaacatttaaaatgtttaaattcttattgtatctgttatggtgatccatgatcagtgatctttgatgttactgttgtcattgttttggggcagtacaaacgacacccatacaagatggccaacctaatcaataaatgtgtgtgtctaactgctgcactgactcagtgatcctccatctgtctccctcttctcaaacctccttactccctgagaaacagcaatgtagaaattaggccagttagtaaccctacaatagcctctaagtgttcaagtgaaaagaagagttacccgttttttaagctttaaatcaaaagctggaaatgattacacttagtgaggaaggcatgtcaaaagctgaaataggtcaaaagctaggcctcctgtgccaaacagccaaattgtacatgcaaaggaaaagttcttgaagaaaattaaaactggtactctaatgaacacatgaatgataagaaagtgaaacagcctcatttctaatgtggaaaaagttttaatgttctgggtagaagatcaaaccagccgcaacattcccttaagccaaagcctaatctacagcaaagccctaactttcttaattccatgaaggctgagagaggtaagaaagctgcagaagaaaaatgtgaagtttgcagaggttggttcctgaggttttaggaaagatgctgtctccataacataaaagtacaagatgaagcaccagtgcctatgtggaaactgcagcaaattatccagaagatgtagctaagataattgatgaaaatagctacaccaaacaacagattcgcaatgtagaaaaaacagccttctgttggaagaagaggccaatctaggactttcatagctagagaggagaagtgaatgcctggtttcaaatcttcaaaggacagactggcccttttgttagaggttaatgcagcagatgactatgttgaagtcaatgctcatttgccattatgaatacctgagggcccttaagaactatgctaaatctactctgcctaggctatatgartggaacaacaaagcctggatgacagcctagtttgctgaatattttaagctcactgttgagacctactactcagaaaaaacacattcctttcaaaatatgactcctcactgacaatgcatctagtcacctaagagctgtgatgaagattcacaaagagattaattttgtttcatgtctgctaacacaacattcattctgaagcctatggatcaaagagtaattttgactctttttgtcttattatctaagaaatacatttcttaaggctatagctgcatagatagagattcctctgattgatctgtgtaaagtaaattgaaaacattctggaaatggtttaccattctacatgccaataaggatattcgtgattcctgggaggaggtcaaaatatcaacattaacaggagtttggaagaagttgattctgaccctcacaaatgacttcgagaactttagaggaagaagtaactgcagatgctatggaagtagcaagagaaccagaattagaagtggagcctgaatatgtgactgaattgctgcaatctcataataaaacttctacggttaaggagttgcttcttatggatgagcaaagaaagaggtgtcacttgaaatgtaatctacttctggtgaagatgctgtgaatattgttgaagtgacaacaaaggatttagaatattccataaacttagttgatatagcagtggcaaggttttagagaattgactccaattctgaaaggagttccactgtgggcaaaattctatcaaacagcatcatacactacagagaaacatttcatgaaagaaagagttaattgatgcagcaaacttcattattgtctcattttaagaaattgccacagcaaccccaaccttcagcaaccatcaccctgatcagttagcagccagcaacatcaagacaagacgcttcacctgcaaaaagattatgactcactaaaggctcagataatcattagcattttttcacaataaaatattttacattaaggtatatacattatttttagacataattctattgcacacttaatagactacactatagtataaacacaagttttatatgccctgggaagcaaaattcatgtgactcactttattgcaatatccacgactgcagtggtctaaattcatacctgcagtatctccaaagtgtgcctgtagttgagattggagggtactctaaacaagaattagrtaaatgtgtgcatactgaacacggagccagcagaactcttccccactgggtttccggaaccctaccatccaagccttcactctccaggtggtagtttgaaaataagtcttctaagggaaatttgagtagcccaagtgatagaaactaaggatgatgagttgagggtaccctcaattctgcccaaccatatcaatctacaagtaaaagataaaattgagaaaaatctcccagaaagaatgaaaaaaatggagatggtaaataagaggaaaaaaaacaataaaacccaagataatcaaatgactagttttggcagcagtacatcttaataagagaaatatcaggaagggagaacagaaaaaaaaatagaaagaaggaagtcatttacaaactaattcagaaggctgcacatgtatgttgggcacagaggaaaaccagctgattgcttattctccatactggggagtaaatagataatgcctaaaactgaaatatcacataatacagtcatgctattatggacatggaggtaaagactcccttctcataaataaagagcttagagtgattatctctaggaaggaagaaatggaagggggagatgggagagtagttcttcataacaaatttataaaattatttgacattttaagccacgtgaaagtataaatttaataaaaataaggaccaaagccaatttttaaagtctgtttaaagagcagactagatataaatgtgggaaaaaaatctcttgaacttgaagatagtgctgatgaaatcaactagcatacagccaggacttagaggttcagattaaaggaaaattctaggccgggtgcgctgactcaagtatgtaataccagcactttgggaggccaaggtgtgcagatcacttgaggtcaggggttcaagaccagcctggccaacatggtgaaaccccatctctactaaacatacaaaaattaagcctgtcatggtggtgcatgcctgtaattccagatacttgggagactgaggagggagaatcacttgaacccaggagttggaggttgcagtgagccgagataatgccactgcactctaatctaggcaacggagggagactcagtctcaaaaaataattctaaaccccaggcagattcccacttcacctcatcctgatgagaataaaaccaatcaaatgtaatggggttggagtagagataacgttacttgcaaagaaatcaattmaatagccagctaacttttcattagcaacaatagacgctagataccagcagaatgtgtttttcagaatcctgagcaaaatcatcgacccaaaatcccatactagctaaaatataattcaaaactaaggatgaattaaaaattgatttagataaagaagactgagctaactaaccactcacagacccttgctgaaataactactgcagaatatatttgaatgagaagagaattgaaccaagaaagaaggtgtaggttgcaggaaaaaaaaaatagtgagtgaagaattttgtaaacataatgggaaatctaaataagtactgtttgtaaaataacaacagtgacattaatagtaactattttttgtgggtatttgttaaaaaaatacagaacttaactactataacagcatggagcaagagggaactgtaagtaataacttccacagtctctattattttatagaatgataaaaaaagattttctttagattttggttggtttacaaatttagaaataatctctacagaaataaaatgtttgactccaaacctgtagaggagaataaattcaataatcaattcaatagagatcaggaaagaaacaaatacaaaaaaagtgtgatcaacagaaaacaataacaacaaataagacaactgaaatgagtccaaatatatatttaatcacattaaaagtaaatgaactaaattcttcagcttaaaaagaaagacctccagattgcataaaacccgtaatccaggtatatgctgtctacaagcatcagacctaaaaatagtaactcaaaaagtttgaaagtaattagatggaaatagctacattggaaaaatactaattaaaatagagctaaaatggcaatattcatattagacaaaataaaatattaagtcaagatcttagaaagactgtcatcaccattgattatttgggctaaagtttaatgacatagatttatttttatctgtgcatttgtgttgtaatgtgccatattaaccaaactaatgcaaccatttatttttcttttttttttttctttttttttttgagacggagtctcactgtcgcccaggttggagtgcagtggcgcgatctcggctcactgcaggctccgcctcccgggttcacgccattctcctgcctcagccttttgagtagctgggactacaggtgcctgccacctcgcccggctaattttttgtatttttagtagagatggggtttcaccgtgttagccaggatggtttcgatctcctgacctcgtgatccgcccacctcggcctcccaaagtgctgggattacaggcgtgagccaccgcgcccagccgcaaccatttcttaagagtgttcttactgcattttcaaagtgtcgataactcttacaaaggggatagcatttaacagattactgcttcagtgtcatcagtggtggcactgtgatgtaaattaatagttctgcactcatgggtgttcattaatacttacagaatagttggcaatgcttgctgacagactgctctcaagtctgcctttctaatttctgggaaatagtttgtctaccatgagactctaagtccaaatcaagtatacttttgaagcaatttctaatcacagtgaaaattccccaagcagcatattttattttaaacttgttttatgtagcagcaacatatttacctgtgcctttgaaaaatatagtatcggggagtctttgaaagattattatcaaatgtaggctggacggggtggctcatgcctgtaatcccagcactttgtggaggctgaggtgagcccaagagttcaagagctgcctgggcaacacaggaagaccctgtctctacaaaataatagtaataataacaataaaaaaaattagccgcacatgtgcctgtagtcccagctacttggcaggctgaggtggaaggatggcttgagcctaggaggtcgaggttgtagtgagctatgatcacaccactgcattccagcctgggctacaggatgagactctgtctcaaaataaaaagattgttatcaaatttagaaatgagatggtgtgaagagaaaagccgttccccgttcctttcaacactttttctagtaacaaagttacatagaaatcttaatcccttaacactccattaaggtttcagatatttcttccttctcccttaactagccctggctagaggaaacaatactgtcttactaatcagggcaaatcaagctctttgtcaatagcagagcccaaatagatactgtggaatgagtttcccctctgtccaggagggaagccaagttgtgtgaccctatagcagtgacaggaggggggtyacagggagtgggtggaaaattgttcttgctcatgcatagaagcagatcagcctttgggtactagttcctctcagctgggtgccttgcccagatgagggtgagcttggtagcctgagaaactgggtatttttcccaggcttctgggtgactgctgccatctttcaatgccatttgaaaagcacctcgaggaaactcctcagtggcatctgaagagcccactggctccaaggggaagaatctgggcaggaacaaaggaagaattttctcccctctgtatgttgcaaggacaatgcaaagtagggttttatgcattcattttatacacagagccaaatggtagcagtttaaaacatgttttgttctgttttgatttggagctccaagtaaattgatttctttactatgtattaccacagaacaaatttaatcacatagataattttctaatatgtaatagtttagaacagggctatgacctcggcaatacgttactcctgaaatgccgtgagtaatagaaccaacttaatttgaaggactacttgtctgaattttcttaaaaactcatcttcttctcatagcaagagacatgcaattctagaatgtaagactggagagatacatagagatcatttagtcaaaccttcttaattctaaggaataatatctggcccaaaagaaaggaggtaacttgtccaagsctatcccttaaaggtgcctgtgtcytggsctcaagcccaagtccttgccatctggggccctttttgggataacatgctgctgaaaagttttttttttttagccattatgttctaatgctttttattatttttctgatgacaaaagtaatgaatgctcattttagaaactcacctattgtcttgtcacccaccgttgaaatgttggtgtatttccttctaggcagttttctgtgctcatcattgtacagaaacaggatgaggctttatataattttgtggacatcttttttcactaaatgtatcatgaacattattccatgtcattgaatattattctttaaaattatttttaataggtgcatggcaatctgtgctaaagatgtgccgtaatacctaataagtctcattgatgaccatttgggaagacaccagatttttaacgctaagatgttgtcttgaacatagctgacaataaatttatgcttatttttgcatgctgtatgacatgcccccttagtatagacatcatagtcattttataatttaggaaattcttagaagaccagagaatatttaaaaccctcaattatttcatttcactagattagttggcttatagttaatgcaaataaaatcagatcacttttaaagaacaaatctgttaagctttgacttggtcaacgatggattaatcattaagttaattagccacatctctattttattagccagctgcaagaagagttagaataatctgccttaacttggcagataagtcctctgccttcacaatgttttttataatgctaataaagcaagtaatactaacagtactaagagtagcagctactgtttattgagagtatacagtataccagctatgtaccaacatcttgataaacattacgcttaattctcacaacatcccactgaagtaggtgctacttttatctccactttataaagggaggaaacctacctcagagaagttaagtaacttgcttgcggtggcacagtgagtaaatggcaaactacagacttgaccccaggcctgcctcacttcaaaacccaagactgtagccaacctctccaaagtgatgctgatgaattcttttttcttagtgactcatattccattattagcagtggttcttgaccttttagggattgcagaaccatttaagagtctgtactgttgcctagaaaatggtgtgcataaaacatgtatacagttttgaattaaattttagagatacatagcctctagcctgcaaacccctacaattgaccagtgaggctcttatacttctggggggctttacaactttccaggcttttggaatcttctgctaaaatgcaaatcttctgctaaaatacaaataaccctgtaagagttagatgaagttacataaccttatgagagaacacatgaagtgcttatcaactaaaattgtgacgttttgtctggagcagaatcttagtaaatagaaactaagattcctggaagcacttcttacaaattttaccttttccccatcttttctatgaccaggcagttctggatgaatcctctaaaagttttagtacctgacactcagtcataactacagcataactctggagctacaatctcatagacaaataattctcaagatagccaatcattacttagtgaattataaagttaagctttatgttctcttccctttaattacagtagattaaaggaatgaaagaaaatcgtttaaatattagtctgtacaaacatgttaaggaaatacaaagaaatctggttcaaaaataataatcatgaatattacaaacccaacacagtggtttgaatgtatcctgtcacttttcccattgctgataaagataattgagggtaaactttttcagtgcaatttgtctgatcatctctgaactctgtgatgttcctgatgatgtttgctttataatttaaacccatagattcatttacccagtatggtatgaaacaagaaaaaaaataataaccttctcgtatttttagaaagatacatctcggatagataagcctgtcactttaacctttccattttggtgtttaaagacagagttcaccagataatacattctcaaaagccatttagaagatgtgctaaataaaatgtccttaatgagcatagaataataatcttttagaggaagtggaagcaaagaaaagaggacagcaggtaaaacattaggcactgcctaacccatatggtttcaagtgatttcttaaaattgaatggctaaaatttaactgctctgtttaccaaaatgtcttgtgaatatattaataagagcgtgatattatgcccccaaaatacaaacaaatacattttcaaataaaaatatttataagtacctatataaaaactaaacctttgtagattctggatattagaacttaaagaaatttacaataaaaaaaccatcaaaaagtaggcaaaggatctgaacagacacttctcaaaagaagacatttatgcagccaacaaacatgaaaaaaagctcatcatcactggtcatccaagaaatgcaaatcaaaaccccaatgagataccatctcacgccagctagaatgacgatcattaaaaagtcaggaaacaacagatgctagagaggatgtggagaaagaggaacgctttcacactgttggtgggggtgtaaattagttcaaccattgtggaagacggtgtggtgattcctcagggatctagagctagaaataccatttgacccagcaatcccattactgggtatatacccaaaggattataaatcattctactgtaaagacacatgcacaggtatgttcattgcagcactactcgcaatagcaaagacttggaaccaaccgaaatgtccatcaatgatagagtggataaagaaaatgtggcacatatacaccatggaatactatgcagtcataaaaaggatgagttcatgtcctttgcagggacatggatgaagctggaaaccatcattctcagcaagctatcacaaactatcgtaggaacagaaaaccaaacaccacatgttctcacttataaatgggagttgaacaagaacacatggacacagggaagggaactcacacacccgggcctgttagggggtgggggcctaaggaagggataacattaggagaaatacctaatgtaggtgacaggttgatgggtgcagcaaacgaccatggcatgtgcatacctatgtaacaaaactgcacgttctgcacatgtaccgcagaacttaaagtataataaataaatatataaatatttataaataaataataaatacataaatatcagaaagtaaaagaggaaaaaactgaaccttgaatttttttcttttagaatatttataatatttaacgtatttgaaggtgaaggccatcctacatggacatctgaagctttagctaagtattatcttttctgtaatgtgactattggtttgcagttcggttcttcttttcgaatagtatgagattaattttctcagtacttaaatcactcctcagttaagttggatgttcatggaggaacattctttccttcaggttgctgatacatttgctgcactgtaggggagggagtgggtatctgagttagtcagttttaccatttataaaatgtttggtggaggaaattgaaactaattgctaaattgttagtaaccagtgcattaactaggaccctactgagtggactgaaagaatcgaaaatgtttaactggttgagaggcaatgatgttgcaaatggggtattcttcaaagctccttctttttttaaatcttcaaaggcaattattctgaatgtaaactacagaccaaattgcagtcttctgtaagcatttcagagattacctcaaatattttttgattaaaaaactcttccgtggtcttttgtgcttcagaactacccagtacaacagggtcttcagcctgctcaggatctctaaagagagctagcacacagtcagccaactttggctgcttcaactcctaggaacaagaaatgatgctgagataatttgtctggcaggtattatcagcccacaatgactgctgtcatttagcctcaaaatgtttatttttccttttacaatgctgtatttctttagaaccttcctattccgagtgtggaccctaggccagccccatagacttcccctggggacttgtcagaaatgcataattttaggccccaccccagacctgttggaccagaatcttcatttaacaagatgcccaggtgattcattcatgtttgagaagctctgctttaaatcactaaagcagttactgagtaattactaccatcatgactctgaagagctcctatagccttcaaatgcrcctaactctactctaaaggcaaatgtcctcactgggaaatctgatctgctgtttcagagaagtgcagggctacacagtgtcttacactcytatctattgatgtttcttggttttgcctggtaatctgctgcttaaatggattatttgatgacatattgatattaaaacagtcctatttttagaaaaaataaaaataggaaagatgaaagcactctgagaaaacacttgcacagataccaaacgtataatattttcagcaatgttctttaaacctgtggtttctgttcgcatgtcactagtttgttgccttttaagacaatgtcagaaaaatccagatttttggtcagctgatgaaaatagtttaaaaagtaggtatgtgtgctgtattttcttatttaggaagacattagattctgaggtcagagtcagactagaagacatatattttctcattcatcttttatgcatctatacctgctaatcaaatgccaagtgttcattttaatggccagaatgttaggaaggatggcctagatcagaagggtctcatggacaaaatgcctttagggatcaagaggataaaagaatttagccagcctggccaggaraaggtgaagggtgagtatagcttgcctaaacaggacagctacccctcagtattgtcctgtggtaatacaggcttagttagggtgactatattgtcttgttttaagaagaaaaaatagaaatcttcatttttgtgtgaaatcttaaggtttttaactattggcaattaaatcaagtttctgtgaattaataatttcttcctccctctcttttttcttcccttctaaatattgtgtagtccaataaagcttaattaggaacacaattaggagaggtttgccaattgatgacaccaaaaagccccaaaccttacaatttacactagttttattctcttttcccctaaactttttctagaatgaaaaaatcagaaattagatagaatcacagttcaccacctttgcctctttactctctacctaagttagatgctaactaatggtacaatgaaactctgaaagagaattattagtaagtttatcttatataataagacagtgtataagatattgtatactatcttatattatcagataagcataagataatacttatcattcagtaagcagtttgtttactatcttayacaagataattaatacttatctttatattttaatttaatatttttaattaaactaatattttaaattttaatttaatgttttaattaatatttttaatatttaatacaagataatacttaccttgtataagatagtatacaaactggttactgaatgataggaagatggttaaacatayttattactatcattcactatcatgtagaaaactctatttcatagtcccatatagtagagaggaacctggttgccttttcaagaatttctatcaggtgacaaccaaaacagattgaatgaatgcatttttataagcttcataaacatttttaactttttttttttttttagacagggtctcacactgtcatccagactggattacagtgttgctatcatggctcactgcagcctccacctcctggggtcaagcaatcctcctgcctcagcctccctagtagctgggattacaggtgtgtgacagaacacccagttaatttttaaaaaattttttttcttagagattaggcctcactatgttgcccaggctggtctcaaactcttgacctcaagcaatactcctgccttggcctcccaaagtgctgggataataggcatgagccatcatgcctggccgaacttatttttaaattctttgggaatctaaaaggactatgtgctttcttttttactggattatgtgagaagataatagtttgcagagaaattcagtgaagcagctgataaaatgctttaaaaatatatttcagagaattgagcaataacagtgatgtcaaaatagtagccccaccttctccagcccacctaaaccaacactgagcatggacacatgcatttcttgtcatcagccagacgaaatggagtagcaaaaatccatcctatatgtcattgagtcttataatacagttctcttttctctgcctattaataaaagaccccactgaatgaagccggaattcttttaggcaatttaaactttctgaaatagaggaaagttggaaaggggcggtagtcaaggaatatagaagtaaaaaatatttttgaggtcaaatgcttatctgaacagattgtctagtctgattatttttaaaagtattatgttgataccagtgttttaatttgaatcaaaagtaatgatttaaccaaagttgtgcttccattattaactcagaaacactaagaaacgaaatcactttttcacttcttatttcccactgatgctgacaaaagaaaacctgagataatcaaagacccacaactaagtaagacctctcaggatctcaaagccaagtgttttacagagaagagaagatagaaaaggcatattatctaggagtggaaaagaattttatgctgaaaatgttgaagagagaattcrwaatcaaattcaacattccacctaggaggcttccatctctgcttaggagctgagtaatggaggtgattggtgtaagtgttcagtacctatgaagacctaactcttgagggagagactccaatgtaaacttcctactcaatactgccttaaaaaaaaaaaaaaaaaaaaaaaaaaaagtaagtccttattcccaaagtgactaatacaaaccaagcactyggtcaagggctactgagggaatgactgcaataaaaagcaatctctgtgtagacttcatccttgtcaattgttagcgactttggtcaagaagatattttggaaaataccattcactactctacattttctatggtgctgttgaaaaataaaaaataaagctttgatctggaaagctctgattctcattctcattatctttgtgatcgtggaaaggatgtttattctttccgagtatgttttctttcctctaaaatcagagactacattatctcttatatcttgtcccatgctaaaattctatacatcttattctaagatttcaacaatatctatagaaaaagacaaaaagactaggaattatgagaagagagagagattataaattctatatgaggaagtttcatctaaaacttatcttctcctatcaaaagcaagttgtagatactcttagttaagccacacctgccttgtaaatgccaaacaggtccattttaaagtgtagtaaaaactacattccattctatttttaaacagctttattgagaatccacatgctatgcaatttacccacttaaagtgcacacaattgagtgatttttagtatattctcagtttgcagctatcaccactattaattttagatcatttttrtcactcccctcaaaaacctcacactcattaacacttgctcctcattccctcctccagctctgggcaacaactaatctactttctgtctgtatgaattatgaattttcctattctggacatctcatgtatatggaataatacaatatgtttgactttttgtgactgatttctttcactaagcataatgttttcaaaggttatccatgtcataccatgtatcgataaaattcatttctttatattgcttaataatattccagatcctttgcctgtttttaaattatcttgcctttttactattgagttttttgtatattcaagatacaagtttcttatcagagatatgatttgcaaaatttttatttcgttttatatttcctcctggaatgcatttttttattgccatgaaagtagagagcgggtgctaagataaaataatacagaggttattttagtttggggaamggggtcaagaaagtaccctgagacacattgaggatttgatgaagctgtcttgagggcgaggagaacactgcaggcagagggagcagcatgtgcaaaggccatgagacaggaatgaatttgctgggtttaaagatgagcaggaaggccagtggaatagaaagatggtaaggtagagaagggtaggagacaaagtctgggaagagggaaggggccggtttacatacaccttagagaccacattaaggagtttgaatttcattcagaaagtagttgagtggttttgtggattttagcagcggaaatggcgtgatccaatataaactttaagatgatcctgctagctgtttcatgaagattgatgtgtgaaaatgaggtagaaacagaaccaagacgaccacttgggagacctttgctgttgctagagtgagcaatgactaaaatcagtgagcttgaactaaaatgagacagtggaaaacgagtaaggtgaatggattggggattatcttggatagagtgtcatggctaaaagtgtgtgttctgaagccagaatgactgggttatagtactaacttcctctcttactagctgtatgaccttgggcaaattaattttcctatgccaccgttaaatgaaaataatcataggagccatgatgtgaagttgttatgaaaatcgaatgagttaataatgctgtatatgcatcacaagagtacctggcacatagtgaatgctttaataacygttgctgctattaattgttttgactactgaaatagacaagagttggtgatggtttggatggagaagaggagggaagtttcaaagacaactgacaggtatccggcttgtgtacaagacacttggtggtgccagtgcctgagatggaggaaactggggagaataagggtttgagaggaaggtcaagaatcttattttggagttgtttgtttggatggatgtgagatatctgagtggagatgtcgggcttcaagtagcatcctgggccagagatagagctggtattcaaattcgaactgaaatatactggagaaatttgcaaaacagcacttaaaaataatttaaccttgtcctggaccagccaacaggatgccagaacaatttaacaagcccagttttcttgggagaggttgcagatatagcaaaaagagtgtggacattgtcatcaagcagaccatcttttgaactttacccctccatttactatttgagtgatcataaatagttacaggtgggttagcaaggaggggtcatggacagcccccacgtttctgcttgagcaccaggtggtttatagcgccggttcctgggttggaggaaagtggaaggaagcatgtttctcggagcctcatctttctcagcagaagattagtaggccttcctcataggtgaggaccaaaggaatgtacatctggcacatactacatgctcagtaatgattttcttggatgacttggacacttctccccttctcaaccctgctgtaagcatctccaccagcctgcttaaatctacccccatttttatgtgaaaatgttggatgggaaccatgaggtgacagaccagggctaggactagggtgagggaagttaggcacgcaccttgggcaccaaacggaagggggtgccaaaaatccaggcaatcacaacaaatattattttaatgcactacttttaaaaatcaaaagtaatgcacaaatacccatggtaaaataaatattaatgtttaaataaagacagaatcagtattaactgatttctcctttcacctcaagatctgtcatttggtgcagtactgggaaaatgtgaaagcttactccccagcccccaagactctttctcatttctcccatagttgttagctaagggctagtcctcagcctcgggcaatctagtcatctctaaatgctaaagacttcagaatgtattctaacacctgtgatactgggcatacttgaggttggggcttaggcccctaccagcccagcccccagtgcttttttatctgttgcaacatagaagttgaagcaaggttccctagttcaccccacgtcagtaaaccaggccctttgacccctggaaatgttgagcaaacacaaagtaaaataacccaatgctctattaaaggctgaggtttaaaggtcagctttgtgcttattggctgcaagtctgattcactccctaaatgactatcagggagatttgtgcttgcaacatggactgaggagatgagcctttccattcagagtggggagctatttgctttataaggagctgtcctcaccaaaaggaaagcagcaggtcaggagcaggtgaaagagaatagaggtccctgaaccaggaatgcttccttctgattttgactctgacttttgaaagctaaaggtacatgtaggccgggcgtggtggctcacgcctgtaatcccagaactttgggaggctgaggcgggtggatcacgaggtcaggaatgtaagaccagcttggctaacatagtgaaaccccatctctactaaaaatacaaaaaaaattagctaggcatggtggcaggcacctgtagtcccagctactcgggaggctgaggcaggagaatcgcttgaatctgggagacagaggttgcagtgagctgagatcgcgccactgcactccagcctgggtgacacagcgagactctgtctcaaaaaaaaaaaaaaaaaaaaaagtacatgtagtggcttgtagctttcagctgtttcccaggaaaatcagaaaatcttcaactgaaatatttggtaatttagacgtcattagtaagtggataataaataattaaggttagacttgtcatagctcatatgtatcacaaggaaatatttatggagttttgagcctgtgggtcacttttcctataacaaaacctgggtgtgggaaaccaaatttttaaaagttatattatttacatatttttatttcaatttgaagaaaaatttgtctaatttttagaatgttttcctgcaaatataacagacttcataatgcacatttatgaaggattctgaaacaatagcaaggaaggagaaagagctgcatggattaatcctgagctgctgcagcacactgactgcatgtcagtggcactttaagattgcaacattttgtttggtgaccttcacaccagttgactgtatgcaccttaatctctctctcaaaaaaaagctgagcctactatagattggcatctttttctttttaaccccagtttttcatttacctacactggtttacctacacctggtttaatttgtacagcagaatgaagttctttattacaaagctcagaaactcgtctttgagtttttaggaacagtaagtacaaaggttgtcatgaattgagactgaaagacctcatagataaattgggtagtacatttttaaagtaaagaataaataacacttcagaaaaatgtagaatacgttcataaatgcacaaatggagataaaatgtcactttttgtaatgaggtttctttcagactttgacactcgtaagtaaatgttcagaggaaataaacgtcagggcatatcagcttttgtgagggttgccaatgtgtaaatgtgaggtctactgtaaatcgtgctgtccatttacctgcctctctgcaggaatttctttttgagtgtgtagtccttatttcccaakaataaatacaaagacttttcagactatgaatacatatcacatggtctctaaggtacagttgtacattatacccgtggaagttttctttcttaaataattaaacgagattttyaattgtataaaataagaatcttaaatattaagttatgatgctttctttaagagtgtctagtttccttccttctctctcccttcttccctctgtttacttcccggctaactcccctcctttcttccttctccccttcctccttcttccytcctttccttccttcctcattaattcttaaaatgttcatttgaatgcttagatgytagattgtctcatttctgcctctatgattattgcttataaatcaaagcagtaagtcccactaaaaacttaagagccaagttagtatcttcttttttagcgtcctattattcactcaaacttaatcttctttttttcccattattacaagttattactaaaactagcacagaaaagcttttcactatatcgcctcctttgaattaagatagtctcacatatatagtatttagggaaaagataaggctaatattctttggaccggcttccctattttgaaaaaatcttccctcacatccctaaaccatacagacaagcattatgcagaaaaccattaacatgactttcagttttcaagagagaaagtcaaaaattccacagaaaattagagctgttggactaaatgttggtctattaataagcaggaagaacaatttagctgttttccctgctgagttaatatatagtactgctgtctttcctgcagcggtattctccagctgggttacttggttctgggaatttcctctcaaaatgcccatttctgtcaaccagccatcagacctgcctgaggatagttgatatgacagtggtgtgacatattgaatattaatatgaaagtgaccttccctgctgtcagaaatgggtcatatatatgtgaaatccatgaaaatagatgagaacagatttaaaataaggaacactccttatattggtatacagtgttcaccatgcttgtactgaaatatggctgtaagtagcttgccttcaagaatttttaataatcatttctgaagaactgattttccctttcatactttgtctttcattggccaactttaaatcaccctctaactagccacatggctgcccatcactccctctgtcaaattcagaattctgcctttgccttcaaactcaagccattcctgctttgacttccttctgtcttacatctgtccttgaccttattttggctgttttgtttgccattctctaaattcrcatctttctggcctgcttttgcatgggcttctctgtcatttatttttaactagtggcatagagtccttccctgtcatctgctggcttgtgttcttactctccaaagccagtggcaggggttttctttctcagaaaaggcatttctctgtttaaatattagttttcatacccagaacttgctgactcttgaacatttaatgtacatttagccaaacaacctgaatctgttataaatgtgcaaagaccaagttttatatttttatatgttttgtaataacctcatgacaggtacttaaygggttgtgtttatgttcagagaatgaacttttaggttgtcaagatgggaggtatacaagtctttttaataaagacccctagctaaaggctgcttctctagccgatggaacaaaccaggacaaggcctgcttatctgtgtattgtagctttcctaattgatagcaagtgcctctgaaaaaatgtttacatagttatctaaagtaatcattaattaccaacattgtacatttcattctggttaacctcttttggtatcattacttttctcagagttgagcagtaatcatttttacaatggagacttttaaaagattttttaaaaatagcattttgatccctgaattgcgtttctatgtgattatgctgattttttcatatatgcgagtcttttttaaagttaagttatacttacatccttaatgataaatcgccagtgaaaaccaagagaactcaagagagtctgaccatttctgtacttggaatgtgtcaggggtcagtgctctgcaaatggcacatgtggaaagaaggattcataattcagtggtcacccaactgtatcataagagtttgaactataaagaaataagtagttgcttcttgctgaccaacaagatcgctacaggtttcaaagaaagaaagaattcgtcatcaagggcaggaaggtacttcataaataattaccaaatgaagtggtcgtgatgactagcgctctctttccttgaaacctgtagcaatcttggtggtcagcaagaggcaactacttttctctttatagttcaaactcctccgataccatttgggtgatcactaaattatgaaaccttcattccccatctcctcccatttgcagagcactgacccctgacacattttatggaccaaaatggtcaggctttctcgagttctcttggctttcattggggatttattatctaatgtctactcaccccttcccctccaggactcagatcatagagttttgctatatagtactttaaatttccattaagcttgaaatcattcatttcaaagaagagggtcatggtgcccctgattatatacaggataaatagaaataaagatatccctgtgtcatcatgaaaatgaacagctggcaattgaacttattaatatattaacaggacacgatgaaacaaaggtattccctctgagatcaaaccctcccattactgcaaagaagggtgtagcatgagaaagttctctcctaggttcactgcaggttcacttagacctgtttgacttgttgagattattttaagctcaggagttaatttttttaaatggctaagcctagttcatcattacagagtacaaaatattcaatcatacttaagggttgttggggttttctcatggtaatgcattataattgataacattcattaattgcttcgaatttcttcctaattaaattttaaaaataaatgcataactgctctttgaaatttgattgatttgacttaaaaactaattggaaaggggaatctgtgcctcctaattttataattaaaatatatgttgctaaatagttttcatctacttctattttttaattccttcatttcttataaaaatggaggctatatttgcataactgtgtccccggtaatgatgggagactgggaagttgcaaaaaatactttgcaaggacaacaactatcttgactcttctgcctatttccttgtaaagatctctgtgattatttgggcccacccaaatattgcaggataagctccctgtctcaagatccttacctcaatcacatgtgtaagtattgctataggaagtaacttattcacaagtttcaggataaagctatggacatctctgaggaccatgattcagccgcccactctcacattatatttcccagaaccatagagagcaccccacaaagatttgctgaatattgttgagtgatcaaatgatatggtttcaataaagctccatgaattatacttgtgaagaacaaatagacttctgatgtcactgtcacagtaggcattgcaggaattttcaaaagtatatttctttcttttttttttttttttgagaaagatctttccaatgtagatagtgtatggaatgacaatttagcagcagcagaatgcacytttgcagaaacacacaaacacacataactcctttgacaataacccagcatactgacctctctccaaacctgctttcttttttgttgtggccagactttgagtggaaggaaaggagattggcagaggtgagcaggaagaggccagagctgaaggaggagagaagaaattagccaggtttgatagagagatggcttctgggacaattcttttcagaggccaaggtggctgatgagccacttgctccactcatttccctgtgagatcatgsagtaaaattagaggaacataaaaggcgaaggcttccttacatccttagaaggtcatgaccagtgtgtccagcttctgatttctcatgacaatattgtttttattctttaataaattttattctgatattcagtgtataaaataaaaattgcctaccttagtattcagagatagctgctgtaacattttggcatattttcttccagtttttttctctgcatatatggttacatcacagaatcacaattatggtctagacaaagttttatatcttacttatgttcacttgactaggaaaattttctcatgacattaaatatttttcaaaacatgattattcaatgactgtataatattgcacttttggatgtacgtctatggttgaatgtttatgcttctgcctagaatgaatgatayggccttgaatagttttgcattacatcttttttcaccttcttaattgtttctattggacagttcctaggagaggcaatcaaagggcatggacgtttttatgattcttcatcgatgtggccaaagatattaatttacacacctactctctgtgtcgtgactatttctcctcacattcaacagcattaagcattagttttttaaaaaaaattttaaaaattttgaatgcttattggataattataaggatttttggtaacttgttgatctgtgttctttgcccatttatccattgagatgttaatattttgcttatgaactacctttgcgtgttatgtctctggaaattatttttccagtttggtgtttgccttttgagtattctgctctctgatatataaatgtgtttcacctttgctactccagtcaaatctactattactctctgacacatttcactacctttatgtttagaaattattttgctaggctcaatagctgataaataaccacctgtattttacataatcctttattattttattttaaaatttaacataacatttatctgtctttattttaacatatagtatgagatagcaacatacattttaaattattcaaatagttaattcaatgccatttattaaataagtgctcttttcttcactgactttttgattaaatctatcttttaattggtatatacatttctgtatctgggctctctatttctgtaaccatctattaattattgtagcagaaccatattatagtttatatatcccattataatttgtattatagcctgtttctgacatggtggcccctaactctttcatttttctgtattttaaatttattttagcagttattgtctcagcattctttaaggtgagtattggaattaattttcaaatttaaaaaatcttggaccgggcacggtgcctcatgcctgtaatcccagcactttgggacgctgaggaaggtggatcacttgaggtcaggagttcaagccagcctgaccaacatggtgaaaccccatctccactaaaaatacaaaattagccaggcayggtggcacacgcctgtatccagctacttgagaggctcgaacccggaaggcacgaggttgcagtgagccgagatcatgccattgcactctggcctgggcaacaagagcgaaactccatctcaaaaaacaaaacaaaacttgttgtactttgtatagaattatgtgcaaattatgaattattttggaaaagtttgcatcttcacaattttcaataatttcaaaatatctctttttcaagtcttatgtgatatgacaaaaaaatcatttatttgtagaggtcctgcattctttttaaggttattcctaggtattagatactttttatttaattatttttgagattatttaagatactgttttctaattggtggttactgttatatgaaagctattgcttttagtattttgtcttttgattctgtttgttaatgataattatttttcacttagttctcctgagttttatttataaacaattatattataatcaaaaaatgattctatcatctttccaaataatgtatctcttctttgttgattatgtcctataacattagccagaatttccacagcaaagttcaaaatactcactggcattctactcttatcttgtttctgattttaacagctatttatttgatgatagatttttttctaaccatgttaaagaaatttttttgcattcctaatatgctgagaatttttaaaattaaaaaaatgggttttggaatactataaaatgccttttggatgattttggtaaattatcatccatgaggagaatataatatggaagccagagtatgggatttatggccagacagagctggagtcaaattatacctcctcctcttagaattgtgtaacattaagcaatttatttattcccttccaatttcagtctcttactctgtaatatgaagataatcatgtaaatatcttgtgaggatattatgagtatccagtaagaattatttataatgtgtttaacaccagacttgatatggagtatcatagtttcttttgaattattgcataagttttgcctttgatctattaaaatggtgcactataattacagatttcctaatatttaatcatctttttattcttggaccaaagcctacttggccctgatgaaatgttttcttaacttactgctgtattccatatttgtttgagattattgtatcaattttcctaatgatttggtctttagttgaatttttatgctatcttattagttttgatatcaaaawtatgtaaactttatgtaatgattagaaagattttatcattttctgtgttctgcacctatggaaattatattttcatgggcaatttttttttctctgaaattctctgtatcgggattattttttgaaccagataatacttttataacttttaaagatttttgctgttgttgtttctatttgttgttgtcagattgttttctctaatcaattcatctattcagtgtttctacttctatttgtggcaattttggtaattmatattatacctaaaaattgtccttctgtcagtatcgtttgtttgtttgagatggaatctcactctgttgccaggctggagtgctggtgtgatctcggctcattgcaatctctgcctcccaggttcaagcaattctcctgcctcagcctcccaaatagctggggttacaggcacatgacaccacacccagctaatttttgtatttttagtacagacggagtttcaccattgttggccaggatggtctcgatctcctgacctagtgatccacccgcctcggcctcccagaatgctgggattatagacgtgagccaccgtgcccagcaccttacttctgtgacatgatcttgtagttattattccttagttttctgtttttgtttttgtttttttwttttttttgagacggagtttcactcttgttgcccaggctggagtacaatggcacgatctcggctcaccgcaacctctgcctcccaggttcaagcaattctcctgcgtcagcctcccragtagctgggattacaggcatgcgccactacacctggctacttttgtattttttagtagagaagggtttctccatgttggtcaggctggtctcgagctcccgacctcaggtgatctgcccgccttggcctcccaaagtgctgggattacaggcgtgagccactgcgcctggctagaccttagttttaaaatatttttgaccctgccacctcaaaagtagtaattgttaatcagcaatcacatattgagtgcctcaagggtcacccttacaagagtagtaagtgcctatttttttccaagactgcgaactgttgcagaatattctacctggattcatatcccagctccaccactaacaacctgtgtaaactccaacaagttacttgaattttctgtgccgtggtttcctcatccgattgtgaggatatgaagctctgagatcagtgccttgcctggcatataataagtagcttatagatagtattattattacatttaaaaataaacactgtggttgctcttgaggatacaaggtatagacacagttgtgaatggaaaactcaaagacaaattgaacactgaagcactttttacttgtaatgtttggagggctttccagcctttagaagcacaggagtccctgaaaaaaggatactacaggtatttaaagaaaaaaaaaatttagcccacaaagttacagttaatctgttcagaatcctcattggtgaaaaagtggcagttctcacatgcttatcctacctgggtggatcctcacrtatctgcagatatctgtattccaaagtcagagataaagatttttttcttgggggagccagcaacttacagggaaggggctcaagtcttttaaaaatgtttttggatggggagactagagtgagatagggttttctgttttggaaggagtctctaatgatgcaaaaatatttttgtttcatctgtcattggtatgtgaagggcacacttaatcacaagggcaacagggcaaggtgtagtcttgctttctcacagtggtcgtgtaggcaagcgggatgggtaaactataaacagaatcaactgtatatatggattatgctatgttttacatttattgcctcggttcattcaataatactctctccaagtgccatgcttcctagaatactttcttaaccactattacttataacattttcttgtacctccccaaagggagaagcatctgttaatgtgcctccattgctttcagaataatattcaaactacatagcagggcacaaaagacctctccaggtccctcctctaccacagttcctcactatgcctcagccacgttaagtccttgtgacaggtggaattctgggatggctccaaagattcctacccaatcgtgtacacactgtctctaatctcctctctttgcttggcctggacctgtgaatatgataatcacgcccttgactgctttacttagtataggactccattttagcagaatgaagagtgtttcccctactggccttgaggagcaaattgccatacagtggaaaaagccacatggcatagaatggtaggtggcctttaggaactgagaacagccctcagcttgcagccagccagcaaaagtagggatctttttcctgcaattgcaaagaactgaactccaccaacaaccagtgaggttaggagaccccaagccatagctgagtttgcagcttcagctaacaccttgatttcagcctggtgagatcctgaacaaagggctgaactaacttgagcctggactcctgacccatggaaactgtgaaataacttttggtcttttaagctgttaatttggtaggaatttgtcatgcagcaatagataactaatttagtcatttagtctcttgyattctcttatctcagatcacctgtttccctcagtacaatttgtattccatgtgtccctatccagagctcagtcatcatccctttcaccccctcagacttgtcaacttactctacatgggaaaaaaatcatctttttattctgaaattatattctatatacctagaatatacctagaatgacctctgagtcattctgrcctttgtctccttggattatttttatttgtaaaactgctcctggttttatattctgtttttatattctaataaatgcatgtgactacaaatattttataatttattttgtattcttcacaacttagtatatcaaaatacatatctgaagaaatgtattgatcataacattgaggctgcgtcttgaaaaaggcatgaatcaaactgtgtgcatgctagaatggctcctgtgtggggctggtctctaatggtgggctatgaggatccactcttagccccatcaaggtactgttttctatcaatgattttgatgagggtatagatagtatatgtgtcaacattatgattgacatgaaacctggaagcatggcacatactttgagtaacagaattactacctggagagaccatttcaaattggaatgatggaacaaggttaagttttaattgaacaagtatgaaagcctatacttaagtttaaaaaaatcaatctagaaactaaagttggggtgagacagacagcacatgcgaatatatatagatttgttatttacgacttagtttaaatcagtggcataatggatcatatagtagagtttatttaaatcatgaagttaattttagactgcattaattgaactgctgtgtcccaaacaaaaaggataatcctcctttgatctatgtgggtcacatgactcctgggtagttctgggcacctccttaaatggggtcatggacaaactggaatttcttcattgggtagggaccagatgggcaaacagatttgcaatcatgtcctacatggtggaacaatctgaactgtggctctttcacctgtagaagagaaggtatttaatatctaaaaattagacctatttttcatcactttggtgaatggaaatgataaggaaatagagttttactttattaaagttaccaacatgtagttaatagcaaaatagagtgggttgcctttgggagttattgaccccattctccttgagatgtacaaatagaaatttggatggaggaaaacagaattgtgaagtcttttgcgtgtgttgtcacaaggaggtagtgattgactgaaaggcatcaacaaatatagagactctaaagtttcattaagtgtaaagaatatagaaayatatggatatggttttgtaaagtaggggataatacaacagatcccagacagaggatcccatgccatagttctcgtgagagggcgtccggctctgaattagaccacctacctggagttcagctcctgtaggtgtgagaagaagcctatagtagatgctgttagtgccccacccaggcccccttaacagggctagtccccttgccctccagctgctgcagttgttggctgtcatatcctcttatctgcaccaccctctggaggattgcccttgacaatgacatctacctcatccagacaatgacatctacctcatctacctcatgcctgggaggttacagcctccatgccacaggacagcccttgaccagttaccacctgatgctgaggtacaacagctcaggccccttgcctctgtgcagaatgacctctgagtgayttacaccccagagctccctgtgggatcagactagacttctaaaaccacatctttgtcttttcccctgccctcccttgcttcccttactccctcatgtgtttccattaagagcctgatttgcctaggaattgttctctcaggctttgcttgtggggatccttacctaagacactgccttttccttgtttagggggacttctgatctctgtccttctactgctgtacttctgtccttctacctgacaggggcttctaccttctcatctactctcttaccgagggccagtaactggataagagggtagagggccaagataccactcctttataactaagtaaagaagtaattttgccaggagcatcccccagcaggcttcagttttctgttctgtctaaggatgtctccagcaacactggaacagatgccccctgagggccctccccactccaacatcaatgatcccgtggatctcataatgccattttattctttaaagaaagaatgcatgtgcacacacacacacacacacacacacacacacacacacctttttgttctctctgacaatggcattactacatgactcttatggagataaaaagataggcgtcatctcatatctagcaacagtgttctaggggcttttcaggttagaaaaacatgaagatcagttggtgtccatctctttttctctttttaacygctctatgtttctgcttctttattcttctctctagatgtctttcttgtaatgggcacctggctgacccatataaggtggcatgtgggaatgcaggtggagaagcttggtgtggaggatgacggcctggtttgggagcctagatcaatgtgcttcattctggactctggaatgaagccgggtagccatgtaaccttccattcatttcacctttcttaatctcaattgtatgtataaagtgaaataataataaaataaaaaaaaaattgtgcctgccccacctaactgtcagtctcatgaagaccaaatgagatagtgcatctgaaggcatattaggaaagtataaagcccttgaaaaacatgagagattactcagctaagatattaagatgccgtcctgcttgtgaagagcttgcaaaatagtaggagagctgagacataaacacaaataaaaattatttaaggtgggggatgatctgtgtcatcagggaggtatagagttgtataggagttcagagaagggaaaacccatttcctgctgggtaaatttagtttttgagcccaaaagtgtgttcattttcttccctgtatctcctttctggcttgtcatacatagacaggaggatccttgaataaatccagaaaagtaacaaagatctgttacccacctttttttccagcaaacttttttgttaatatataatagttgtgcatatttttgtacatgtggtcttttgatacgtgtgtacagtgtgtaatgattaaatcagggtgattagtatatccattgctacagacattttttctttgggttggaaacattccagttctcttctagctattttgaaatgtacagtcaattgttaactatagtctccttactgtactttcgagtgctagactttattccttccatctaactgtatttttgtacccattaaccaacttctcttcatcttccccctacccttctcagcctctgggaaccaccaatctgctgtcttcctccatgagatacacttttgtaactcccacatatgagtgagaacatgcaatatttgtctttctatgggtgggttatttcacttaacgcaatgacctccaattctgttccatattgctgcaaatgagaggatttcatgtttttggctgaataatatttcattatatatatatatacatttcgttatatatatacatttcattatatataatataataatatttcattatatgtatgtrtatatatatacacacacacattttwatgatatatatatgatatatatatacacatttttatgataatggagaaaagtgccaggtccatgcacatttgattgatgcagggactggatgatctcttttgcgtcaaccctctgcaatgagacttaagggtttccatttcctaaagtggattttactacattggccagacctgagaactgggatgtttctatctgcacctaattctgtcagcattgattagctgattctttgatcatcatgtgaagagattcacattattatatatcacacagaagaagagaacctttcctggtaaatgagaagtgctcagagcatttcgaagaagcttggcccaggtggttagatgtacgtgatcttccaggccaccccaccggggaataacgtgtgctctatgcatagaaatgcattcctcagaatctatgttcaagggcagtgcaagaatgtgaaatgtagaatgtgttctggtaacttgaattattttcgacggtcaggctcagaggaaagctaaaaagcactcattgctcttgttaaacttcccatttactcaagcagatacactttttcgaacttgagaaagagaagtgtgtgtgcatttgtgtgtgtgtgtgtgcatactatctatatattttaagaaacctgaactttgagttctgactccgtctttcatgatcaagtcgtgcatcgaggcgtgtcttgtttactgctgtgcgtttgtaaactgggtcatccttttctgagactatgaggaatgtagagtggtgtatgtagttcttatgttcccttacagtgctgggctttcctctctgtaactcagtctcttgccagtattccttcttctgttatttttttttttcttttccttagaaaggcagtatctctttggatctcccttaggtattccctaccatgagaaaagcacagcttcctgcacttgcccccagatatatactatacattgttataccagtgttatttctttcctctctttttccttaaacagaaattttattgttttctgactcaccctgaggtctcagtacgtaagtgtcatttttaattctctcccaatccccactttctcccacgactgctctgaagggcacatttaatgattattgtgtgtataagcatttatgtacttttttgctttctctagtcacttaagcggcaattaatttctacttcagtgaaagagaatgaattatactgaggcctaatcatctattctttctaaacagtttggaagggccgcggagggggaggccaacgttgcatctgcatgtgtgcatattgctgcgtgctttggtttcattcctgggcccacattactcattgtttcctatcttgccttttcaatactttggggactgatttggttttaagttgttgagtgggggtggctagagccaggctctgccttctggcattgtgggaatatgggaaagcttccattccctttggtttcatgtagcaaatatacccatactttgtacaaggcacgtgtcaaatgtcgtgagaggtatctcatcaagttagggagaggggaagtgttcacctccacatggggatgctcagggccctggggggtttggatgtggctctgtggtgcccatttctgtcctttacctaccrgaccatattgccacatttggcacagcagctgatctgcacctccatgtccatctttcygcatctgctttctctgacatcatcctttttaatctcctgtgtccctctgcctacgcatttcctgtctgcttccttgccttactttgcccaagtggttcttttctctagggttctgattttctctttgccttctatctacccgctcagtttagtgtctgtggtcccaacctttgttctgtcttcctccatccttgtttttcatggcatggccagtgatgctgccatacacctaatcagccaagctggaagcctccaggtccttatagaccttgtctctccaacaaccacttggttttcaatgaaggcagctccagttcaacacctccctcttttcactctgacagcccctctcccagacctcaattattgccacatactggatacctctaccagattttacctattttcttaaaaaatccaatctgaacatgccccattcctcatgatagttgtctctttaattgctgaatgctacacagtaaaattccgatgaccagtatggcaagcacagactgatagcagctgaccttagcatcatcttcaattagtgtctatttcctccccatgacatgccaaacacagtaacttcttcttttagaggaagcctctctgcatttgcactcatcattctttttccccraaatgtccttcttgttttctccagctagtaaagatgtcctcttctttcaagacsctcttgtgaaggaagttttgagggttgcttcatattgaagtagcactttctctgtatgtcaactgagtgctgtctgagtctctatcacaacatcccaccctatgctgagttcaaatcagtaggaatgtttgcatttaaagaataatttatggatggcaaagccttttcacagtcattctctccatggtgagttggagaaagtggagatatgaaagagagcttgtgctcaacattactttggtgtctgttctattctggtcatgtttgattcctatgtactgttatctacacctttagcaacaaggaaagtgtgtcaaacgttctgccacttaggaggataagagccttggcagaacacttagtgaggatggccagtcaaccctgttcttgaaagcaactgccttgaattaaaaacagaaggctccaaggcaaatctatatggacccttaaagcgaggattttttgccaagaacatcatttgtaaaacaccgaatatattttttaaacataaatttaagctgagaactgctagtcctctcttcatcttcctttttttaaagcatggaattaggactgcctggttaatcagtgcccaaagtaaagataacctaggagcagttggcactagagaattcagacactagctacaagataaaccatcagagaggaacaagagggtggacttagaaagcatktattggactacctaagtaagcacataatctttgcattttagagctggaacaatcaagcctctaattatagctgagggatagaggcctagagaagtcgagcagctgtcaggaccctcagcgttatggctgtgaattccttactcccatccagggtcttttccccatgtcattaatgtacatggagtatcaaaacaccttatgagggaaataactgagggcagtcactgaattgcgaggctgaatcttcattttgagaaaataaggtcgatgataatagtaatagaagccaagaactttttactggtttatttcatttgatccccacaaaacccctatgagatggtgaattcatttcctgttgctgctgtaacaaattaccactagcttagttgcttaaaacaacacaaatgtattattttacagttctggaggtcagacgtcagaaatgagtttcacagagctgaagtcaaagggtctgcagaactaattcctcatggaggctctgagagaaggatccatttccttgcctttttcagcttctagtggccacacatctccttgattttttggcttctccctccattttagaaagtgcgtcactctaatctatgcttccatcatcacataatctcctttgcctctgacccctcctgcatcctttttataaggaattttatgaccatactgggccaccagataatccagcataatcttctcatcagaaaatccttaactacatttgcaaagtccctttgcaagataacatattcacaggttccagggattaggacttgaacagatttgggaggtcattatttaacccactacagataggtattgttattattcccattttacagctgaagaaactgtggctttgagagattaagtaaattccacagagttasgtagttattgagaagcagagtcattcattctttatctstggaactgagttagtagaaataaaaaataaatgatataactgaattcaagataaacattatatcattagatatttttagaccaaaaatatactaagcctgcggtctgaattataaaatataaaccattataggaaaaatggaaattctaaacattcttaaagggtaacattctctcatagctctaggaaattgttggrctgtaataggccaccacccagaatcagtcatccaactagctgttgtgagctgatattttaattttcaaaccttaaatcagcctcagtacatttctatccattggcagtggggagccactctatatgcagtataaagctaaaattttaaaaaaatttcacagcatttctttttaatttctgaagttagctatcacagttctcctaatctcttctctcagttgaatatctcaaattcaagttcacttagccattcgtgtgaartggattttcaacaccccagtgtctacattaactttcccgggaagctctttattttttcaaatacttctcataaaatatatttccaagaattgaacatgctattgcagatatagctttagtgctgaatatggtgagaggttcccctctcttaactagaaggtgtatgtacctctgtaaccttgccctactgatatagaattaatggaawattagacagactagcccatttccagaaasaatccaattttaagctgtatgttgactcataacccatttgaaatacagagaaagaagcaaaatatttctttacaccttaggttgcctgccagtkcctacatagctttggtggggttaaggaggcctgccttccttggtctctctctttttcttttctttccttaacttgttttatgtatgaataaatgtacatcttataacgtatatgtaggctatgaagcttggtaatggaataaatcccccatgaagccaacactcattttaggaagtagaatattaccaataatgttgatattaaatatgtagtattcctccctgatcctatctcctgcctccctattatcaattttctgtttatcatttggatgagttttagctgtactacatatgtgcgtatatcttcctaaacaatatattctaaaatttggcttgtctgtgggttttataaaaatggtascatgtcatatatatgttcctacaacttgcttttctcattcatatttgtatttctaagatgtattcatccagaatataaagctagaatttttccattttccactgctgtataatactctgctaggcaatatatcactttgttctgtgtagtctgtgtagacttttgggttatttcctctttgcagagtttactgccagtgatttgctattacaaataaagctactgtgaatttccttccatgtgtctttggttcatgttgagttaagtttttctagcagtagaattgctggatcagagggtaaatatgttctttattaggtaactcaaatgtatttttcaaaatggttgaactggtcaacactccctccaagaagtggtgcattaggcttctttttgctccacatccttgctaacatttggtaatgtcaggcttttaaattttgtccatctaaaatgtaccttactgtgatctgaaaaagcatgttttgatttctaatgaggttcgacatcttttcctatctgtctttaccattgatgcttcctttttttggttaaatactgttcatgtcttcacccacttctcttttgattcatagtaattataaatgtgtgtgtgtgtgtgtgtgtgtgtgtgtgtgtgtagagagagagagagagagagactgatcctttgtcatttttaggtgttgcaaagttctcccaatttttggcttactatttcactttatggaatttttttaaatgaacatatgttattttcattggcagtcttataaactttatttgacagccagtggttagatctcacccacactgactgtaraattttaaggtgatgactggtacgcaggtaaccagtgcatgagtttgtttggtgaatcttcattctgactgcattttctggacaactgcacatggttacagtatggaacattctttattcctttgsctcagacagttttgttgagcctggcatcaatgcacacatctggagtactttctcctttatggcaaatttctttgagtgctcaaggggcacacttcttaaagcccactccctggatgcccttgtaaatgttgatgatgtattcttgggtcaccaccttgttaaaggcaaaatagctcttcttctcaccattattgtttgtgggagtcattcttctaggacttaattttaatgtagtcaaatttgtcaatttcttcttttatggttagtaatttttcaacttttcttaagaaattctcttctttctagtctatattttctttctttcttttaggacttaaatgtcttttttaaagatttcactgaagtaaatatatacacatataactcactatctttarcattttaggtatagagttcagtggtaataaatttatattctttaaaaatgttgtctttacgtttaagcatatatttcatctggaatggattcttgtgttatatggcatgaggtagggatctgattccatttttctcatatgaaaaacaattgtgctagcataacttactgagcagtctatgagttcccctttgatcttcaatgcaaagcctctcataaatgaagctttcacatatgaagctgcttttggtctatgtcatggaacactttgtctatttctatttccatacctcatgcttgatttactttctctcttttgttttctattctttagacttcctctaaggatcctggatatttcatttcatactttgcttatgtcccaggtcagccagttcctgaggatcatcctgataaactccacaatgggtcactaacagggccacttcttgctcatggtaatttctccttatagcacttgctagtacatgatatagtcctcatcatcaccaggatgacagtgaataatgggagtgaagaggacaaacatgttctgttactctttctctaagatcctactgacaatttttttttcaactttgccaccataccactctgtcaacttaaattttttattttaaactgctgtcatcctgtctccccaaaccctgcatcctgtaatttctaactaagttttggatattcagtgcagtactttatagtttcttctgtaaatttcatctgagtccgggcacagtggctcatgcctgtaatcccagcacagcactttggaaggccgaggcaggaggatcactttgaggccaggagtttaagatcagcctgggcaacatagtaaggccctgtctctacaaaaataattacacaaataaattccatctgatttgtttttgcccatttgttcagattcattttgaaacatgattatgtcaactatctacaaccattcaattgtgatgataattctctcgtcttcacccaaatcaataaattttttgacaggacagagctcaatgggagatttctacataccatttcctcaagtgacattgattaattaattaactattgtccaattcattcattcattctttgtcattcatgccatattctacagtcttaccctgaggatatcttgtaagactttgtcaaataccttgctgaaatagggatatgatgcaaccttgcatatatgcatataacttacatataatatatgttatattacatatatatatcaaggtgaatatatttaatatattgatatatatgtatatgtaatataacatatagtatatatgtcaaataccacatatcatatatcacatatttatgtctcctccccaactctgtgctacctcttcttgaatacctcataattttcttttaatagtactcataaaccatgtattaaaatgtaacttatagaattaggggttttatggctattttatgggatattgttttccaaacctacgtttctcccctcactgccccagctccttcttttgataatcaagaaaaaatttaattttcttatatatcaaaacaattatttattgcttgtttgttttttcccattatttctgaagatccaatgcatctgagcctagagacttaaacatatatatgtgcttacttttttttttttggcttaccttcaatcttcttattttttcagtttcctactaaaatgaaccatttaaggtatcttttttgcagtttggagagtattcttcttgatgaaaattacaaaagaaacaaggagagacattgtttctcttcctctttgtctaatgctaacattgcaccatctggctcaagctgtgggtctagcctttcctgttcttcttgcctcgaacataaccaaaaacgcattttgataagctcagcattttctctgcagctttagctcatcttttgctcctgctttattgatgttatcctgatatctgatcatgatgctgacaaacaaattgggctaggaagagttttaaaaacttgccaccasmtggtgaaactgaaccttaaacaaacagcaacactgctggtaacactggcaagttccactgagcgcttattcccaaaaggcaaatgggggctaagagacaggcttgatcacttgcaatggaaatacatatgagctctgtgcacaatgttgctatcatacagcaaagaacattctttagccaatctctgtaggatggctctgaaatagcatctgtgcctgagaatarcaacactgtccaatgtgtcaatgttcagtgcttagcttaatgccaggcacatagtaggtactcaataatattttgtttattgacagcaggargacaatgcatgttgtaggagaggaaaaagattaattccttccagtcacatgaagactgaagcttagtatatggatttaatttttcatattatctttggactgatttgatatattttactttaaagacttaccactttgatccacagggaaccattagtggtgaaaacatggaatatgcttcttggaaaatgcattgcttcaacagattaaaggcacataagctggagcaaktatgcaaaccttcctagtttgaactaaaaagaaaagaaacaaaggaaggaattaatggaaattttcaaatctaagtctcttctgatatttcaaggaaaacctcaggaagtgaatcaagaaagaataagactaaccaaatcttcttggttaaagatactgtgatactatgattcaagttcaaacatccaagaaaggaatctactattttctttttaacattagttattaaaactgtcttaatactctctattagcttacaggaaagttaaaatatgagtcaatatatgatgtactacagggttttacagaaataaagttatttaacaactatctcaatattgtgtgtaataatctctaaatttgctcaagtagttttggaaatagtcatggcataaatgataggttaatttatcaattttctgcttatttgtatggattctatatctcactattcatatttgctaagcatccattcaaattaagacccttttttggttataaaaagcacacaatcatatgagctacgttaactggttactagctggaagggagaggtttacctcagtcacagatccaacttcagtgcagggtttgctatttttaatcacagaacttagaagcttaattcagttaaaaagagaggaagttgtcaagggagggttgctaaaagttcatgctaaatttgcttagaaccagattgtgttcattaatatttatacatctatggttgggaaggggtgattgtgcttctttaaaaacactgggtattcattttccatgtatggcacagccttctgattagggaaggtgggttttcattgtacaatcaatggagatacagatggaaaccatctggcgcctcatcccctttttgtcaaaaaccttgtcttgtctctcacatgtcaatgatgaatggaaggatttcaaactctagctgaacaatgcagtttgaatccctcagctagccaaggggtttttggcaagcatcgatgagcttaatattttaaagaaaccagcaatcattttaattcattagttgaagcctgttgttctagacagtgtttttgatttgtattttgggcactggctttgtttttgattcacaagcgtattccatatgggtatattttcttttatacagtgtaaatcatggggataaaagtgggagtttcatctgataaaatgaccaaaatgctgagagattcttttaattatcttttgcattaattatgattcatattaagtgttaagaccaaaaattttcttgtgagctagtacagagcatgaatcagagaacacagaatttagttaacccagctatagacaattaatctaaaaatcaattcagtgttctgctttgtgagaggaaacgacataaacctgtcttagagcatctcgggtacactatttttatrgcttgtctgctgaaggtgggtttctaggatggaagcaaaaaaatcgattcacatggctagctttgcagtcattattcagctaacaaaagccagattggttttcctgcccttcacatttaataaaatgaggtgaatcaccaaaaaagyaagttgatgctggagccttattcagaaactcatttccagagtatgtcctgggtttggtagagattcaacccaattttatataactaccaatattgtrgtggcccctatagcagttatagtccctaccagtgacatttgtgagggactgtggttaagaaaggacataacataaagttattttatttaattataatgattactgtgcttattacctgccagctactcttctaaatgccagatagattatcgataggtagctatatggatgacaggtgaacaggtatcatggatagatagacacatagatagataggtaggtaaataggttttacttatttaatccttacaaccaccctgataggtaagttatattattttcatcattatacaggtaaagaaagtaaggaccagagggattaagaactttgccaagacaatagctattaaatggtagagtgggaattcaaatccagaaaggctctgaaatctgtgtgcttaactcttacacttatcgtttctcatagtcatcatatgaggtagaggttatttttgttatttctgtttgaaagatgaggaaaccaaagcactgagaggttaaattacttgccccagtctaggttgtccaactggtagcctgtagagccaggacttgggctttctgtgtctcattctctttgcacaatggaaaatttagaataatcccccrtaggcaccacaagatctctaataatcagagaaggactaaattttgttcagcatagctcaggcctaggaaaggaaaatggatactgattgttgccagatttgcaatagtgtaatccaaccaaattatttatagttcttattaataataaattgaaattaactcattctgatattactcaattgagtatttatgatatttttcttacctccaattgttggtaaaagtaatccttaatatataaggagcatttacaattcaataggaaaaaaaggtgcgtactcacatttttttaaaaatggacaaataatgagaataaagaaatacaaataggcattaaacaaaaacacaatggcaaaaagatttaacttcattaaagaaaaaccctatgaagtcatccttgtattaaattgacaaagattaaacaaactagtaatatatagcaagaactgtggtacaaaagaattggcattctcatcccttgctaagggtgcagttttttttaaggacaatttgtcaacgtgcatcactagccactgtatgctttgatccagcaataccacatcttgaaaactgatcccaagaatggcatcatggatgtaaacaattttaaaataattaataggaacattatttataaaatcaaaaattataatcaactgataaaggatggattaaataaattatggcatatttatataatggaatataagtctacaccaaaaatatgatatgttgatatgtacaaatattatattaaatagtagcatgtaaaagatgcagtgtgtgaaatagaagattaagaagtttatttaacagtatgcaaaatttgatcttttcttgtaaaaaccaaatttatatcaaatgttaataacattgcaaagtaggagttttttattctttctgcttttctaattaaaacacaataaaagtgaattaaagaatcagaaataaaacaatgcatttacttttttgaagttttgctactaggcttttacaattttttaaaaaacaagataccttgacaaggagagagagaagaattctaggctgtgaaaatttatgtagatattgaggaacagtgaaggtacatggagtcagcccttataattcttatcatgtagcacagtacttctcaaactgtagcctgtggcaggatcacctggaggctgggccccaccccctaccctagactttctgattcagtaggtctgggtggaaccaaagaattttcatttccagtaagttctccagatattgccaatgctgcttactaaggaaccccactttgagaaccactgccatagaaacttaccatggctttgccatttgcctcggttataaaactattgatgcttggaattcaatcctagggattatttcaaagcccacactctttcaacaatgttttcggtcttagctaggtattagaatcctatggagtatttttttaaaatcctgttgcctgatgtccgccccagaacaattaactgaaacctctggaaggtgggcggagggtgggtagacgggcgggaatgaaaggattccaaatgcttctagcagccaatcatggttgaaaacttttgtccaccaaaaccctttcaagctactattctaatatttatttcagaaattaaaaagctgtactaatttcagaaattaaaaaactgaagtcctcttcttaagttaactgaactataaatgctttgatgattctcagtaaccaagcagatagtttagtaaaatgattctccattgacatgcttaatatgtccctggaaagcacgtttataaaaatttctctatttaaatatcttgtcttctgctgggttggaacagagaattttcctctgagaaccttttgtggtgaaataagtaaaggttttcagtagatcatatataccttggtattcattttttcttttagaaagaaaccaaattcaataaatagatggccataaaaagtactgattaacataattacccataatcatgttacaccagatatagtacacagacaattgtatagtactattgctgtccttggaattgctcaggactaacctgatattcatgtctgcttcacatataaggcattagtctgacacataaatgaacagtggcgctcaacatcacatgtatgtcaagaatgagtgttgaagggcattgaataagttgccaccttctgaacaagttgtgtttcaaatttgcattgtagattaattcttgggaatgcagagtttacttgtctatggaaataatagttgtgctttccactttaaaaaaaaaaaatctcagtgctgggagactgggagccaggagaaactgacagcagagtagggttttctcaccaattctccctttctttacctcagaagtgttctctcatccttccccatctacttcagttatctattgttatataacaaaccatcccaaaacttagtggcttcagataatgatgatttattacttcttacaattctrtgggtcaggacttcaggtaggattggccaggcaggttttgcttcattggtcattgattgggggtcaccgactcaggcttattctgctggtggctgggctgtgatagaagccccaagaaggacttacttagttatatggtgagctggtgcttctcatgtggcccactgcgtagctagttttggctttctcacagcttggtggttttaggttagtcagccctttacacagaagctggcttcaaaaaggaaacttccagtcctctctcaagcctggggataagaagtcccaagatccagaacatcacttcctccacattctgttggtcaaagttacatggctaccctagatttaaaagggaggagaaatagacccctcttttcaagagggggtggcatgtgcatatagggaaggaaaaaattgatggtggccatctttggagattattttctatgtcaccccttcattgttggattctggaggaggttgatgtaaggcctgaactttccagagtagaaccaccaatatggtcatgtccccacaagtaagttcagcagaggccagggaggtgaagaatcttcagcagcagctgaaaaaagtgaatgcacattcgccacgcacatctgtcttttagctcccattttgccagaaatggaaatctaagctttcatctgaggaggaaattgaggagagtggctgtatcaggattagacttagctgggaatatcagaaatccaaaataaagggaagtaaaagggagtttattttcctcatgtaaagttcagaggcaggcagtgcagggctgacatggctttttccactcacctccacctccaaaacagggttggaaaatgacaactctcccataattattgcaccaatgaaatacatgtcccaagtccagatgaccacaattccttcttagtgggtcttttactctgggagattatccatccaggatactaagtttctcaaatgaccacttttaatggaaactgtgataacatagcacaggctttgtgaacaattagatagaatctcaaactttaacatttttcccaagctcctcaagcctatttaaatgtaaaatgagttatttactactttgtccaatttccctttgtttttgaaaactacatgaaattatttgtatagtcattgttggttgaagtagtaaagcaattatgcacaggaatagatgagacagacacataaatgctactttaaccacattcttgttgatggggaaaaaggaacactagactaggaatcagattagcatgcgccttggagcaaatcactaaatgtcttggaaacttcatctcttcacctgtaaaatggagatgataacgtaatctgcagacagggtgctttagaggaagggatcattaaatgagatgatgatgcaaatrtattagaaaacaaattgccactacaagctacagatattttacytccattaatttcattaatagcatcatcatcattttaygttgtaataaaggcaattcactatgcttagttctgaagtgtccatgcattaaaataatcaatgatggagattctgtccattttgcatgcttttctctctgggcatgggtgccttggcagggtcctgggtggcacgtcctgtggaaactgtcatacatacaacctattggattagtaaagcctgaagacttgggagatgtataagggaaagaaagacaagaaagacactataatgacagccaacacataagtcctcagtgctagggccctgggttagtactttttcctgctttaatctcttttcacctacaccagagccctatgaagaaagtgttattattagactcctacaagccttaaagaggttttttttttttaatgtgacttttattttaggttcaggggtacatgtgcaggtttattacataggtaaacttctgccacgggggtttgttgtaaagattatttcatcacccaggtagtaagcctagtacccattagttatttttcctgatcctctccatcctcccaccctacaccctccaataggcccactgtctattgttcccctctatgtgtccacatgctctcatcatttagctcccacttataagtcagacatcaagtatttgattttccattcctgccttagtttgctaaggataatagcctccagctccatccatcttcctgcaaaagatatgacctcattcttttttatggctgcatagtattccatggtgtatatgtaccacgttttctttttccagtctatgattgatgggcatttaggttgatttcatgtctttgctattgtgaatagtgctgcaatgaacatacatgtgcatgtgtctttatgacagaatgatttatattccttctggtatatacctagtgatagaattgctgagttgagtggtatttctgtttttaggtctttgggaaatcaccacaatttcttccacaatggttgtagtaatttacattcccaccgacagtgcatgtgttccttttactctgcaaccttgccagcatcagttattttttgactttttaataatagccattctgacaggtgtgagatggtgtctcattgtggtttcgttttgaatttctctaatgatcagtgatgttgagctttttttcatatgcttgttggccatatgtatgtctccttttgaaaaatgtctgttcatgtcctttgctcactttttaaagaggtttctgaggtgtggaagtttcatagaaagtagaatagctgaggttgaatctaacacacttctcaccctgtgctgctacttcaagtgctcaccatgaacttcagcactgactaaacaaagccacagagaagattagagagcattcattccagagataatcccaccgccagggctggactacgtggacatgtgtcctgggtagttcttcaaaagggccccatgctgagttgactgctctgctggttccatcttgaagtccttaattgcttctgagcaaatggccccatatttttgtttttcactggacctcacaaatattgctggtcctgggagacactgaggtaacatgtgtaagagaaaaagaaagaaggagctaacatttgctaagcactatgacatgccaggcataaatttatgtcatttttatacccattaactaatttcacttctaggaaaactctgcaagataaataagttcatcgctttatagataaacaggttctcagagaggccaagtaacttgcatcggttacacagctgggaagaggtggagcctcgattcagggccttcagtgctcttattcttttaacccctccagactgtgccatggttgagataataaatacctactcttcctgggggtattataatgaggcaattttctacctctgcagaaatacattaaatattattaaaggcatatagtttacaataatgtagagttgctgtctgcaaaacttatttctggttgagacagacctaatgaaagattctcaaagatagaagatgtgatatataaatatgaccaagttatttcagaattactggacaaaggactatgcaatgttatttttataagctaattgcagattgcatcaaggttcttaaatctctgcagagcaatgaactcggagtccagagaactgaattctatttttaactttagataaccttggctaagtcatttggcttctctgagtctcaaataggaatcaaaaggggaagatccaaagccatagtaaaaaggtttttatcataaatgaaycctaaatagaattttttaatgcccagggcaggaagcctagattggctttccatctggagagaggtccttaagtaagaggaaggataggaatgagaatagaggagggatcttttatctcaataccctgaaagttctttgcttggccaattttctcacctgtccatgggcctttagctgtctgcctccagtagctagggtcgctgacctgggatagcattgagcctgccaccaagctgcagagatagtacagggtactcagtgagaagggaggaaaggagaaagctctaaattttgccaatattcccaatatttctcaatttcttttgctttctttttatctcgatgccctatgggcaaagacccagtggccatgtcctagctattgctctaagattgattaggagtggtttcacagtcatgggtctatgctgagctgacaagaatgcccatgatttattagtgatgtctgtcatgggcactgcaggtatggggggtgatagatgtgcctcatatctcgtctattagatattcaccattcctagattaaggtagtctttccagaaatatttgtgggatgactgaacagccattactgtaagtgttaaatttgttgtamctatgaggaaaaaaatgtagtcccaaaagttagctaagaagtttccagctaattgagggcattgccctatgtacatgaaaaacatttatatttctgttgatttcttagcatgtggatcacagaatatttgtattagaattacataataagctctgttaaactacagattcctgggcctcaccctacttatttacaacatctttggagggtaaggcctaggaatctgcattttcacaaatgtccttagtgattggggatgaaggtgtgcatgtgaagtgggagaaccattgctttataagactgggtaagaaaaattatattttttaaatcggcaatattttcatttaccatatcataatctaaactaggaatgagcaccagttttcaaatggtgttggaattcagtaggggtttgtaaaatacaaatagtttgattaaataaattcttcagtgttaagtgggggtggaggtctacataaacaaaacttgggacctagataaaccaagcttaaggacaaaaaaaaaaagtcttttaaaagtcttatggtcatagcttattcaaccaagtaacactaggcaaggttacagaaatacaggtttttttttttttaatccctatacccttgacatgtgaatgtgcacatgaatgtgcaaaccatgaaaggggaacagggttgcagactgctataacaagagctgaaaggttgaaaggtagaatcgactttaagcaagggtcatcttctgggagataattaaacaacactaagttgatatgggaggaggagggaaggaaaaaagattatgagaagtatttagaaggccttagaagaggtactccaactcaaacaaatagtcacatgagagaaggacagtattgttgaaagcacataggcttttggcctggcaacctgggtttgaatgtgactctgccacttgactagtcctctgactgattacaggtaatgactgaattacttaattcctctaaatccccgtttcctcatttgtgaatctggataaggatagaacttactcaaccagtggcacaagtggtgatgagaattaagaaggaaaacaaatataaagtgctggcatgcgacaagctctcaatgacatttgtgggagagaagtcaaagctagaatgactttctcttttgaagtatagctaatcaatatagttattccaatgtggaatcattttcttatgagagcgtgtgcgaagttcaccaaggctcagttgcttatacctgaggaatgccttattaaccctagacttactaatacgctaacattatatcagtgatgatgagatatcattagagaaggcacattccaaggtcatcatacatcaatcgtcctaaaaggtccttgataaagaaataactaaatccctagtgacatatcttgcaaacacagtagttggaaactgtttcctaagtttcttatcttcaatgatattttaaaattaagaagtcaaagacttaagtactgtttgtgggagttctggaattagaagcccagacaggaacagtgtattgtggcactgacagcctggcctttcttatttattttacattattagcgtgttctctcaagcctacttgcataaatacacaattatatgtatttaatgaattcactcttaaacagctgtagaaaatgtgctttactaataggggggcatccagtcagataaagcagtcataacgcgttgcgcgcgcgtgtgtgtgtgtgtgtgtgtgtgtgtgtgttggtttaaaatttcatgagtcaatggaggataaatatgcataaatgaaatatatatttaaaagctgccttttgagcctgtaaaagctacttttctttctgacacaaaagaaatatctgctttcttatataaagagaattattggacaaattgagtccatgttcacaaacattaacgtctaaagcaaagcagttagaaataaactctatctagtctattgagtctcaaaattcagcccattatccaactggggagctttttacagtgcagattcctgggctcaccttaggagattgattctgtgagtctggagcagggcctagaaatctgcatttttagcagcccaaagtgactctgatccaagtgctctaagtatcagaatttcagaaactgcattttatcccttctagcctgaaaggttcattcagggatagaacgaggttaataggttgctcgattaatacagaattggagcagaggaatagactgttctgaagggagaatcctatatgaaaccaaaagcagcacctattaaacaactggattagtcttttataaatagagcgctttatgcattggacagactccaaggaaagcaaacagattcttgcccttgttcctcctttttaatcccctttactgttcattagtacttcatcctacaagtacagttcctgaaaagcagctcccagtgaagtttaggagtcacttggagcccttgaagatatcttcatcccatcagcgagccatttacacatattgccctggagaacgcttctactggctactgtattctattctgtgtgccttcctgatagcggatactggctactctggattcaagtatctcttcttctaaacttgtatccctgtgtcttttgttgtatctactccttacaggtccttgactccatatgaaagcacttaggggaaaaaaaattaaaagtacgtttatataaggcagtattattaacatactttttatttgcctcaaggtcattgacgtgaaatttcacaattgcactcttgaatatacaacataattatattatgtaacaactcttctgaaatagtttggatttcaaatttccattccatgagcaccatgaatacatattcatacttgttggatcatgagtctagattagtggttcagaaactaaagtcattaagcattaactgggtccgtcatacaaaatccaatagagttcacttattaagtatcaactgagtctgtctggatctgtatcaactcagtaagttcactaagttaggatactagccattcagtatttccatagcaaaaaggcacaagatacttgaataatgtttgaactctataattctactaccattgttccagactgctggaatcccttaatttgaaataaataattatttttatggttctttgagaatggcagtcctttaataccttatagtttggatttcttgaaatattttttttctcaactacatgtgccgttgaattcattaaaaaattgttcagtaacagtccttaacaaaagtagcttctgtggtgttgacaaccatgccttttcctttgaaataaaaacaagtatttatccaaaactaggcagaaacagttaacttgattagagagcactaaatttattgtagagtcaatcctgcaaaatcaaaaggggatagattccttatggactgcttgcctgataagatttttaccctgtttgcaagctaacaaattagcttatctcatttcataaatgatggcagaaagaatgatattccttggatcagatatgaaggagagtttgttagtcacagcaatagcagtagctggagtatcagcattttcctatgcctgttccctgagtcccaattcccacaaggtaatgcacagagatccagggaacacctgtacatgcagcaagttgcattactggaagggaccctgagcttaccaaacctgaatcttttataatgggatgtttaagtatgccttgcctttgatgcagcaagagactgtctctacccttcaagtttcttcagtatacatttttggaaagctactctggaacaaaggcagtcagaacctctattcacaagatgtgcagaaacttgaaagaccggtggaaacttgcccaccaaaaatgccatggaaaatactgtgtttttgaacacattaacttgagccttttagagatgagtttcagctaatgccgtttcattttagacattttatttattagaaaatagacagattttctaggaaatcactttttctaccagaatgggtaccatttgttaaggttactaataatacagtattcatgcaaatatttgtttttctttattttcctcctaatataatgcatctctctccagaatacagctgaagagatgttttatattttacccctttaagtgatcatttagtataggaattacgtggctgttgcagatttaggtattctaaaagacaaaattcaaaactgaattctctgggaacattgaagcatatcctgaagcggcaatatttttgtttgtatatttttaaaaatatcttgtaatttggctatgtccggatggctaaggaaaatattttacttaactttttttttggcctgaattatcacacaagtgtttaagcatattttcccttgattgtattgtagagcttttaacacatagatatgttctgtttatttaacatgcctggaaggactcaggaaggagaaccaataaatacgttcttaccattaactttgggcttctgccgaattgactttgtcaagtaaatttgacatgcttaacactgggagtgattatttaccatcttctgaattaatataaagaattcacagtcagatttttgttcttgcaaacagacttttctctttaaaaagatgtgttttcatggctgcatattatgtttcagttatgcaatgtctttcctgaattccctctttgcaccagtgccattgctattagggtgaagttgatggaatgcactgtttccatttgcttatacaagtgaattgctactctctatatatctatttgaaacataactgaaaatgcaaatatactatggaggtccaatttttaaaatatggagtcacgctcaattaacagtaacaaacttgtgtgannnnnnnnnnnnnnnnnnnnnnnnnnnnnnnnnnnnnnnnnnnnnnnnnnnnnnnnnnnnnnnnnnnnnnnnnnnnnnnnnnnnnnnnnnnnnnnnnnnnnnnnnnnnnnnnnnnnnnnnnnnnnnnnnnnnnnnnnnnnnnnnnnnnnnnnnnnnnnnnnnnnnnnnnnnnnnnnnnnnnnnnnnnnnnnnnnnnnnnnnnnnnnnnnnnnnnnnnnnnnnnnnnnnnnnnnnnnnnnnnnnnnnnnnnnnnnnnnnnnnnnnnnnnnnnnnnnnnnnnnnnnnntaccctagaacttaaagtatcataaaaaaaatcagagatgaaaaagaaaaaaaaagttaataggtcaatgtttttaatttcaattgtgaatattaagactgttattgagtggcatttggatttctttatttttctaaatatatgtggcaaatgctgctgccaatacttaaatataaacatattctccctttttttaatccccaaagaatttaccatatagaattctttgaagaggattagaatgtggacatatttttggggagaccacccttcagcccactacacctatcctgagcaactttttaacctcatattgtaacacaagaatgttttcattttattaaaattctttgcaaatatcttttcaaatggtccttaacatttgctggatgcatcacaatgatcacttcaactattgttgaacataagaaattgactatttaaaataatattgcagtaaacatttttgtgtataaagctgttcttccatattttgagattgtttcctccttaatttttagaagtgagttcagtgggccagagggttgtaccaacttacaatccacctataatgtaagaaagcctctttaactgctcctttgtatttaaagttttttttggtaaattgataagtggaaaatggtatattatttaaatttgtatttcctagagcattaatacaattagatttttttctcacatattttaaatggaatattattcatttttaaaattttctgtgtcctctgaccaattatctattggctaatgctttttaaaaatatcttaataatcttgtatgaactttaaattgtaaaaatagtgacttttaaatttgtgccgtaaatgtttttctgagttggtggtttgctcttgaatttgataatttgtgataatttgataatttggagtttggacaaatgtaaatatcccttttcatttatgttgggatgctttactgaggttttcctttgtatttctcccacttgacacagtaggagaatatgagaaaatcttcctatatttggagagccagtgcatttaattttctcctagctttgtttggtaactctttaatccatctgtacttttattttgatacatgaagagaagtgagataactttttccaaacttttcccaagctcctaaacagttatctcaaaatcattattattgagtaatccatctctttactgttgatttgtgatgacttctttrtaattttttaaagcttctcatataaactggggtttatttggaagacatgtattttatcacatctatctatttttggccaatatgagagactaaaattattgaaattttaagctatgttttaatatataagcaaatcaggtcatgaagttctcatttgtctctaaatcagataagacttttgtttaaataaaatgctgtcatccatgttataaaagcaaattagctagcatatggattatcttgccaataattaatatcagcctttattgctataaattagcactaatattttttaataactcataatggagtactctatacatgtcatgtttatatctttccctctcctgcacctatcctatctccaaattcattgctaaataatatactgtatttagaaacgtcctgaaaacttgatttgacacaaactctttcagggtgctgatttctttctccctcagccacagtaatgacccgatgctactcagctgatcagatccctgcattctgatttggttatttagatcagggtttctcaaccttggcactgttgatatatggggttaaataattctctgttgtatcctacacattgtaggatgcttagtaacatcccccactagtttccagtagcaccatcctctttctccatccccatccccacccctagtgtgacaaccaaaaaatgttcccagatattgccaaatgtctcttgtgggacaaaactgtccccactgagagttattgattcagataaaagtagtcaggcagcatgtagcgtaataaatttaacttttattcatttattattattatttataatattagtaatacaatcagggtagatctcgagccttccaattaattgcacaatggtccactatcattgggctcacaaaaattaaccccagggcattctgctttgccatgtgatttaaatatgaccatagtaagaacagtgacattatgattgctcaaagtaaaacatctcagagatctcttttggctcacctgtccctacttaacctatgttgatggtaaatttgaaaagttgtcgatttgataaccatattggtacatgcaaatgaattatgccctgaattttaatctaatattttttgatattgagaaaatggcccaaattttaagaccgtcattctatgaatcatcttgcctttgactttagcatataaccatggctgtctgagccagttagctcagaggggttttacaagatgataatgaggccaatgttgcagtttcaattagcttcacagaagaaaaagccagcttcacagcagcagactgcactgctaaccccagccaccacactcagccaatggtcaaaagaaagaggagaacagagaatgttgccgactcagcactcccaggaccatttagcctggacaagtaaaggtcatatctctttgatgatgatgaaccatccgcattatattcctacaccaattcactgcagaaacacataatgaagagtactctctaaatcagagctccctttatagccaacatagatcattcaggcaaagacttttttgttaaaaattttgttgtgaattaacaaataggatagctgcagttttagaaggtatttaaataacttttactttgcttttgaatttgcagtattaaccatgcatttgaagtaagtacattttgtccactcatgaaattatttcctaatagttcacttaaaggaatgggtcaaatgagcataaatttgcctgccattatgtaaatataatggctcatcaggtaattttcttcattgaaatgggaagacttgtataagtgttgaaatggagaytgaattttacttgcatttaaaatttgttttttattgtcaaaggggtatttacagggatccctgggacaaattttcctaatattaatgtatgtgttatacaaaatgtagccaccttggaaatacggctctctgcatctattttttattccaaagattgtactcaattctgcttttggaatatttgcatttttgctgctgacctactgcatggaattcaatggagacccatgaaactaggccaatttggtttatagtctcaatttcagaatgaagacacatttgcttctttctatttacccctggtctttgaattttgatcatactcatccaatcccaagccacattttcccagtagggagcttctggaggttaatattatttttctaatgattttcctttctcactgctttctaaatttttcttctggcttatcaagaaaggcataggaattttaccagcagtgttggtagtatattctggtaatgaatagatattcagtttcaggctcttctattcaaaatgtattcatcaaaatgcaatcaactttcatagcctatggagaaaatagcttttagaaattggcatttacctcacctcatcaaaggtctgcttaacacattgaaataatctgaatgaatagcaataggtaaaccagacagattgagccttgaatgcaggaatgtctacagatatttccatggactgtttcttacccagtgagttcaggaacatatggaatcctggctttcaggggtattttttacattattttctacagttgtagctgcatgggtaccacattttcccaactgcttgtttgttagtattgtgttcagaatctcttgtttcaaaatgcatgatgttctcctctttttaaaaatcctaatatttttcaagtgtttctgtgtgtcaggcactgtgctaagcactttcatggattagttcatttaattcatttaattttacagtggccatatggcatacactagctactgtaattctccttgtacagctaaggaaactgaggggtagaagttagtcagaggcccaggataatacagctgatactaacacatgacagagccagaatgtgacttagttctgtatgaatccagagcccatattcttaactgctatgctatattgcctcccagaagtcattatcacaaagggtttgcattattttttatttccaataataacataattttatttgttcatcatacttgatttaaaacaaataaaaatgatacccaaatatctttcatatcaaccaaaccaagactcctatagagtggagcctgtctgtgcaaatttaacttacagtggggcctttatctttagttttcatgcgtttaaatctgtagtcagggattggttcatgttttgagtcatcgtatttcactccctatgacatttcgggtacctaaaacatgttcactgatgttttgaagaatggaatttccaccacttcctttagaagactataaataaaaaatgatagaaagtgtcaaactgtaattacattgagggttttagtaacctcataaaccataagaatgaaataccaaaaaatttttttcaactgccaccatcaaaatctcatttgctgattccatttttgcagcattgatggaagtaatccagttaggctgacatttttatagagtatagtttaatgttcaaataagccctgtgttatttcaccatttttatttttttatggaaaggattttttttcttctgtaatgatttgaactgtgttataaagtaaatgaaaatgtgtcttgttggttggattgtgactccagcagacacattttagttgatgtaaaggtctttgccataatcacagttgatgtttacaaatacacacctcctttaatttttaatgctgattgtatttcttaatgcatctaatcacagaaaatctgtcaaaaaggaaagctttggtctcaaacatatgcttgggtttctgttagcagraaacaaatgtccaaatatgattgcataccagctcacacacatgctcatgcacgtgctcacacttgyactcaagtatggatccaagtgtgaacctggtgacatagtggcacttagagccaaatactaaacatatgtcgaaatttggtgtgatcacaacagcagaatggtacaatattgtttcattcattctgatgcaggaagagaagccaaatgacagcaaatcatgaaacaaatgttactcccttctcagagtgttatgtctgaataattgagtgaaaaataagaccaatttgtttcagtctgattttcttgtcattggtaaattgatggatatatttctattcacttctaagagaaaataagctgacaaacctttaatggttgagacatgttagataaaactgctggtatttgatggtttctgccctatagatcaaaatatgtctatcattcatcaaaaaatagtattagcaaattcagttgttcaatctgacagaatgtttattgtattcattttctccttttaatatttatttctagctgtactttttaaaagatggcatactttttaatcatatgaaaaggcataactttaaagatggacctcattcatacgaataacttgtttatgagtcaaatattttcgatatattttatccatgaattccctcatgagtgctcaagatagagcagttgatcgtcactagcaaatttcaccaaagatgagaattacaattatttctgtatcctttggtaccttggctaatagacaagagtaaagagaaaagtaaatggtggccaaatgataactcctctaagaaatcctcctataccatgctaggaagttacaaagagacaaaatggcacatcagttcatagaatgaaaatgcctttgagattatccaacgcaacagttctcaatgacccagtaagagggtctagattcatatgaataggttgccatgagcagcaaggtctcttgtatgcaatttgtttctaatgttcaaagtactgaaatcagctaattatttcattcttttacaaattaaaatggatttgaaattatccttttaaaaatgtcacactaactcactagaattgcaaatcataaagaagtgcagtgtcagctggtaggtctggtattatatacacatcccctgaaaatatgtttgggaatgaatcgcgcatgaaaatatatgggtgatatttcttaccggaaaaaaaaaatgtttgcaatctgtggatctaggcacctcccacaacctttcccaggatcagcagcaattgcggaattcataaacagaaagttgacacgtacatggaatcagcaaagggtcgtattcctgagggacatttctccagggcatggtggggcctggagaaatgcctatgccatcgctagaggacacgtttttcataactggatgcttctagctcttgagctctgtgttttcttcttgtggacagtgcccaatacccactgccaaagtttgttttctcagttcagtttatctaaagtggccatgccccagaagttgaccttttctttctttggatgtgctaatatcatggattaagctccataattggtcttggtccagtggctattcccatagacctagaagtgttaacttaattagctcaattgcaggagaaccttattcttttacatattcacctgttatgtagatggttggatggcacttcactgttgccccacttaccaagaaattaaaatctaaatctgattccaattgttttgttgctgttttcaactgcatgattgtgatgtctctctctattatttagtggagtacatttataccaaatctcatttttaatcttattttatgtatctcactttgttatttataatttgcctaagtatatcatcttaacagctctaaactattctagggatagaaaaacatgtgactatctcaatttcttttttttttaagagtacaagcaaacctaacaaagatgataccaaacccttataaatcaaactcacaagttaaaaaaattccaagtaaaattctggcaaatttagtcttgcagacattataaacaataacaaaccatgaccacaagagcggattcttaaaaatgcaagaaatttttactactagagaaatctgctgttacwatagatgctatcaataggttaaatgagaaaatttctatcatttttataggtgaccaaagtacttgatttaatataattgctgataaaaactcttaatgtaacaaacatagaaggttaattakttttaaaagattcttttttaaaagattaaatatccacttaattataaaattctctatatatttcaaaatgagaaataagaaggaatataaattaatgataatttttctcaaaagtctagcaaatataatgacaaggaaaaaaggtcatgtgattagggaagtgaaacaaatctccatttgtctgtactgaaaatttaaaagaatcaactgaaaaaagctattaaaactgtcaagcatttaatatagtatctacttaaaaatcaaagtgtacttgttagtcataatcaattagaaaataaacaaaaaacacatatcacattagcaactctaaaatagaaaataactaggactaaatayaaaaagaaatttataagaccactttaaaatatatataaaataatttggaagatgacatttaataagaaaatattctatactaattgacagaaagaatcaatattttagaaatataaatctccccaaagtaatccaacaatttaatgcaactgaaataaaaattactgggygattcgttcagtaatgtgacaaaatactttaaaaattcatgtggaagaaaaaaaagcaaaatagtcaatgaattattaaagtaatcaatgttccaaaaaggttaagaataattatatcaaaagaaaagacttgatcaagttgctacataatatacaaagctgtatacaatgaaaaaaactgtaaacaaaattaaatggctacaaatgcaatgggaaaacatctacaagacataatttttaaatatataaagtagtattacaaatatgtagtaaagacactggattcctatgaatccaatagaccaaaggcccacaaactttttctgtaaagggcaaatagttaatacttttgattttgcaggtgccacagtctattttgctactrctaaactctgtccttgtaattcaaaagcggccatagacagtctgtaaacaaacagtcatgactgtgttacagtaaaactttatttgtgaaaataggaagtggtccaaatttggcccacagaatatagcgtgccaacgcctgcaatagacctgtgacatgtttgctgcctatattccagatacacttaaaagcaagcatgctcaacatgaggcttgttgagaaacaggatgctcaacaaatatatgctgaatgaacaagtgaataaataaaagaaaacaacccacgaaaacagaaactaaagtcaccagtaaacatataaaattgttcaaactcacacagtgaaagaggcaaattaaaatcatgataaaacatttggttactcttggattcacaaggtctgcttgttttttctttaatgatcattcttaggtttggtaaggttatagactaatgcatagcctcatatgctgctggtaggcttttttacttttattttagttatatacataaataagaaattaattaattagaaaataatataaggagatctagaactcctatcttctgattcctcttttctccctaaccttttaatttattaattcatttacccattcaagcaaatacttgacacaatatcaaggcccagctgtactctgaagnnnnnnnnnnnnnnnnnnnncatagcctcatatgctgctggtaggcttttttacttttattttagttatatacataaataagcaaattaattaattagaaaataatataaggagatctgtctagccctggattggcagtcctcaaattatttgatcttattcttaaaaattgttgagaactccaaagaaattgtgtttattaatgtttctaatgtttctttaccacattagaaattacaagagaaacatttaaaatatttgttaattcatttaaagtagtaataataaattctttatatgttgccataaataacatttttcatgacaatagttaaatttttgcaaaggaaaaataacaaaaacaaaaaatgattgagaagagcagcattgtttacaattttgcatgtctggcctaatagaagtcaactgaattctcatatctattctcattttgctttcattctattgtggtatgcttttttgttgaagtatgtgaagaaaattaatccgcaaacagttatggcattgtaaaaaggaagagtattttattagccttttatgataagtgtgaaaattctgctttgatactacaccaaaactcaacaagttgtagattcttcaaggacagttgcaatatggagtttgaaaccctatcactgaactttttgtaccctgttacattaaaatccatttgtttatcttgcactttcaatggatcttttactcatgcatgattttgtaataccatgcattgatttaaaaatattggttcactgagttatgcagatcttccagatgtagacacatttcattatatagtacaatattcaggattctatttattacatctccacagatctgagtaaagtctttaactatgggaatctatcaagcccacgatggtatatatgaattttccaaaattctaattttcatttgaaagcttgaattttatcattggcgacaaatactttcagttgtttttgttgaagtgacagactctttattcacttttgagaaaaagtgaaacacccaagtctgaaaatcaaagtttgtttctcagtgactctttcaagaaaaactaaattatgttatatgaagaaagcaggtagttcagcttacagttaatcagtcacacaagtgcttttcctcaagacaaccctcaaacttctatctgcaacagcagtgccatatgtatacttgccctttcgtcacttggaaaattttgtgcttaatggttgagatttaattaaaataatttttactgtttaatcaaggacatttttaagtggaactggcttattttgtttttctgcaattgtatggtgcgagacatataatgactacgtgttcaggtgctgccgctaccttgattcgtgccacagatttactccttactgcttttaccaacagtgcaaatgtcaacacagtgaaaaagtaatgccttagtagtattatgaaaataattttggcctcacagatatcctacaagaggcttggagtcccccagaatttctcggatacattgagaactgtgtcctagatttgagaaatgttaacgttttatcttatttgctccaaaattgtttgttaataaaattaatattatggatccagctaaaactcctacatctcttccctagtctccttttgcagagattaaccgttatgttgaagtaagagtattctttctgtacrtgattttgtacttcccctatgtatgtaaagatccacaacagtatatttttattttgttttgaaaaaattttacataaatgattccattctgtatgtatgcttttaccaagattttttcactcaatgttatgacattctgtttttcagagatctatgttgttatgtakagatctagctcatatatttttcttgctgtgtgacaaatgtatgaatttattgctgtgtgacaaatatatgaattcctggattaacgaatatttagattgtttccaaatttttactattttaaatatttctttaaataaggtcactctaggtgatcaattgttctatctatattgtcaagttgtctccaacatggctttatcaatttacagcatggtgtggttctaacctggtactgtctttctggagataatttggcagtgcgtatcaaatacttcataaaaaggcggagttgacatttctgggtcaaaaattataagagttgaccataatggtcatttggccatcattatttataaaactgagaacctggataacagcttctagatgtttaatgataggtaattagttaaataaatggtagtatcttttagttgatgataatgtagtcattgtatatcctaattgtgtttaattgatacattttatattttatcaaaatgagtgataggaaattttaattttcttctttgtgttttttattttctacttttgttattgaggaaatatgttgttaccaaaaaaaaaaaaaaaaaaaggaagaaagaagrgttggtgaatattttgaaacctcwtcccaaattaagtgtcaaatcagaccaaaaaagtagaacagcagttcccaaatttgacagtgcacagatgcattagagagcttgtggcaacccctcaaggtgttgatttggtcagattggggatcaatgacaccctgaaatgcataaacctcacatattaagaaatactaatttagaaactaatttgatctgatatgcctacattgatgaaccataaggagtcttgtaattttcaatattctgcaggcaaaagaatcaaacagtggctggggaaaagttctactggtgcctctccttgtgtcggccaaagctgagggcaggagcctctgtaacatcctgatggtggggttgggggcagagctctgttttctaaaaacctgtcccagactttactttcttctccttggcttaatctgcctcagactttgctttcttttccttggctttggcagcctgccctgtagcagacaaggtaaagcctgcaggtggtagctcaggtgttcatcctcagttctctcccagccctctttcttctctaacacctgggccacttcctctattgagcagagcttctcaaatttgtgcatcagaatctttgggtgagcttttttaaacacatatttatccccctaccctagagcctcttattctgtaggtctgacaaggagccagaaatctgcatctaaaataaactcccaagtgttagggaaactgctggtccagggaccacactgaagtagcgcaaatcagactcactgtggagagccagcctgggacacaagggggttgagtcataaaatgttattcactgcaatttagaaatgcagtaagaacactaaacttaaaactatatcctcattaggaggctaggcagagttattgatagacgtggaagcagtagcagtaacagcattgctagtagtagtggtaatccttagaaagcaataataataaaagacctagtgataatagtaaaatcaataacgaaataaaataaataactagggagtatttttcctcccatgttttgacaaagctcttgaacatgagataatcttttgaatgcaaaaaaagtctctttaaatggatatattacattttcagtgaaagcaaggtctttaaaaacatgccagaccttatgatccagaaaaagctgtttcttttcctcctgcagggtattatttatctttggctaatagctttagcccagccatttttatagcctcacatgttatcaaaagtgtttttattgcttaatctaactactccctttctcaacctagtgcattaatcgtgcctttagaggccaggtgtaaactgaagtctatataaaagggatggactttttttttaaaagctcgtttgtgttttcctctttgtgttaaattatgaatgtgataattggtggttaatgagatgtaagtactgtagtctcagacactttgggttattcatgtctctgcaccattttcatctggccctcattttccaaacaccagacctgtaattatgccaaaaatctatccaagccagataatattttgttttttcttattactacttacagagcatgaagttgtggaaagtgttggacttgcaaagctaattttagtcccccagtgaaagttctgaggggcaactcaataaggtaaaattaaaggtatatgaatcacggatttcagagtttacagagacatttagtaagcatctgatctagycatttagctttaggatcaaccccattttgctggtgaattagccatggcttacaacaatgaaatatatatagacctacgattcaacctggagatctgtctggccctacagctagtagcactgtgcctcgtttgaaggagttggacgcctgtcttttgccttcctgcaaggtgtttttttcattgcatcatgctattgccagtctaccttgaactctttttgagtgtttttcataagcttttgctgtttcatttatgtttaatttgtgtggtatcattcaatgactgtgtccttgcaacagatattttgatgtactaaatttgtacacatacctgagttgggaaaggagatgcattttgttttgcataaaaaaaatctaggtctcatgtttacatttaaaatatcaggctttgtttccactaaagtggtaatctttctaaaaatgtccctcacattgaaggacatccaaaaggcagtaactcattagaaccttgggttcagattacaaatgtgtttggctagctcagtattgaagttcaaattatcttggaattattttaaatatttgtacaggaacactgattagtttactaacgtgttgcctatccactaataaccaccttggcctatggtcattaactcctagggctcaagcaaactctcagcaaagagaatttgcttcagtgttggaagccgtcatttggtgtcttcaccccaggacttggaagtgttgactcagaaaaggaatttgaaaacagtttttataactgcattttattttttgagcagaagagttgagagaaaaannnnnnnnnnnnnnnnnnnnnnnnnnnnnnnnnnnnnnnnnnnnnnnnnnnnnnnnnnnnnnnnnnnnnnnnnnnnnnnnnnnnnnnnnnnnnnnnnnnnnnnnnnnnnnnnnnnnnnnnnnnnnnnnnnnnnnnnnnnnnnnnnnnnnnnnnnnctccttttttggtagttaatattttctgattatttacattcaactggagaccaagaatgtggtataaggaaaagaatgtcagtgtagagtcagcacacctgggatatggttctggctctgtattcaatgcgtgaccttagacaagtcatttaatttctctgggtgtttgtttctataaatgagaaagtgacataggtcattcttaagctgtttttcagccagaagagtctgtaaatatgtaaatttttccaagagaagctaaactagctagaagatcgtatgagggttacacagacccgtgccttccttatttgttaccttttgacagggccagcttcaaggactgcaacctgcacagtcacacagggcctcaagctcagaggggctctgtacttggtttaatgcagtgctgtcaccatcttacaattctcattattcctaaacagggccctgaattttcattttgctctgggccagataaatcatatagctagtgctgccttttggtaatacattttttcccagttcatctgttggttgaaaagaaaaaaggaattataacctcaaattggtcacttttgtcaccattatgcccttcaggtagactgagggaggcataattttgacacaattatatatgtggacttttggggtcattttctttttttttttttaattatactttatgttctagggtacatgtgcacaacgtgcaggtttgttatatatgtatacatgtgccatgttggtgtgctgcacccattaactcgtcatttacatgaggtatatctcctaatgctatccctccccactccccccaccccacaacaggccccggtgtgtgatgttccccttcctgtgtccaagtgttctcattgttcaattcccacctatgagtgagaacatacggtgtttggttttttgtccttgcgatagtttgctgagaatgatggtatccagyttcatccatctccctacaaaggacatgaactcatcattttttatggctgcatagtattccatggtgtatatgtgccacattttcttaatccagtctatcattgttggacatttgggttggttccaagtctttgctattgtgaatagtgccgcaataaacttacgtgtgcatgtgtctttacagcagcatgatttataatcctttgggtatatacccagtaatgggatggctgggtcaaatggtatttctagttctagatccctgaggaatcgccacactgacttccacaatggttgaactagtttacagtcccaccaacagtgtaaaagtcttcctttttctccacatcctctccagcacctgttgtttcctgactttttaatgatcgccattctaactggtgtgagatggtatctcattgtggttttgatttgcatttctttgatggccagtgatgatgagcattttttcatgtgtctgttggctgcataagtgtcttcttttgaaaagtgtctgttcatatccttcgcccacttgttgatggggttgtttttttcttgtaaatttgtttgagttctttgtagattctggatattagccctttgtcagatgagtagattgcaaaagttttctcccattctgtaggttgcctgttcactctgatggtactttcttttgctgtgcagcagttctttagtttaattagatcttttggggtcattttcaatgacctaggtttctgattgcccacattttccctcttctatgcttctttgccccacctcaatccatttttttaaaaaatgagagttaattactggtatttaccaagtattttcagtctgtctattcaacatcattatgtccattgatacataagcagttatagtataagatagaagatacttttggctttgaattattgttttgttgtatatttttactttcttgcagaggctacaattacaatagcttgacaactagagagaattcttcggtctgacgccaccagtagagggatttctctctatgtgttatgtgggctgtttccctcagcagctggtttgttctgaccagatgagctccacttccctctttgagaaggccgaggtgggtggatcacaaggtcaggagtttgaaaccagcctgaccaacatagtgaaaccccgtctctactaaaaatacaaaaaaattagccaggtgtggtggcaggtgcctgtaatctcaactacttgggaggctgaggcaggagaatcgcttgaacccaggaggcagatagcaccactgcactccagcctgggcgacagtgtgacactctatctcagaaaaaaaaaaaaaaaaagacttgctaaaggtgctaagatgtgcattcatgcaggggccagcttgattgtctatgttaatgctaataaaaattactctgtgactgcaaggaacatatggcttcttggcttacacaatattgtgtgctaaaggatgaaagagcaaaagacggaaaaaacgttttttaggtatgtgctgatggatgatggagttttatgttatgagtctggtttcagaaacttggagcaaatctctaagcaactatatggccaagttacatatcacatcaatggcaataatttgttttgatgggcccctctggggtgtctatttcaaactaatcttcaaaatttttctcttgcaaacccagtgtttgtaatcttccaagatgctctttttgccctcagttcataatgttttattccacttgtttaaaaattcatcagagctgactttttattatattaacaacatctgaatgttttaaaatattttgtctttttatgtcactaaactgaatttaaatgataatatctatgctgagttctaattgtttccctgggtcctgacttttagactggggagcatactgttttcatttcttaagtcacataaactggtatttgaatttccaattgtgcttaagaatagcaaaaaaagaactggtaaattttttaaaagaatgcagttggtcattcaacatttttatatctggtattgatagccaggaaagcactagacacagcttccactttcgttgtatccaatgcattgcattttcccagcattaaatttatagttgtgaaactttgggattttaaacgaaaagaaccaaagtgaaactcctcaagtaattaaataaatgctttggttctgtgcattttatttcaaaacacctttttgaacactgctttacaaagatttcaaagaaagagccatggaagcctaaacacacaggttacttgtgaaaacagaggaaatcggaggccctagtttagagcgctcacccagtggtgcatagtttctttccaggaaaggaggtgcagtgtcttctcacaagtgttggtctctactatagagtggccctgcaggtgacaattagcatcacagtgaaaactggcaagagttggaggcaacacctcacttcaaagatgtcatctattgaaacactaggcagaaacacccacagagtgaagtgaatactgtggcattttaccccttgaaaggaaactcagtgttttcaccgttggccaaacgttgtaatcacctgcacaaagaaaaaatgtctgggttctacccacagagattctgatataactggtctagggtatggcccaggcattgggatttgagaaatgccccagatgattttaaggggcagccgtagctgagaactaaggtctatagtgaggtatgtgggtgtgtgtatatatagaaaaaatatatatatgcctatatatatatatatgccttgtggagatacaattcacataacatactattcactcattaaaagtgtacattcaatggtttttagtgtattcacagaattgtgtcaccatcaccacaatcaattttacattttcatcacctcaaaaagaaatccactagcagtcagtccccatttctcccactctacctctaggcaactacttatctactttctgtctgtatacagttgcccattctggatattccatataaacggaaccatataattctacattttgtttacccattcaccagttggtggatatttgagttgctctaactttttggctattatgaataatactgctataaacattcatgtacaagtttttttgtgggcatacattttcatttatcttggatatatatctaggagtataattgctggatcatatggtagctttatgtttaactattggagaaactgccagactgttttccaaagtggttgcgccatttgcattcccttcaccagcatataagggttccaatttctctacatccttgccaacacttgtttttatcttgttttgatgatagccattctagtgggtgtgaaatggtatatcgctgtagttttgatttgcgtgtactgcaaatcaagttgaacgtctttttatgtgctttttgcccacttgtttatcatctttggagaaacttctaatttagatcctttgcctattttccaattggattattcgttttatcattattgagttataatagtcctttacgtattttagatacagatttcttataagatatatgattttcaaatatattcttctcttctgtgggttgtcttttcactttcttgaaggccttcactgaagcacaaaagttttaattttgaagaagtcaaattttatattttctttgttgcttgtgcttctggtgtcatatctaaaaaaagctttgcataacccaaggtcatgaaatttttctcctgtattttcttctaggagttttatagttttagcccttacatttaggtttataatccattttgagttaatttttccatatgacatgaggaagggttccagcttcattcttctgcatgtggatattctagagtgagtttttaaaatagcctcctcatcaatgtgacaaacttcatggggcatggctcatgaggcatctatgccaataataaatttccagagagttccagcttccttctgctctctgccagagtgtctatacactggtataaagtctaaacacacacttggagctaccaacaaacacatttacatagtctctatttagtaagctgaggtttctctgcttgcagggggacacttaggaattaagtgaagcgtgatatcaggcattaaaggttttcaaaggaattgttcttcctttattgcacgaatccacacaaatacatttaaactacagtgtgtgacctgtgagtcaggaagtgccttgctgaatgctgtggtgctatttgatgatgtttcattgctttctgctcctgcctgtttgagtgaggaaagacccttcctgaaatttttgagtcagaagttacttctaggaaggttatgacattttcttctctgaaactgcttaaaagcagacgaagcatccctccaaaaagtccaaagtagagatgtatgatccatacccaatgttctgtgctgctgtagggaggtggcaggtaggattagaaacagttccccaggaagtagggaaaccctcatcagccaggccaccagatggagagcccaagtcaaggaataagtcaagttctttcctctctttagctctaaaagtactggctctcactcaggtagatttgtctttcacaaatggcctctgtacttctctaatgtccttctgcactcctggcttaagaggggcacattaatatatactctaagagactatgttgaaacttctctcacatcccataaaggctctgggcaaatactcttttacctcaagaaacaagcaaggaaaataggcacagaattttatagatctgagttcaaatcctggccccaccacacaacctcgattattttcagtgaattgtttaacttctttgagccttatcttccctttctatgatatagaaataaaaatatctattgaagatcattgtgggattaactgagaaaaacaaatgtaaaattcctggaccaagttgggagctcaatatattttattcctccctccctttcaataccaaaggagatatggtggacccccagtttcaaacctcattttttcagtcttgaattcaaagattttaaaaggccattagcaaaaatggacattggatttaccactggacacatcagatccatctcctacattattctgttccttaagtggttgtaaagtcttcattctttggcagaggataggacctcaccttttggggtcttcctgccaccttaagtaaaacaytgctactgtccatgactttgctgatacgtcagcatttcagtgaagtacccagctgtttaaaacagcaggtatttattttctttactgtgaatatgcaaggatgaaatgtagctgcctgtttttggaaacgctttcttggtctatgtcatttggttaggttaagcaatggaatgtattgtgaccttggtctgtgcactgacctctcccaggtgcccctagaacttgtttatgcagatatttatgggccaagaagctgaacctaagcccaaactcccctcagctacttttctgtgaaaggttaattgttcagcaggagtatttatgtgactggaaaaaggctttgagcaagacaagtgtgtaaaactctgttcagcagaagttactgcaaggagtgatgggatctggcatggttctttgagtgatagtgggtattcagtcgtcttaaggacttccattgccatgatataaaaataactgatcttctctttcatgggcctccctgaaatgttctgcagattatgatgtaaaataacaagcaaggcagggaaggacttccttccaaggacaatgtatagattcaattagtgacatctgtgttatttgtatttgtatggaactaagtccagttgttttccacagaaaaaaactcagaagtctgcttgatgatgtgtcaaaaatygggaacaacacatttgaaaactacaaacaagtaagcatgaaaaagggaaattaattcaatagcatttatttttattaggtcacattattatatatgtccttttaaaaaactttctgggtataaatagagataataaaaagtagaataaagtacttattccccatatcaaaagaggagaatagaggtacatataaattccaagcagtatatgttctaaatctatgaaaatcctttcaggaatttggcctggtatatataaatctaaacatataagtacaaatgttactcatataactataactatgtaaagactaaaatacttgattttgaaatgcagtcagttatagcctaagacatttaaatacactccccgtttctgctgaggtcaacacatccccttgagaagtgtaggacttggctttatcatgggagaaaagaatccatgaagagtaatttgaggatgacttacagttgaatataactttaaattttttaggtgaagtccatagttttacttaagttggttaaggggtgcaaaaatacagttatatagaaggaataagtcctagtgtttgatagaatagcagggaaattatagttaacaatagcttattgtatatttttaaataggtagaagagttgtaatgtacccatcacaaagaaaatataaacctttgaggtgatggatatctcaattaccccaacttgattattacacattgtctacaggtatcaaaatatcacatataccccaaaaatatgtatcaacatcaatagaaaaacagaattctcgataaaacctagaattttcatctgggaaaaaaatagccaaaccctcagtaaattaaaccataataaaatgttaaatattttccccagacttggaagtaatataatggtggtttccagtttaaacaaaaccttatgtgtagttgtaagattcaataaaaagatgcacataaaagtgctttggaaatggcaaaattctcagcggggtcgccaccatgagggcagtagaacacagaagaaagkagcgttgctttggagccagattgtgagcatgccaatttcagcatggctgccctgtgcgaattatgtagcctctctgtgtgccaggatccacatctctaagatgtgaaccataataattcccattaccgctacgaagagtaagtcagttagtacatgtagaattctgaggacagtttctggcacatggaaagtgctcaagcaataatggtgatgatgatgacaatgatggggcagttgtatttgggggaaaaggagaggacagaggaagtattcgattttgaaaatggaggacggaccagctgacccaataagcttaaagaggagtaaacagaataatagaaattaattaggtttggaatttaaatggaaatgaatgccctgtttatacrtatattctaaactgagataagtgtctttcttggtactggcagaaatattattagcaacatttaccattgtttaaaaataaaatattttgaacaatcattacacatatactatggagccatgaagattctagtttcaaaactaagtttaacaaggaataactgtctccagatttaatagcaagtatcataaagattatgagatgatgatgtaggagagtaaacgttttcattgccacaaatgtgggatgacagcatgattcaagactggtagataaaacaagstgactctaaggagaaagagacaactctccacaagaccttttctgtagctgaattataattattcttttatgcttttgaccatattttaccacccatgttctaaaacagtggctaaatgttccatactgagaaaccagaaccacctgggtcttaccttcttgtggccatgatgcacatccctgagcagccatattgctctccaaagaagtttcccaagaccaacctgcttcccctgctcacctgtcccaagggcaccactkctccttctgccagactgcacagtgcacctgcactctgcctgtgatgcaggctgggagaaatggaccctgaaaagattcagctttgctttttcaccagctgagggaaattgtctgcagggctgccttagatctgccaaaatcatcccagcaatacctggcaaaagcccaagatgtgagttattcatactaaaaatggagaattggggccaatattctacctatgagtttttaattccaagaatttaaaaataatattatatatatatatatatatattttttttttttacaaagtaaagattgggaagcagctgggcatcaggctgagaggctggctaaaaagaaaacagctgtgttggtcttaagtctgagctgactacaataactcttgatttctttgaaccttgaacctgaggattcaaggccataaagcaaagctaccaagtgttgacttatctgattccttgtgagacatacagagtagagttggttgttaagccatctttaaatggaaagtgttacagaaatgcttataataataaaaggctaattatagcattttcccaagttgtgggattactataatgggaatgatggcacatgcaagacctaacacatttatcaaagagctggcrggatgtctacaaaagtaaatattatatatgctgatatgtcatgtgctgatcaacatagtaagtctagctggacagctgctttagtttaagataagcaaagcaagcataggagtgttcgaaaaccacttatgctccggtgaatatacctaaagtgtgtttcagctggagagtggggattgggagagggctcatgcctctttatatcttcacagtaccttataattataaagtgcctagcattctgcctagcacctagtagctgatcaatgaatcattgcctttttcccccttcctctggcatgttgtcatcagtgggagatggcttatgggtaggggtatggggagctttgagtaccaagagcrcatggtctaaagcagtgggtttgctatacaaatatagccttgagacatctctggttcctccttcctagcagattgtcccctctgtcacacctacgaagacatttttatactgtcattggctaccttttattcagtgagtgctccacaaatacctgttgattcaactgcatctcttgtggacatttatggcacttcaagactgtggttgcctttagtgactgccactgaacagattcctgcttgttgagtattgcttattgctgaagctatttttataagcactgccaaaagcctttaatcctctgtcagttgagtgtawcttttgggttgtttttgttgttacagctaaccttttggcagagaatggggcagacaaaaaaaaagggggggaattgagataggaagcagtttgtagaaagatccttggaaaaaccctttcccccaaattacattttgcattccattagagaacaacagattaaaaacaaagcacaaatctcgctgagaacctgaaaggcaagtttcagcatgagtgaatttttaacagccttgaaggagggggttaaaatgaaattctgacaaccttaactacatttctttcttaaagcgttgctataataataaaaggtgaaatgtcagcagtcacatattattctgtctaacaatagtttataatttttactctgtgggagcacttgcccttttatagtctcaactcttgcgttttgactgactgcccaaggacagcaattacttaagccatttacctacacaccggcagcacagccaagacctgctctgcattgctaagttctccagggatttgctcttggggacttcagtcagtaaaggaattctatgatatgagctacttactacccctggggtttcaaccactccaaaaatctgtattcatccctacaccttgaaaacacactgctggctatgctttctgcgaaggagagatcagcttctttctgtgcgtcaggaaaacatcttcaaacatccaaatagtcacacagtctccttcagaatattgcagaagaatagatactactcagttatcacaaagtagagatgggagttttctattaaaattttattcacttagcaagcatgattagaacagctgctatgtccaccaacctagagcatctgctagggtagagctaccaagattactactacacagaaccagcccacagagagtacattttgtgggaaaagtcagatgagagatataaattgttgagggaagcagtaggctaatcaaggaagtagcctgccttgaggttagggatgggaatcctggcatcagtcatgaaccatcagctcaaatgccctcagggttgggcaggtaaggaaataaatgaagggtgccagtagggactgtcacacagtgtagccagtgagagccatcaagatggaacactatccctcaactacagctgttcagtgccatgagcaaataccagcccattcttgccagagctttggctttttgaaaattattttttaatgttggcaactagttcacagtgttttacccccatgaattccacacaaaacagttctagggaccaacctttgggttatgatgtgtgctgtcttaaaattccattctatatgctttatctcaggctgttacaggttaggcgctctagaaagcagattctgagacagtgtagtaagcaggaggtttactcagatagctgtctgtggtaggaatgggaaggaagcaggtgtggagtgtggatagagggagaagttggactgtgatggagtctcagtaaatgtctctgctaacatttaaagagcagtgaaacttggtagcccttcagagttgttccaagttgggtgacggggctgggcctttataccttggcatgaaccaatcactggacgtgggttgcttgggaaggggaatgactttgggtaaggaggctctcttcagccaaaggaatatgcatcagagtcagccaccctctcagtagctgggaaatcagttatatcttactgaaggagatctgggtggtgcgtgacaatacccatcatagctgtagataggtttttctgcatggactgtgttgcccctgaacacaaggatgaggttgcaatcaacattgaactgacctgacaatcatgccctagagaagagagatgatctcacattgtttctcctggtcccatcctgtctctgggcctgtctctttccctacttttgctggcctgtatgtctcccacagaagctagtggaacaggattcctaaaccccctgaggaattcctaaccccttgacccaacctcagagctatattggtgtggcctacaatccatatttggagcatttctwaggatacagtttcaacctaagcagacagagttgtaatggaatgtaatgatgcactcatttttgcaacatgtgctttttgatagcctactgcatgccaggcaccragctactcactttgaacaaaagaggtttcctgcgtgcaagaagtttggtatttagttggtaatgcagatgaataagcagacaatttcagggtggtaggtgttctcacaggggtgatcagaagtgttgttttgggaggctactttgattaaaaatctgtagttagaaacaattataatactctttgtgaacaacagctcaccaaagtaatgccaactgggctggagagggtcaggttataatgtgttaagggagtagactctgaaaggtttagtgaatattggtgtacmtaaatggggaagtgaggactttaatctactgtccaggttgcaggcctaaatgattgtagatttggaagacatgaatgaatgatggcataactgaggggaaaaaaatgcaaagcactgggtagacaaccatcactgctgatgattaagatgtggttttgtgccaacaactgtttatggaatatattcctccctgtgaagtaaggcagccataaataactatcatatgtgtcacagtttgacaattattatatgtagagccatggagagcatgctggagagaggataagagaagaaaggtattaattccaattgatgtggcagaaaaatcttgaggtggataataatgatgatgacttgaaggtccataacaataatagctaatatgaatgcctaataagtacaaagggctgtgttaagtgctttctgtgctttaactcatttagttctctccacaaccctgcaatatagaggctgttatcttcctctttgtatagatatgaagaaactgagkctttctgttcaggtttaagcaccttgcttaagatttgatgacaagaaaatggtagcccttggatttgaaccaggttgcctgaagccaaattctggtgtcttatcacaaaattatactgtttctcacttgaaatcgatgttgaaatatgcatgggagaggagagcattcaaactgaagggaactgtttttgccaaggtatgatgatgttttgagtttgaggaaatatgggagatatgactaaaacgtaaggtagagaggtgaaaagcatggtgtgaaggttaactttggaaagttagaccgtagtttccttgcagatggccttaaataccaagctaaggggttggggtttttattccttgtgaaatggggagccatagaaggttgtaagcaaacaagtggtaatatctgtattttgaaacagcaactctggctgtgaagggtagacaggtaaatagagggactagaggtggttgggcagagaggagcaggcccctaaatattggggaggcactttgcaagcagggtaagaacagggcaagtagaaagaaatagaagacaatttgattgttgccttggcttgggtttttgtctgtgatattgagaatgcaagatgaaggtaaagatgtcatgtagagagagcaggagctcagattcagactgtggaaaaggaggcgtgggcctcaggaggctctgtctagaagagactctggaacctcctccttggaagtttaggtggatgctggatttggctggattcgagttgaggttattgaagaaacactatgtaggctgacaagtatgaaagtacacatttaaatagaggataaargaagtaatttttaagaaagtcatattgtacatcctgtcatttcacatgaagtaacctgccactgtggctatggtctgtgaaatgaagtatgtgaactttcagtttagggtaggagttgatatttaagattgggcaaaatgttccaggaaaagggcaggattcatgcgtgatgatttatctggaaattttctagaagctctataggccagttccatttgggaacacagacctgccttcccattgatggtaatgaactcaggtagttccagttgtctcagtcatttgttggcttctgggtttatgcttttatttgttaagccatcatctgatattatttagttcttagttgctagagtgagtgtgcattactacctgtactctaatgataatgtaattgtaggatccatgtttacaatatgtagtccaaactctcaaggatttaaaggcagattatgctgggtggaaaaggagggagcaattccccaacacttagagagtgtgacaacacatccagctgctccttgctccttcagcatgcacaaatgccgtgcgtgtgtgtgtgtgtgtgtgtgtgtgtatgtgtgtgtgaattgcagtgtagttgattttctctggcaatgctttaataattttggtgctcctttaaatattagtggaggttggaaagaaatttctgttataaaaattttcaaagtagtttattctcccaagtagcaggctgatggccagttgtctgtatttgatcattaataaaattgagcatttcaaatgacattctcattctcctgctgctattaatggggccccatctttaggacatctgcaaaacattatttgtaatggaattcttattatatcataaaattttattagaccttagaaatgacaatcagattgcattgtttttcttattaaaaatactttcttcaatgcagagttccctaaccttctttctcagaaaaccattatacttttacttaaattttgttttaattgaagtagtatattcatgcagtgcacaagtcatcaatctgtggctcaatgacttttcccatgggtgtgtacctgtggagccataagccagataaaatttagagcatttccaaaacccaggaggctacctcctttatgcctcttcacagtcaatatctctttccaaatgtaacccctattctgacataggtcaggggtgcatggattttaagtacaatgtttccatatcaataaattctgaaatgtatttattggagtgtgctacagtactaagaagtaatcttgacttttttccagaggtcccttgtataagaactcttcctattcaagtgactaatccttggacttttgcaattagaagtggcacattctaattaaactaatggtaaattatactaagggtggaaattatactgagggtgaatgattttatggatgtctrtcctctaaaggtggtcatagattttcacacaatcaaatccctacyaaattttatcctcctttcaccattgctccacccccaagtgttctgctagatgttatctgaatgagatttctttgctgtgaatgatttcttataacacttcatggctcrtcttcgtctccagaagttcttaaagttgtaacagtatcctacacataagaatgcagaatttgataaatggttagataagatcgtctcccttatataacaatttagagaacttgaaaacaataccaaaaggccyagttttccttttaatgtacagggctcattctgcagaggtattctgtggttgtattctaaatccagacttgccctgtttagaaaccaaaattagaagtctgaggcccatttcttcaaccaaatctgatgagtaaaaggatatacagtagccatgtataaaggtggaaagacctggtatggcccatattgctgctgtgttaattctccaaactwaaaaggtaaccaaaagatactagccggtaagttaagtagaaatcgagaccargaaagatcccttaagttattaatttcaagaattctttcctaattgctgagaatttaccatcttgaattgttggtaggagctagtagttccatcaagaaaaggtgctttaaggcaaattargttagagcttcctttgttcattaatcaaaatcaagagaatctgtttcctacacattgttcctttctgtgaaaagactttgacaacgtgactgaatttcctagggaaattttctaacacctttaatgagaaaaaagatgtctttgcatgagtatacaaacacgcagaagaatgcttattagaagatctatttatacttgaaatagaactgaattgagttgtcaagaaaagagaattgtgttagtatgcaggtccctcagagacatgattatagtcctagtgacaggatatgaagatactactaattacctttgtagactgaagacatttttaagatatacttgatttcgtgtcatcaacaagaaagtagtagttttgttatatgaattattttttaattattcagtgtacctactattaataaatgtgcaaataaatacacatatttaaaataaagagcaagtatctgcccacccccatttcttccctcagccccaatccctagatattaataatggctaatgttttcttccagatatttttaatacagctaaagaatggatggatatatggatggatgaatggatgagggatggacaaacaggtaaatagttagataaatggggaaagagacattgaaatgtttgtttgtttgtttgtttgtttgtcttctgagccgggtactttgttgaagattcaatattaagcaaaaacacatattaccaactttcctagagcttatagtctggcaaaaggaaatagatattaatcgcaaacaagtaaatgtataattataaattaagtacaacataaaagagtacgtgagtttctctgaggaagggatgattgtgctgaaatctgaaggaagaatggaagactgagttagactagaggggaatgttccggatagaggcaagaaagtatgcagaagaccctgtgccagcaggaccatagctcattcaaggaactgagggtgcctggaatggttagagtgtagactggatagaaggggagaagtgctgtgctggaattcaggtgggaggctgttgcagaagtgaaaggggaaaaatgaaggcagtttggactagcgtgaaagtagcttggactagcatgtgtttggagaaaaatgggtgaatttcagtcttttggaaaatgaagcacacattatttagtaatgattggaaagagatgataaggatatagatggcttctctctgtttttctgtttcttaatctatgtggattttttctacactttttctgaccttacatttttcctcttaatagtatattttgaagattccctccccctttcaataatgcctttttaatgagctccttgtgtttcatggtacaaatgtgctataatccttttaaccaaatttgagattgcttggtttcctattccatcgataactttaacatagttgttaatgtttaccagtcttgttcataatctttatccattcgtttaatgatatttttccttatttgtaaaatatttatttattaagaatattaatcctttgactagcaaaagaagaaaaaatatacagtcacctgcatagatgcattagataccaaaaaggcatttaacaaaatttaccaactttattttattttttttcctaatgacgctttgtatttagaatttatcagttctccaaaagtggtgttttggtcttaattttgtatctgaaggtccaaactcactcttttctagtcattctattatctgttcatctyatctttggctttattctttcatcacattcattctttgtaatgtcttttatgattcaaagtggatatttttctgtttctccactggtttttttttctagaaggtatttttttatcagtatttgcttgatacttttctcctttccttgtattctttcctctttcctatatgctttgaaaaatctttacatagttgctatgtcatttatttttttctttctcatatttaatgtggaaagtgttagctagaccatctatttttctaaagattgtatctgtaaatcatacttgacttttatagcttcttccccgagacctttttgttttctctgagaactgaacttcgtgggttgggtagcaccaggacttttcttttgcttgagagtagggaagaggactcaactgagattatggctagttatagttggttaatttgggttctattctttgttctgcaattttatttaacattttataccgggatctatgttttttaaagacaaggtcatatttcagtcttaccagtggaaactcttggattcaaattattctataagttggagagagttttgaaacatttgcttttgataaagacagtaagttctatgtaacttacttctcctggtatagcttcaccttccaaggagttattctcaccttaggtgggtcaatgtggtggtagtgagccaggacttctactccaaaaagcttattctctaactgcctactgacccctcagagtcctgccctctggattgcagggcatttggaagattgtccccaaatttgttcaactctcctagaagtgcttttctctcctggaactgctttggagctagaagttagtgttggtctttgggtctttgtattgtcatatctcccgttccttggccacaatctttcaaatatggttttaccagagtgtatctcttcctttgtttgaatgttgttggtatattttgtctaatgtttgacatttttattcattttactaaatttagaaatggtaatttttttttttttttttttgaggcagagtctcactctgtcaccaggctggaatgcagtgacgtgatctcggcccactgcaacctccgcctcccaagttcaagcaattctcctgcctcagcctccacagtagctgggactacaggtgcataccaccacacccagctaatttttgtatttttagtagaaacggggtttcaccatgttgtccaggatggtctcgatctcttgacctcatgatccacctgcctcggctttccaaagtgttgggattacaggcgtgagccaccgtgcccagccagcaaaggaaattttgaccgtgtgaccttggcaatatcttttagccttttggattcagtcttcttatctgtaaaactggaagaagtaattgctaccttctgtttttcaggatcaagtcagataatgtattagaaagtgctttgtgtactgtacagttctttctaggtataagtkgttcttattcttatttgtctagatgagatacacagagacaaawgtaaagaatagaatgatatattctgagcactaaaatagtagaatatgtgttcatagggcagtatggttaagcatttagggctgttgtgaaaagtgratggacttgaaagggataggaattctctggtggagaggagggggaagggtacaatcaaagaagtagtraatggagtatacctggtatgtttaaggaacgctgagtatcacaattaattgaaatggcagggtcatggaaaagagtcacagaagaaaaactgagagggttaaggaggcaccaaattataaaggcctgactgagaaatctggaagttattctgaatgcagtataaagcctggatttgattttaacaaaaaccttagcaggaagcttacactttatgtttaaggatgtggcagtagtatgcaggaaaaatgaagagagggagaaagaggatgatggggttgcataagtaggtaaacatacatctagtgtgccaggacaatcaagtttaaacctgttgttccagaacaattattaatagtggcctatttccttcttaatgctgctcatagtaaaatgatgacaatatttataagaacatcataagaacattgaccagggccaaggcaatgggcatataaaggaaggaaccaatgccagaataccaaaaaggaagaatgtgtaaagttactacatgaggagaggagggaggaatgaagaagggagagtaagaggtaggtccmaatttttctgccagatagattgcaatagtggtggtaacaatgatttttgaaaggggataaggggggaacctggaagtaacagggtttaaagagaacaagaattagtttgctgtgaactgttgagttgtagtagtgaggatctaagttgatttgtcacttgtagagttgtagatgaagcttaggtgtcacgcatcacttttataaaacattcattgactatgctcagctctatggggctgagtagggatctcaaatctacttgccgagtcacctttctcaattttagggacttgttacagaatcctcatgctgaatagggacttcccttatagtcccttccactcctaaaagggggaaagtggctcagacaacacgaataataaacaaacacccaaacacattctattatagctcaaaaacttttctactttgagcagacttaggagtttctcttggcttgagacatgggtccttttccatgtcagacaatgttcgtctcaagattttgtacccttgactctcccttatgggagctcaacagctaacaaatagcagttgacctttcctatctctcagtctgtggcttcctgtgacctaattggaaacctttgcttgatatgttgtgagaaatataaattataaattactatatatagttataacatttagggtacagttatacaaatttgtgcttataggaatgtagaaatgagcacataaatgcatctatgaatatgtatatgtacatagaatttatatatttacatatatgcatcgaaggcggtttagtgcttaaatgcacagtctttgaaattaggcagggctgtgcgactctcatctaataaagtgggaaaaatatgaataacttcctcattgagttgctataagggttaaatgagatgatgattataaaatgctttcaaatggtgctggcatttttttaaaaactggaaaagtatgtacctaattgttaagacagttatatttgagttgctggattttggaatattttgttttctttatgcttatatatatttctagatttctccctaatattctttrtcaaaagatacatgagaataaaattgatagagtaaaatttttattaataamgttagtttcctagaatagtatttatgaatagaaaataattcatacatgtttattaatgagctttttagttggaaattctcagttcatatatttcctgtctgtggcatctcccatgtgtctccctgaagcctttctcaactgctccccttctaaagaggaaaggctcaatggcctayatacacccaaccttgagcaccgtcatggcaggaaacagataacagtgtttttataggtcactaggatttatctttattcatatttccatttctcacttctaagaactagcctttccatgatcaccgtgatcacaaggctaagagataggtaacatagtctctttgcaaatacagtaggaatatcccactgagcatgttttcattaagacaaatcagtaaataccattagatttaaaggattagatttattagcgtttctggtgatcctaacaagtgcagagatgatgagcaaatataattttactacatttatccaaatacctgcacaaacaatcttttcttatttttatttgtcatatcaatcttaaataatcatgagtaattttacacattagaaagtgggaactggaaaagtgtgattttttttctaaacctttaagagacagctgggctgagagaaaacaataatgcccctgcctgattcagtttctgcctcactcacagtgaatttctcaggagcccaaattactggaggataraattggtctaattcaaccttgcaaacaaaaggagaaaaattggtcaaagaatcagcaaattgggacattgagaggctatatgagctttttctttaagctttgccactggattcctgtatctctcattttacaccttttctttgttgccttgaataagtcacttttgtaaattaccattaaacctgttatctagctgactgtggaaagtcccttatttcatagactcatggaattttgccactagaaagagccctagaaggtctctcttctcagtgtacagggaggaggagggaaggtaagagattggcccaagacacagctttttaacaaggagccaggactatcaattttcagctatcamatgttgactctctcactagaaagttacattgtgggtcacagtgtagcatgtgtgctaacttgagcatctaaggctctatcagaactattgttgttaataatccagaactaaaacacttctgaatttcaccatatcaggtttgcaaaatccttttgacagagctaaatccaagggcacaaatgaaatcaccacrgccacatctctatttccccatccctagaacagactcacttcctgtagyacacataatgccatcagccccctcacccttacatcacttagcttgaatgacaacatttttatagacmtatgccaaagaggacagtcactggcccaacttgggtcatgtgcccctccctgtgtccaagaaataggacatcctatttcctttggtcacttggccactagtaagaatgggccctggctgaaccaaatggaatgtgctccctgggggacagaaagattctcttgctatgaatttgtgttcttaaaagtaggagacagggaggccgaggcaggaggatcacttgagcccaggagatcaaaaccagcctgggcaacaaagtaagacccatctctacaaaaattaaaataaaaaataaattagcraagtgtggtggtgtacacctatggtcccagctacctgggaggctgaggggagaggattgcttgagtctaggaggccaaagctacagtgagccgccatcatgccactgcactgtagcctaagtgacagagtgagaccctgtctcaaaaagaaaaaaaagtatgagacagatattttgggcaggcagaaacagcagctattcactttagatgtcagccagatcacatatgtagtaattttttattttatggtggacactgtagtgtaacaatgttaaaactttagatgtcattgtcttcctttaaagagtaatgagttttgttctggcaggcatttaattttctggcagatcagctggaaatagtggaggcctggttttagattctcttagggcaaatctagagtgatctttattttaggattagagtagtccttctaaggcattgccttttttttggagtctcagctgaatcttgagagtgttcagcaacgtctcttttccttggctggttggaactccaacatctgaccttttgtagccctcaaacacccttttctgctcacagaatagctgtttggggtaggtctcacatatgattttcttaatatttgtctaaaggctcaagaaacccsctatacatgtttctagagttcttttcttgtgcagcttcctctctaatactttgctccacaaattcctaccatatctgccacccaaaaatcaggtctcagttttcttcacscagctgctctctgggttccacttccccaggttgcaatttgaaaagtgccccaaggcaaaaagccaaggtaaacataaagcttatctcctgtgtcttcctcctctcaaggatcacagccgtggactgttgtctagtgcctaaaattgtggcttcaaatatttgtgtccatgtttatagttgtttacgtccctttctccattatagacacacttaaaaccttttttttcaatatactgcaactgaagcacrcataaatttgatcactcgccaagcttggctctatctacaaagctacttcatatttacagaaagttttctcaaatactgaggacaagttttggcctctagaggagttataggagctgataacttaatctgggggtaaatcctttgtgagaaatgaataattcaatcctttcctaatttgtctatatttctgtaaattatctccttattttcttttaaattgggatatggtcatctgttgaaacaattttgtagaagtaggaaaagaaaaagacttgggatcagaagatctggattcaaaaaagaaaagaaaagaaaagaaaatcaaattccagcagacctcaatgtccctgggcttgaggttgcctgtctgtaaagtgaggtaaaaatagcaacttttcagggctgtgatgatgttgagaatatattccactcttgttattttctatcagtagtagtctgggggggtctaagaaaatttagctttaaaggacattttagcatattccttgagttagtttttcttttattctgtatatcaatataattagtaatatttattaatattatatgtctaactaatatattaatattatatgtctaactataatatattaatattatatgtctaactataatatattaatattatatgtctaactataatatattaatattatatgtctaactataatatattaatattatatgtctaactataatatattaatattatatgtctaaatataatatattaatattatatgtctaaatataataatatatgtctaaatataatatattaatattatatttctaaacattatattaataaaatgtttgaacatgaagtgttttgttacaacaaagcagccaaatccaaaactgtaatttaaaagatagtgtatgctgctttaaaacatggctcttagcacttggctttttgtatagaagtttgcattccatttctctctctctttttttaaatcgtcagtcataaaacctgagcttttataaaaggaaagtaacagaatgaaaaaaaactgtgccaaagaattagtgtatttgagttttgtgtctctagtgtttaacagttttataatccaggtttataacttgttgagaacaatagactattttaagcacatttgctttgctaaagattaactttttacatgcctggtaagtatggtgaaatttaagctttgagagtaatagagaggaatattttccatctctgcctgcattttttagtaaggatttttcagtaaggcactaacagctattctcaatgtgttgcatttattagcaaccaacatgattcaagcattttctcttagtacacatcatcttaaaagacagtgaaatggggaggccttgataagcccaaaactaaattttagcctcactttatatcttcatcaaaatctagaaaaatgcaaaatatttaataatccttatcctaatagatattagttttccaaccttgattccacaaatgctttaattcatagtcattttatatggtttgaatattttaaagatatttaattgcattttaaataatagtatcagccctgaagtctatttatgttaacaagaagttatgtaacattttagtcgtctttaaaacaacattgtaaatacacgtacataagcaaacatatagctaaatgttttatacataaatacaaacatttaaatactttaaaccataacagtaatagacaatatatatgtattctcttcctatgtatttttgcattgtagcttcagkatgaatatttgtctaaaaatatgttcttgagtataagtctgtctttatatgcttataatgttgtctctgacaatatttagtacttaatattggttctgagtggagcctacattaatatagcatagtacaaactaaatctacaccacttggctcagtacattccctgtacgtctcttttctactgaaaataattgaattattttggctacttaagacatttttctttgttttgatgaaagaaaaatatcagctgaattaaatttaatggagtttaattcagcaatggacgattcgtgaattgggcagcccccagaatcacaccakmttcacagagactccagcacagccatgtagtgaaagaagatttataaaccaaaaaaaaagggaaatgatgtacagaaattggaagcgaggtacagaatggctggattggtgatagcttagcgtttgccttatttgaacacagtttgaacactcagcagtgtatgaatggttgcagtatggccactggtattggccaagacttagcgattgttacaggctcatactcctaagttaggttttcaatctgactattaagctaggttacagttcatccacaaggactcaagtatagaagtacggaatccttctcaggccatatttagttggctttaacagttttttcagcctttcatgtggaatgcagtatgaagtggctgcatatttgtaggtctgaaaacctggtgcttattgttattcccagccgcttcatctattttcatagagggctcatcgaggtctgtgtggcctatgatagtgtcatgccagcaagtgtgggaagagtagttacctttgtgaacttgttcaggcagccagaagtcatggctggcctccaagatgtcagctgaggacctggagtgtctgcatgtttgggaagtcatatgatagaaaaatctacatggtactgaaatacccagtgcctttcagaaaggatcagactggggttaaagggcctgcgttgacttcagtttgcatacacgttctttattttcagtgtgtttgcacatacattatctctccagatcgtgagaaaagagcagccagaggctccttcagtttatgagagccagtaactctcaccaaagagctttgtttgaaaattaacaatctagactttggtctttgttggggttttctaactttttttttaagttgtagaaccctctttccaaatgaaatcttaatctgactcccagtatgtaaaacagwggaatacaaagggttttaattcacatttgctgggggactccagagtcttgcccacttaggctgatctctttctatgttgctaggcccctcggccccttgaggctccatggagcatagtctaaaaaccacgacaaaaacaggctttgtggaatgtctgttggcccacaacattctctcttttgatattctatattgcttctcataggtgttctgaactctgccacatttttcagaagtctttgttttttatggtgatagactaagcatcctggtgcagtagggaagcattccagtcttgactccagctctatgtactgtgtgacattgagcatgtcatttaatttcctgagacattggactctcctgtctgtaaaatggggatggttagagaagcatggaaaaacctggagacctttggctagaaratattatgtgaatgggattgactgaaatgagctgttgatctccgactcatccctatgtaaaggaacagccctggattacttcagggccaccttctctagtacacttgattgtaaccagagtaggatgatcaaaacttgagcatgtcaatggatgcagaagaaatgtctctgactgattttcttataagggaactccatattgtgcatgcttatacacgtaaggcatcctctccaggacatggtgatagatatgtgtttaaattaacatcataaatacttaatttcatggcatataaagaacactggggtaggggtcgaaggataagagagccagttttgtacatctcatcctaactctgcatgtggtaacatcatgttggtagcttgaaattagctgtggtagaattactatcacctgaaaatcagcaaatactataaattggggttttgggagggggagcacaccattgtagaatgatttgaattatacacccagtactcctactcctaaatattttaagcctcagtgttctcatgtattaaatatggaagacaatacctgctccatctgtctcacagatttgtcatggaagtccaaatatgtgtgaaggtaccaaagcaaaacagatgccactggaagtggcagcattatgatttccggtgttattgggkgcatagagaaagaacaagaggagcaagcatgaactgaccctgttttccctcaagaaacagaataagtgccactcacgtcttataaacacaaaattgtatatacttttgaagaatcataaatatcaaatgtaggttgaactaccttgaaacatatttagaaccattctttaaaatggaactatagactaatataagaaaatgccttcaacgcctccaagggttgggaccactgaatgtagcaatacattgagcaccagcttccaaagtgtcctgcttccagccctggagatgcttctgctagtattctatgacaacacacatgaggagctgaaactgcatttctccttagtgaaggggctagaagctagacagtctttgacattatggccaacactcatccacactaggatgtgggtggaacggtaaccatgagtaattctgacactgccggcatttctacagaggcttttagatgaaatctaaaggaaacttcccaaataatatggtttacaggtaaattattattattaataagataatacataaaatctccatcaagtatacttcaaggaatgtgatattctttacctgaagacatggtaggaatcatgtctgaaacataatgttatgtttaatagttgtattttcaattataacctttctcttttatgtggacctatgctctggatgatgttacctaggttctagaattcttgggtaaaaatatcttcataagtattgcaaaggacaaacctatacctttttgggaggagtgctttaatcttaagytaagtttgtcagtttggatgtctgcctaatgtagataggtgttctaaccactctattgctcagaaatatactatacaggttaagagaatggatttaggaatcagaactgtcttggagatccagctctgttgcctgctggtttcctgacttggtgcaagtttcttattctcctcaaacctctgtttcttcatccataaaatggggtaaataatagtttcccttttctacagctcttttgaaaattacctgcaaacagagcttaattaatgttaggctattaaccwctttaaagaatgagtcaaagggtgatttggcctaaattcaaatgacgacttcagytgggatcttgaccagcaatgccattgtagtgaagctggagccagagtagccaaagctaaaatcaaacagtctcctagcttggggagcccttgtgcccatctgaatttgtcagaagtaaagccagcattgataagtgagtagtgatatagtgcccgaagtgtggcattgtgcctggtgtgatcccccagcattccctatcattatccattttggtttagaagactgtccccagactagtgagggtcactactagagaatgttctgaaatagtggagcattgatcctcccaggaagtcactccatagatgattatctccttggagtgctgtatttgatactgaggaacattctcctcttgcttctttgtgcacactcatgtgcacacctcatacacactcatgtgcacacctcacacacgtcctgccatgatcatcttgacacaataccacagtaaagccagtgacagaggggcacaaaggggaccccacggtgctrtgaagtaagggagtatgccagaaagaaaagccatccacgtatttttttcaaaataaagatttcagggcagtgacataccatgggcaggatggtgagaatggtctgtccaaggcactgcagacaataaaggggacaagttatctgaaaataattttacaacaatgataaaatggacaaaaatgtcagctgactttttattattataatgccccgttctaagcagtctcagtcgtaaaatatccccctaaaaaatgtgttgtgttgatttaagttctaaacaactgctgcagttactgttgagttttagtaacatatatttcatctccaaactagcatcttttaatacttatcttttaataaacacaaatttacatgaaagtcaatttggaggactcctagttatgtagtcagctctaaaacatgggatttggctccacacattagtttccagagttagttcctaaaactttggaatgatgttcagtacttttggtacaggttgtgtctttaacccttgggctactaggtattgggcatttaaatagattcaaaataaatgattatagccaatgattgtgcagtcaaagaaatacatcttcagttgtttcagttttgtcatactgtgtgacaacctagaatattcatttgtgttttaaatttggaacagtgaaacagagtgtgcactggtggtgaaatgtttttgattgttgttgaaaaagttttgttcaagagaggagaggagtgttaaaaaatagcccagcataggggtaaaatactgctgcagtgtgatatttagaccaatggatagacttctatcgtatgccgtcttmcaatttaagttgtttatattattttctactcatgttttctttctataatcattcccaaaatgtagaattccttgttgtgaaggcaatgtgtgcaataatacatgcyttacagtcaatatagacatgagttcaaacctcagctctgcaactcacaagctgagagcctgggatgtgttgttaaatcttaattttctgtttygcaaaacgagagtcaaacctcccagcagagttgtgataactgaattcaacgtagcatgaaaagtgtgtgccatatgtttcatatagtagatatgatgttagtttccccctctgtctccacctttttacttctctttccagcattggcatttatttatgtcttccaatgcaaacatataagatgtctttatagaattatggtgagttctcaggaggctgaggagggaggattgcttgaggccaggagtttgagaccagcctgggcaacatagtgagacctcatctcaaaaaaattaaataataaataattttaaaagaattacagtgagttgaaagtaatttctacatatttacaactcatctgtgcaacaagtaatatatgatcactgtttataacctgatctctcccctccgaaccttcatagactccacttaaatgcaagggtttaatgagaaaatttctgagctctggtcctggtctacaatgctgagtaaatcttgcctagatggatgacatcattataacatattcaaagtgggaagaggaagtgcttggacattggaagttttggtgtacataaatttcctattctttctggctattgccagggaaatagaatcatcaaggtaagcatcagcagtgtgttgattcatggccttcattggcttctgtggtaaaggacacacgtacttagaggaaaggaaatgcaacataactaggcaaaaacagaccattttattctgcggttatttcaactgatgctagttgtcgcacccaaaagagcattttcaacatttcttcaacctttccatctcctctttctatgaagttttagcttcgtgtctagtcttctttgctttgtatctaacattaattttctagtgccttatgtcttattagtggtagactaatgtcttattaatggtacattgtattagacaggataaagaaraatcttctcctcctgttcatttgtgcacactcttgtgcacactgtacacacrtcctgccatggtcatcttgtcacaataccgcagtaaagtcagggggcacaaagaggaccccagggtgctgtgaagtaatagagtatgccagacagaaaagtcatccgtgtattttttttcaaaataaagatgtcagggcagtggcataccaagggcagaatataattcttttagttaccttacaggagttgtataaggattaaattggataagataaggggaaagagtttataaatcataaaataattacatatgttaagtagcattgttatcttgtatgtgggattagtgaactatgacccatagaccaactctggctctccaactgtttttgtgctaacctgggagctattctagtccctttaaggatttgggcttaaagtaaatcttgtgtttatctctccctccttgtattgagccccaggcttaggcttctcatcacaatgttagttcaacatttgtccccatggcaatcacagtttatgcatttctcaccacttactctttgtgttttagttcagtgtaccctttagagatgtcctgcaagcccggcagtactgtaaacatttcttgttgtaatctacttgtattgctgtgagaagtgccttagagtatccagcctaactgacaagaaaggaaattttcaaagcatgttacaacagtgcatgtagcaacaaagcatgttacaacagtgcatgtaacatgctttgaaaatttccatttttgaaaacaggaactcaagcaacttttctactatcagttctagatggcatagaaggacttgaacctggtcaaactgagcccagaacccaaaggctagcttactagactgtgcagtaacccagtatatcaagcctgaatgttggtatgtatccattgaggaaataagcctaaggaattgttatttcatgtcgctgctaatcccagtgtggttgataaagaccacagggtttgctaccctgtctgtaatttctaaaccaaagaggtttgatacataaaagggtttttaccatcccttactctaaattgactgaatgtttaaccaccagtctgactttgaaggcttccccgatctcttgccatgtacaaatgctcaatccctcttcagtgtattcrttgacctctgtccctacttctaattgctgtgaaacatctccacgtcctgcttccagcctatgctgaaagttctttgaaggtagtaactctgaccatttgtataccagatcagtccctgccatccagctagtgtttagcacacatttgttgaaggaattatgaatgtgtcattagtttttcaaatgttgattagcattatttgaaagtgagaggctgtggtacagtcacagaaaaaaaaattgatttgaaatcagaaaacctgatgaacagcagtacaaataacttgacttctaggaatggtgtggtggctcacacctgtaatctcagcactttgggaggccgaagtgggtgggtggatcaaaaggtcaggagatcaagaccatcctagccaacatggtgaaacttcatctctactaaaaatacaaaaattaacctggtgtggtggcatgtgcctgtaatcccagcttctygggaggctgaggcaggagaattgcttgaacccgggaggctgaggctgcagtgagccgagatggtgccactgtactccagcctggtgacagagagagactccttctcaaaaaaaaaaaaaaaaaagtgagaggctgtgctatagtcacagaaaaaaaatggatttgaaatcagaaaacctgatgaatagcagttcagataacttgacttccggatccttaaaatgatcagagtrcacgtgcttccaggaagtagagagactgataggttgatgggcaaagacatgagtgaagagagcaatcagcagccgttaggccttggtccctcactcccgccatcgctaccacctggtcatgactgcctggaagcatgggggtaacgatgaagtagaagaggacttctggctaggattcacccctttctagtctaagattggcaattctctccatgttcccagaaggcaagatggctacaattagtataagtagagaatgcttgttatataggaatagtgtctgattcaacgatggttgatagctataagtaccatagacatatgtgtatactctactgccaaaaactggaactgggtagggtagtattgtcagacataatttgctttttaatttggaaaaggtaataatgcatttcaatatgcaaataatatgtacctaacctaactggttaatattggacatagccaagtaaacaattctgaccttcaaaatgcacaggattttagccaataaatttagttgaagtcaaaatacgcccgattagaatatcttatttcctcctcttaagttttccaaatgtgatagaagttacttgaattttcttttacattgctttgacaatagattgaaattattggtgggagaaatagaaactctaaatgaattagtattcctcatgagcttctagaagccattataaaataagtagtcaatagggaaggaaatataaggcataagaattataaggtatactgtttgatgagacttccataaagtaattgtaccatgcagttttcaaacttttaaagttcaaactcttaaaaataaaattaaggtttctaagaaaatcaaattaattttttccagctgataaagattatccatatggcaattgactgctgctgtttgcagttatcatatttctttgtgattcccaaagtgacaatccagtttacaataataagctggtaatggatttgctctttacaaagtatcttatctatggcccaagtttctaaagattgaactgcccggggaccttataaagcagccatgttactaaagttgtttaagcagttccagtctgttgaaaagctttagtttatttgtttttataaagtccagtgacacgaagttggctggagattctgtggcatgaatcatttcctccctgcagtctgtcagcttgcaaacatgggcagagggagtgcctgttctgccctctgcctgttcctgcacactcccaagcttttgcaagttggtaggggggtaaacttgatgcagtgactctttgctggattagtgtactctttcaagtaactgttggtgaataaggcaggaaattatgttcctggataagaaatgaccaggctaataatacatgtggcaggtaaatgatttttcttataaacacagggtttagaaatatgtttttgaattaagcagtttacctgtaatatacaaggtatacaaaatccacttctggcatattctgtatatatttggaagtaacatataagtgcataagatttttgaaaatgggcattctgatatgaaaaagctaggtatttacacatagatatgtacatgtctatgagctaaaatcttattgaaaattatgtaatttgatttttggtatttctctaaagcaaaactaagttttctaacatttaaaatatcctcattaggagaagttttcaaaacctattgttctcagttgtttgtccgaaaaacgttacctgtagaggctgctttcttttatttgtttatttttatccctgtaatttttcacatgagtacccccaagagccctttccctagagaacagtgtaaatcacaccaaattattatgtcttgtttgtacatggatgatgaagcagaaagattttgggctttggaattagaatgaagtttgaattctgatttgtttactacctacgtgacacagaacaagttattcaatcttttcagatctcagttttctcatctgtaaaatggggatgacaacacctacttcatagttttactgtaagaattggaattcatttgtggaaagttatttttatattatagatccttactattagctattattactaaaaatataaagtgcctgacatatagtagacatttagaaaatgtgattttcttccatacttcaaccactgcatgacttcactcaggttggcataatcaagttatcattccattaatatatcaaatgactgaggatactgataagaactcttgattatagctgatctctgtttacattttgctcatgctcctctgatgccatttccaaagctaccccctatctcctggttcattttttaccaccatatgcttttccatattggtttgcngtgtagccttaaatgaataaacatttatattaagagtggcaaggcctttataactgaacccagtatgtactttgtttcattaagacttaggtagaattctaatgtttgcagttcaagacagtcattttggatatgtggattgaaccttgtattacttctcagactccatccatccttagtaataaagtgcataatttgggactcatataagaaatggaaaataatcacaaactgtttaagtgtttttatgtatattagagaaagaatactgccacatttttctaatttctttgttccaagcatagaattttagattttgccacgagccgaatacacagacatgacttttttttggaaattatgaagtgtattacttgaaattaatgagcttaaaatgtcaagtcactagtatatttcttgtctttaaattgtatgaaggacataagaaactcttgtctgtcaaactcatcacagagttgccaaaagatgtttcctgcttatatatcttttcttcagacaaccttcaaaaagtgtttgaaaaattttttttgatctagagaaaatattttaatcttctatcccttgarcttcacgttttggtttagccaaacaccatacaaatgaatgtgttgtggactaagcactttgacccactgaaagctccagctccagtggattgcttaatatttaccaagttcccctgaggctttaggcacaattagctagctcaggcaccctgtgtttggcatgagttgaattctatctgatttattcttggatgagagagtatttgaaacattaaaaacagagttaatgagctttctgcagaagcctttaagagtcctggggacatgtttgcagtggtaatttcctacagtgtctttggactcttaaattcctgcagttggctctcattggatgaaatgtcttaggcgatttaagatctaaattggcctttgacttatttacccccaaggaaatacagtttgctaagccttgatttatttcccatgatcataatacttcagaagatccatctcctctacaaatgatcatccaaaaaatggtatcaactgctctaaaaattaagaattaccctaaccacaggaaataaaaatagtcaattttggagttttcccttcattttcccatcagctcccagtaattgtcctagtcccagctgcacccaatataggtccacttctagattccagttgtcacatgtatcattttctaagtaaggcccgaagtgttaaaataacaaggcaggtcacaaatgttattatacatgtcttgatgtccttggcttacatccctctaacaatttctcatttgtgatcttgggcaaatataatgtctctaaacttcatacccaatacttgttaaagcaggataattatagcacctatctcttatggttgttgtgaggattaaattcattaatttattcattctaaaaatgtttatcaagtgccagataagtgcctggccttgccttaggcactggagacactataatcaacaaaacagaataaaatctctgccttcatgaagcttacagtccagtggatgagagtccatttaaaaaatcaataagtacagtgttggatattagaaggtgataagtgctatggagagaaaaaagaagaaggggaatgtaggaatggggaaatgcaattttaaacagcttggtatgagaaaccctcactgagaaggtgacaggaatgatgcttgtgcatatctaggggaagagcatctcttatgaagggggcagctagtgcagaggcttcatgttggagaaatagaaggttcattaggccagatggaatggattaagagaggggaagaggagtaggaggtggagtcagagagataatgagtagggaagggggtggatagttggtagacatacagctttgcagactgtgaaagggacttcgcctgtggcactcagtaaaatgggagccactgaagggttttgaggaggtgaaagcaagatctgacatctcttttaaaagaatcagtgtggctattgttttgagaataaatgagatataatacgtaaggtgtttagcacagtgcttggcccattgtaagcattcggtaattgataactgctattattattggtggtaaaagtaacatcatcaatattactagtggtatttattttgatattgatactgactctcttttattcttgctttatgaaatgaaagcaaggatatgggcaagtagtattgggtgttgggcctgctatcatctgcccataagttaaatcggcagaaggtgctgatgccagcaaattcaacatgtggtatatttcactcaacacatcattggctgcatgacgtaagcccccagtgcctttaccacccagcttcacatcattagagaccctcactgtttattagctctggcaaacaaatccatacataaggagccactagtggtgaagaaaccagatgggaaaatttcttctggccatatttctctttcatacctttatttcttgttctagtttttcttcttgggtctcctttctttggttttccttaatcactgagtggtgctcaggcagtgggtagaattcataacaatagtaccctgctcttatagactatctttcttcccagaatttccaaatgcctcctgccccctctttttgggacacatcctcttgttctgttggcatatttaggcattgcatagaacaaaatgaggcacagattattcattctccaagacttcacaatctctattttgggctgtgtattatgtatatcgacagaaacaatatggtgactcttttttaagctagatggttatgcaatgatgatggtgtgtttttccaaagcagcagtagtggtggcatttataataattcagacttagagttatgaatttccaagtgcataaccataaatatattgagtatcccatatccctttacaagtgtatgctcatgcatgtgcaggcacacatgaccagcagatgtggtttattttgttcacacagttttttcaaaaacctgaatttgttgtcaacagttattataaaaatctgggttttaaggatcttcttcaaaaatcaggacacttagcattcctctgcccaaatttctccatagcaaccatcagctggagctgtaggagccaacccagtggttttcaaccttggctgcataatagaatcacgtgaggtggtttttcaaaaatactgatgttcgagccccaccacagaccaattaagcaccattttcaacaacagcaatagcagcaaatgtttagtgagtgcatattttgtgcaagaaaccgccactctgtaaagagagctgatatataaaatatattcatgttggggacatatgatgtgtataaaaatgataaacaactataccggatatagaatatgcttagtaccaagtgaactatataaaacaatggttcttaaattttgctgcatgatagaactacctggggagctatgaaaacttctgatgcccaggttgcaccccagatcagttaaattggaattgggaggaagaaaaggtgctcaggcattagcatttttaaaaagttgttcatgaacaattatgtatcggtaaaaagcagttctccatgggattccagtgtgcaggaatgtttgagaagcaggatagagagcagggcttcaaaaactttaatgttaatatgcatcgcctgcgtattaaatgcagctttttacagaaggtctgggaatgaacctgaggttctgcatttctaacaagctcctaggtgatgctgatgctgctggtctactgaacacatctggacacaagggtgtagtgaatagactttgctacattttcgctctgtgaaccttagtagctaatttcaatgggcagcagtgttcttggcttaaaaatcagcataacaattcccacccttggagtgctgttagggttaaatgcaataataaacatgtgtaaagcacctggcacagcagataatcaataaatgttgctactatcactggaatttagaaaagaaaggcataatctaggaaggcatgaaggggattactggagcacatctttaggggtctttgaaataaggccttggattaatagaaagaatrgccagctctggtgttctttgtaatgagtggttgagtttcacagttaatcttcaaaatatgtacttttagttttaatttgctttctgcctttatgcaaaactgctgccaaataacaagtttttttaaayggacaaatttgagttcactttctctgctcctgccaccctctggtggaggcaccagcaagctgtaaagtggccagaagtgggtagcagaaagaatggacagataaagccaaagtcatgctgagggccatggctgtccccaygcacatgggcaaagaatacaactcaackgaaaatgtgtttttaaaaataaaatacttatagttttgaatcatggcaatgtttccagtgacagaagtgagggaagtagaaaaaagattgtagaaaagtctrgagttgttaaactaatgagaaaattgtctagttttctactattagaaggaatggtggtttttaaacatggtcacaaattctttggcattctctcatcaagagataaaggtctatatcccctccccttgaatttgggcaggcttgtgacttcactgactgagagaatacagcagaagagacactaagtgacttctgaggctagaccattaaaggccatgcagcctcctccctgttcactggaacacctgcttttggagcctcagtcaccatctaaaaattccaactaccctgaagctgccatgctggagaggccacatctgggaactctgggagataatcccagctcagctaagccttcctgtcatccttgcccaggtgtcatgcaagtgggtgaagccatcttgtacttccataccagcccagccaccaactgaacttcactgagtatccttaattaacaccatgtgaaggcagaagaaccatccaacgaagccctgcttgaattctggacccacaaaatcatcagacgtgataaaagtggttgctgttttaagccactaaattttggggtggcatggtgttgcttcacagcaatagataactggaacagaaggttttgttttagttttagtataagagtcacattcattcttcccattgaggaaaattacattttatttgtgtatatcaaggaagtcgtgagagcataaagaacattcaggactcaagagagctaagttcttttattgatgtcatttattcctaaattaatctatattataatctgacctcagtaaaatattaagggaatgttttgacagtggattgactggttcagtggtttctgatgttcttatggaaaaataaccatgcgagaattgacaggaaaacatcagtgtaaaggagacaaagaggagagcccagtcttacacaaatgttaaaatacactataaatcaaggggaattacaacaaattcataccaacacagaartaggcagacaaatgaacaaaatataatagggactggaaagtatagtgtaaatatttatgagaatttggtatatgataaagatgacattcagaataatgagaaaaggatgcattattctttaattaatgttgggtcaatgggctatttgggaaaaataacaaagctgaatacacagctactacttatgccaaaataaattccaaatgaatcaaagactccaacataaaaacaaaccattaaagtaccagacaagtttttaaaaataactctggagtgcctaaggcctttctaagcaagacacaaaacccaaaagctacaaaataaaggacagttatgttatgtttggctatataacatttatttatggcaaaaatataatgccatcaacaaagtcagataaatacactggaaagtatattggtaacacaaatgacaagggctcatttaattactatatacagcactcttatgaattagtaagaaaaacaatatctaatagtaaagtgtgcaaagcatttattaatttattcatcaaatatttattaaacatctaccaggaaccagtcactgttctctgggctaaggatatagtagtgaataaaacgaagttcctaattccatggagcttccattctagtcaacagacataaatgacaaaaaataaacaatcaagtactatttcaggcagtgataaatctgcaagggaaactaatgcaaggcaaggaagtaaagaatgataggggagtggttgctaaagacaaagttttcagaaaaacaaaatgacggaagtgtatgaaaagacgcacattgttaaaatacatacattccaccagtacagcgtagtttataatctcaaagaacagcgtacaacctaaaagtctgtcactaggggaatgctttaattataaatggaataagaacaacggaatactgtgtaaccccctcagaagtggacaataaatttgagtatattgatatgaaaagagttcaaattaagggccaaacaaaatgagaaagatagataacattataatatgaatactcttctatgaaaaaaagaatacataggtatatatgtatgtgtatgccaggaacatttctgggaagataaataaggttttaatgagggtcacaaactctatggagactcatttttcatgatatgctcttttgaactttttaaatttttttaaccacataatgttttatttctattcaaatggtaagagttttttggtgtttttttgtttgtttgttttttggtttttttttttttttttttttttttttgggagagacaaggattccagtcctggcacaagattaagactgagaaagtcactttacctttctgcttgactccttgcttttcccaattgtgaaaagaggaatttgaatgaaattatctttagacatcccttgaagctctgagattttgagcctaaaatattggtgttcattttgggggacaaaaaaaaacataaaaccaacaaaactgagtcaaggataccacctcattttatttcaatcttcaggtcaggtgcctcaccataaataagagcctttacatttttagttaaattattggccataggtcaccragaatcatggctaggtgctgaaaatttttaagtctaagtctgtatatattgccaaagaataatttattctaagtctttaccttcctataacccatctcccctgaagaaagttctcatgactggcaatcagagaccatctttggtgtaagggagtctgacaggagggtgggagaaggaaagcctcggttcctttgtgtacgttccttcttttctgcatattcagggggcctctctgatatggccagggaggaatcccagtgtatagaaaatggttttcaccatcatgtctgacttggccctactagtgacttttttggtaccaacaattgaggtgctgctgtaacaaatacctgaaagcatggaagtggctttggaactgagtaaggggtagaggctggaagagttttgaggtgtatgctagaattatagactttaagggcagttctagtggggtcttagcaaagccaggaatagaatgggatcatattagcaaagacactgccagttggaactaaaggagacagacaaaacaggacagaatgaaagaagcctgttggatttcttagacttgactggcctggaccatagaactatttggctgtgagcatgtactattcttaagaaaaggggagaagagcctgcaaagacaattcagagatcatcagggccaccatctcagtttcaacaggccagacagccttccactaaagtcttgggtctaggactgtccggtggaacctttgaggcggttcaggaccacctggagttttgggggctggaccaccaccacaccagtggaccagaagggcagagcatcaaaccaaagaggattattctcaatcctaaagtctgattaaatttgtcttgctagatttggrcttgctcaagatccttcaccctctccttttttcctakttctgtttggaatgggaatgtctatgctgtgtctttctcaccattgaattttggaagcacataatttgtctggtttcacaggttcacagctggagaagaattctgcctcaggatgaatcatacctcaagtctcactcatatctgatttagatgatatttagatgagactctggactttagagttgttgccagaatgagttaagacttggggaaccattggaatagaatgaaggtatttttcatatagctaatttgtaggagtttccatgataagccagactctgatatacaagtgctaagattatagaaactcctccagacccacagatgaccctgccatgtgtttttactaatataygtataccttgtgtacaccctttctgccttcaggtgaatgcactgagcctcactgcccatttggcgtgacctcactggcatctctctggtatagccaggaaggaattacagtgtagaaaaattgtggttttttatactactaagtctctgtcagccaccttactgtcttttatgccctcattcctaagtgtttcgttgtgtatttcctaagaacaagcacagcctcttacataactacaggctggttatcaaacccaggaaattcaacattgatacatactattattgaattgacatcctctgttcaaattttgtccattgtccaatcatgtctttggtaacaattctttttcccaattaggatccattccaggatatcatgctgcatttggtcgtcatgtctcattaggctcctttattatacagaaacatttcctcagcctttctttgtgtttcctgaccttggtatttttggaggatacaagccaattattttgtagaatgtctccagtgtgtatttctaatatttcctcaaagatatgttcaggtgatgtgcctttggaaggaaacaccacattaatgatctcatgtccttctcagtgcatcatatcaggaagcacatgatgccactttactccattattgaggatgttagttttaatcacttggttaaggtgctgtctgttgggttttctcattggaaagttactattttcttctttgtaattaatatatgttatgtgaaattaaataccttgagaccatacaaatgtcttttcctccttaaattttcacctctagttttaatatccattctgccttgaggaagagttttcccttctcctctgtttgtttgtttgtttactcatgtgtttatttatctgtatcaatgtggatttatggagaaatccacttttttatcttgagccttctgtgagctcctcattggaggatggatggaaaggaaagtcttcacagccttgggggattcaaaatcttgtttccaaaccaagttcttttaattaacttagaagtttgctcttcacttttactcatgagttgacacagtaatcctttatttgagagtggaaatccagacagagccgaaactcatcccctcctacccttccattcggatttccttctccttcctccagtgtgtactctcagtagcccaagtgtcagttccaaattcagtagccaatgtcttagcctaagattggcagacactctaagatgttgaaaaagtttgctttcccaatatagacaagaaaacccaatggtgagatcctagtcactcattatgctttgtgtgttcttccaaagtaaacatatttctgtccaatttgtgatagcatttgaagttcctttaacttttttttaacttttatcttaagttcaagggtacaagttcagatttgttacataggtaaatttgtgtgatgggggtttgttgtatagattatttcatcacccaggtattaagcctactactcattagttattttttctgatcctctccctcctcctatcctccacccaaaaggccctagtgtgtgttgctcccctttatgtgtccatgtattttcatcatttagctcctacttataagtgagaacacgcagtgtttggctttctgttcctgtgttagtttaccaaggataatggcctcactgttcacaatagcaaagacatggaaccaacctaaatgtccatcagtgatagactggataaagaaaatgtggcacatataccccatggaatactatgcaacctttaaaattcttaatagaagcatttaattgaaatcagggcacaagactaccatattgtaaatgatgtacttagtatcctcctaagatttttttaattttagcaatgcttagcaagagattgagatgacttgccctcatcttagtgtttaaaatttgctatgcatatgtgctttattaaatattgcattatttagattaagagataaaaaacaaacctattttttaaaattaaggggcttattaatacaaagttttataggagttttctttcctttgtttgctttgttttgtttttatcatatggaatcgcctaatatataaagtcagagaaataaatgataaaacagattaacctgcctttttccttcctgcacctggcaatgcaacactgagcctttggtgatatccacactgacctgcacagttcaggaaagtgacaaagtaactagaaaccacatgaaaaatgaagacactttatttgacttgtatgcttctgtgcttgctaattcacagtgaattgtctatggtcctagcttgaatacacagcctcatttctttgtgcgaccttcatttccttgtcaaatgtctatagagatttgtctattgctcagttttgcctgtagccagctgggtgacatgagttgctgtagaactgtgaaactctacaccaagcaattcatggctgtgtgacatttacactgactgtgtgtaggctatctaaacctttagcgttacttatggactacagttttaaactattctacacatcccacatgaaaaaaatatacaagacaaagagtgtttctgacaagaggttttttttttgtaagttggtttttctttatgcaaatatacttggggggtaagaatccatgtttcacttttactctgcatgtgattcactcttgtgttcagtctgcctgctctccttgttgaattgcaatttaacccctgaagttgtcattaaagagaaaatcgacagaattttatccagatatttgtcaatcaatgaatgaaaaaactagagtttataaagaaatatagtattacatttttaaaaatagctttatttatcaagcaatcaaagcaatctatacctaaagtgggaatttgaaaaacaaggaaaagaataaaaaagaaattgaatattcattcttaatttcactagccagtgtttatagctcttcttaatattttggagtgtttcttccaagtctttttctatggatatgtagtatatgtgtatgcttaaaatatggttgaattcatattttgtgtgtatagtttttcatcctgctgtttacatttaatattttgttgtgatgaattcttgcattgtgcgtttgtaggtttgagtttgaatggctgcgcaaagaccttttaaaaccaaccaccccggtttgaaatttgcaggctgcttctgatttcatactgctaaaacaaatgttcctgtagacatctgtgaaggcaaatcttagactgcatttttggcttctggtccattaagccctgttacattccttgtcatttttgaccctttctagctaaagcaatgaccagtcacgttcacctctcttctctagctcacagccctatcctcatagggacagcattactgaactggaccatggtgcttggcctaaaacatgttttcgtttctttggttgttgaagataagccagaatggcagcttgcccaaaagtgatccaagaacttttgtatggaagttttgtttaatagtactaacaggaatgtttttaaaataaaagttttattaaggttaaatttgttcctgtgttagaaagataaggtttattctcacatgcctgaactagttccttccaacatgtttgctagctyttctgttgacacaaaatgtcaatggcctgagaaagactttacaccctcaaaagagagataaaggaaactcaagaccatgagcttctttatcacagtgatacacatagatgctcacaccattcttcattgtcagttgcagaaccctttgttcctcttccaaaaagtgtctttgtgtttctcagaatgagctggctcactctctcccatctgtcggaaatgcaagagaacttcatggaaagcaagagtatatagggttccctgtaaggttagaggtgagctccaggcacttagtcccggtcaccatctgctctcatgtgtctagcrctacagacattgttacagaggtgggacaggaagtgtctgtcctacaggtgttaagcttctcattcccagcaccttgggtgccttgggatgaccttttctctcctgtctctgctctgactgatttactgtgtgactttgagagtgtgttktaaggacttgttctggaaaagattaagacaatttctaaagatgcatacactataagaagttgacctaaataagaacaaaaggtgagaaggcaaaggaaaacaaggctaacaacaaattggagtttaggccaaattaacaaaatgcataccactgttcattcaataacattttattgaatgcctaatatgtaccattgtctagaagacaatgtttttcaaacttcgttgcaacacattaatggcctgggaaaccatcttagtaagtgcccatcattttgaaaggattaggatgtgaaggcaagaacagaatatcggagggcattgcacaaagtaagggtattatatcctttacgtaactttcagatttatgtgtgtgtttgtgcattaggtcatgatataaaatttctctctgtggccatggcaaagaaagttttaaaactactgatctaagggtatacacaaatttagggctgagttttttagaagccaatgggaagagaaaaaactgatttcttgcatgatttggggtgctgatctacaactatacacaagaaaaaaatttctgctattcttcaccaagaaaaaaaaatgaataacatactaagcagcgtatttacagaaaatcctgaaaacttaatgctgtttcttttagcctcctcttttataccatttcatatagatactacatgcagggtgacagcaccatgttatgtctgaaattttccctgatgtaagctgtaggtcccatcactgttccctgccacatgtttgtattcttatgaatgctaagtagaaaaaaaagtattgatatttcttaaagaaattaccttaaataaacctttttattaaaatgaaacatacacacagagatgtacacaaatcattagcatacagcttaacaaattttcacaaaacaaatccacctatatgatcaccatttagatcatgaaatgcaatactgacaagaagcaaaaactctcttcacaccggctttcagcctgtccccaaaggagagactgaactccctggagttctaaaaccagagtttaattttgcttagttttgaactgtatataatggcctaatatagaatatactttcttgtgtctggcatattttgctcaatattatgtttggaagactctatcatttctgacttgaattgcactgtattacaagttttaatctgttctactattgatgaacattttaattgttttcagcttttcattattatgcaaagagcagctatggacatttttgtacaggtcttttggtgaccacgtgtacacatttctgttaggtttgggagtgaagttgctggttaataatatatgtgtattcagctttaggagatattatagaactgtcaaaatgattatacttcaccaacagtgtatgagaattccagtttcttcacatcttctccaatactaggtattggcagtatttttaattttagccattctggtggacgtgtatagatatctcattgtgttttaaattcacactctcctgataaataatgaggtcgagcactttttatatgttggtttgcatttgagtatcttcttgtgtgagaatatccaagtcttttggccattttatactgggttatctttttcttaatgatttattggagttcaatatatattctgaatatgattcctttgtaagtcatctgtaatgcaattattgtttcccacttttcactctcataatggtgtcttttggtgaacagaagttcctaattttaatataatctaatttcttaccttttcctttattacctccttttaacatttattgtttacttatttcttttttcctctattgttaatgctgtttgtgtcctgtttaagaaaactttgtttacccccaaatcatgaatatattcccatatgttatctttctgaggatttcgtgtttcaccttttacatttttaccagcaacccacctgggattgattttcctgtatcatgtgaagtgaggtacaaaaatattttttacaatatgggtatccagttaacctaccaccatttattcaggacaatgccctttctcaccacaatgcagtgtcacctttaatgattaatgatggtatatgtgtttctgtttttgtactctctttggagctcttgtgatctatttgtctatcctgtgtcaatagcatactgttttaattaatgtagatttataatcctgtaactggtagtgttaagtcctctaatattcttctccttcaattttgccttgattattcttggctcattgctatttcacatatatcttagaattagtttactaatttccaccagaaaaaaaaacccaagacttatgagattttgatagggattactgtatattgaatctatatactaatttagggagaattgacattttacaatattgaggcgcccaatctatgatcatgtattgatctcttctgctttttctcagtaaagttttgtagtttcccatttagaagtcttggatatcttttaaaaatggattttaaagtatttgatatttttatgccaatataaatggtataatttactgaattttattttctaaatgtttgtcgttggtatatagaattccaattgacttttatatgttgatcttatatccagtggtgtggctttattaacttattagttttaataatttatctggaggatattttggttttcctcatacaccattatgatttcaaagaataaccacagttttatctcttcctttttcagtcttttttttcctcattgcaaagcctgcaatttctagtataatgttttatagaggtggttatagaaattatccttgaattattcttagtcttaggggaaactttcaatattcatcattagcatgtttgttatacrgtttcatcaaattgagagcgttttcttccaatcccagtgtgttgtaaattggagagtaaatcccccttgtgaggtctttaaggatcacttcagtaaggccatggaaatactatgagaggcatatgcaattaaatgatctgttatgcttgcaggtcctagaaaggaaagcacagcacatcgtgcagaaggccgcatgggaaaagggccaggtgagcgggctcactaagtaactggggagcgaagagagtgaggacctacaaactgtgcctctttagtgggtcaggaaggcatatacaaggaaaaggcatgaggggatttcattggtgtgtttgaatgtcactaggtgamattcaggggaaggaaagaagggggacttgtggcagggaccagccttattacactagtacaacctggtcactggggcagggcgtgttcacaatctattgtagggctgttcaggcattttcaaaatttgccatacacctagtttgctgagtgttttatcatgaatagatcaatgcatccgtttaaaggaccagatgcttttcatttttctgtcaatagagtgctttacattgatagctaatattaaaccaaccttatatttttaaaagaaaaccctcttgcgttaacgtgttrtccttttaaaattatctcaggattcggtctgctaacactttgtttactttttcttccaaattcataaaaaatactagttgataattttcttttcttataatacccttatactgttacgggatcaagactatgctggcctcataaaatgagtttcatcaaatgagatgagacatgatcccacttcttctataacctgaatgaactatgtaaaattggtgtggtttttcctttaagtatttagtagaactcactctccagcagtttaggcccagagaatactgtgtgagtagatttgtaggtacaaattcagtttctttaatgagtatagtaccattcacatttttattattttttcctgtttgagtaaggtttttttttaagcaatgtgtccatttcattgacattttcaaatattgccatgaagtgttcatgtatccccttatctttttattgtctgtaggatttatagtgatttcttttttttattctttaaaaagaaattttttaaaaattttaaaggtttttttctttaaaaagaaaaagaaaaattctttattctttttttattatttattatttttatgtaatttttcctttctcttcttttatcttaataaatctggctataggtttatgattttattagtattttcaaagaaccagtttttggcttgattgattttctctgttacagtaactctgttctctgtattactaatttctgacctttgttattttctcctttccacttttgttgaccctaatatggtattatttttagggcttcttgaaatggatacttaaatcattgactgtcttattagatccttggctgtcattttttctgatacatgcatttaagtatagaaatttccctccactcacacctttagctgcatctcacacacttgagatggcatgttttcttctatttcagttaataatattgtctaatttccattgtgcttaatctttgacccatgggttaattagaagggtactgcttaatttccaaatatttgtgtaatttttagttattttattattgatttctgtttaattatgctgtggtcagtaaacatcttrtgtttgatttttgatctttgaaatttattcakactcatttattatcaacacataaattttggtaaatgttcaatgtgtattctgtaattgttggctgtaatgttataaatcaattaggtcaaatgtgttcatcaccttatccttatctacgttcttactcatttttaatagcctgttctaccagttactgagagaggtgtattaaaccctcccacattaattgtggattttcttatctctttttctagttctagcaatgttggctttatatattttgaggcttaataactaggtacattcagatttagcgctcatatctttctattggattcttttactattatgaaatgtcttttttatctctagtaatatcccttgtcattaagtttacagtatctgatattaacataatttacatgtaattttttcaatcctttttttctttgaaattgtgtgtcctaatatcaaaagtgtctcagttaagcagcatttaactgggatttaaaaaataatatagtatatgtagattttgtgaactgtttttctgcattttatgcaattactgatatatctgggttataatccatcatattactctttgacattttatttgccccagttatttactgttccttttcctctcctttgttaccatattttgaattaatgaaatatttcacctctactggcttgttagtcatttattcttttactcttcttttagtggttaccctaggaattacaaagtgaatcattaatttattagtatataatataagttgtgactttgactactttccagaaaatgcaagggacttaattttacttaccactcctcccttttgtattattgtctcacatttcaattctagttatgttttaaatcccacaagatataacaattattgttttaagtagttaatattcatttagatttactgcgtatttaccatttctgttgttcatcattccttcctgtgtttccaagctcccatctgggatatttctccttctactggaagtatacttctttaaatattcttttagttttggtctgctttattaactttatttaattttaattaaataaagcaaactttattagctttattaaagtctcattgacataaaataaattgtgtttaaaatatacaatttgataaattatgacatatgtatacgctgttaaagcatccccacaatcaatacaatgaaccaatccaacactcctcaaaagtgtcccagtttgacactttaaatgtggagcataactctaggggcacttagaaccatcccttcttttcctgggtttttgtattgagttcagcatagaactagaccaatatctgccaattccctgggccagcataataataaaaacaacacttacagcatgctttcttgagccaggcactcttctaagcactttatacatttttaatattgaacttactaatttaatcctcatcacgtctctataaattaagtattgttattgtcctattacggaacttgaggcacagagtagtttgctgcactctgcatgcctaaagtgtctatttgtttttattattatgttgtttcagttctaattgtgtccactcaatcaaaagaaccattataaagcttgttcttgtatataaccttgactgacagcctcaatccccagattctgctattgctccttcatggatagtggtttccctgccatgctttgtttggcgatcctctaggaatgattctctgaagtggtgaatgccatccttgtttaaaggggtaggagggacaataatctaattctacctaagagagaagacagtaaactgatgctgtgtttccattgctgttggaaaaaggacagtaaatgacagcaaaattgaatagcttgatagttgcaccgtataaattacccagcggaagagatgtgttgagagggaaagtgaggatttgatctctgcctttcagttttcagtcattgtcaaccacaaactacaaaaattggctcagcaaaccttggcttcatccaggatactagggagcaagccaagagattttttttttcccctgctaagttgctcaggattggtcttttgtggatatgtttacattggtgaataaagtcagagtactttagtcattttgcttcagtagtgtttttcatactgtggttgggctatattagtgggtaatgaaatcaatttagcagattattactaactttttaaaaaatgaaatagtacataaaatagaacaaaatagggtagagttaaatggaatagaaggtatccaagtgtatcacaggagtaagaatattattttgtggaacttttgtttcggagatatatatatatatatccctacatatttgtgtatatgtgtgttacaggttaaaacattattttttattgtggatcatggtcaaataattactgctgggaatttagtacattagaggattttttttacaattttgtgagaatatttttctatatagatagttttccaaatgttatttgtttctgtttgaacaggtcatacgtcagaatttgatgttcaggggagcagggaaagtcttcatgctgatgtagagagtagtaattttcttgttgatcaactacaagtagaaaacaaatttggcttatctgaatctgtctttattgtggttctatgttgaaattacatgtcttttcaaatgtcagatagaaaacatcccaaggaaataaaatcaccatagtgacattcaaatgccaacccaaaagtcaccatcctttaaaacacaggtggcttttggcaatactatacacctacttgccagtgattggagttcagaatttaccaaacaatatagttgctcatagttgattgtgatgacatgtgctgtttttaaaactttactatgataattgtataatagagtaagttttcatgtaaatacagttttccctcctaattcagcttagttaaaatctgtgtcaattgctttgaattaacattaaatggattcatgaacttgggtaagacctagttagtaatccaactgtatgtgattaaatttcccacatgtgggaaataaatatatatatatataaataatatataatatataaataaataatatataatatataaataaatatatatatatcagtatgtaatacattctgccaaatatacccattcactggtactagatctttacgaaactaaagaacagtcaatacaataaatattaataaaaatactagctctagaaaatgccttacagcagagatggcatgtaagtttcttcttaaactggttggcaatgcctgtctgggtgctatttgagaaggatttggagattgtggttggattcagtagtaaagaaagattgcaattgattagtcatctctgtggtgaacatgggagatgggcagtgatgatatatatgctttatgtttatcttagaactttctagyttagtaaattgttatggtatcttggaaacaggagttgctttgtctattttatagaaggaagaaaaagaataacagatggatgttgcccatagttaagcctttcagtactcttgcgcttgtttcgtttctgttcaggttcagctagattatttgtttagtccatgcctcataaatgtttccattttctccttttttatttccattgccactgttatgtttttgaccctcattaaagaaattatgatagaagctttctagatgacttccttgcttctggtgcttaaacagttttgatggggtcagaggtcatagactccactgaaatccatgcaacagctatgcaccatctctcaggaaattgaatgctcgaacaaacttctacaaattacttaaggagggttgtgaattccctgaggtctacacttaaattaataacccctagtctggtttgccattctctaattgatccttcacatttctatcaggctaatattcctaatgcacaacaggtattatattatcctttgctcagagccattaaatttcccattgcctttagaacaaaagtccaatctgcttggattagaaccaagtctttcaagctgtagcactgtttctgcctttgcagcctcatcacccattctctacctctgtttccctctcccaaacacacaaccttctaagccaaaccagaatacttgctattccctcggtatttcctgcacttcgctcctatagttgctgcagcctgggcattctttccctcatttccacctagttgggccctttctaaccttcaggccctgtatcttttctgattctcttatttttaaggatgtcacaaaagcactgagcaacaccttgtatggtaccttgcacagcatgactgtgtattcacctgcttgcccacagatcctctccatgccctgcctctgtattactgaggggctgcctcctgaggtatgtgcctcctctgggttcagccattggaaggccttggaggaagatcggaggactgaaggaagggagaagccagggtatttcttctccactctctctgcctcagacaatatctctgacaacagttgtgtctcctctgtggcttcagttcctgctggagtggccagttaaagctttcagtttctgctgaatgacccccaccccagggctccaatatcaacacctccattctcatctcgatagcttaggggtttcctgctggatgcctcattctcccctgttcgacttcacatcttttccttcacttacgtaatcaatcccctgcattattctctttctgtttaaatacttaaaccagtttatgttttcctggataaccctgattgatacagctggtgtttgatggatatttgctgaattttttaaaccattttctatgtaggcatctctctctttttttttttttttgagygcaacagggataagccctctatcagttatctagtgcataatgacattatttggaattaccagggakagtaacaaattaccacaaaacatagtttgaaatgattagcattcagtagctcatgagtatgagagttggctgggtgattctgccagtcttgggtgggctcactcatgcatttgtggtcagctgtatgtcagctaggtgactctgctcatcttccttgggctgtcttatatggatgggacttggctggtctaggctgacctggggtggccttggtggagacaactgatgtgagtcaactctgctatgtgtttctcatccataacaagctgtctaaggcatattctcatggcaatcacaggagagcaagagaaaatacttaaatgtagcaagaactttttcagacttctatatgcagcatatctgataacattccattgaccaaagcaagtcacatggccaaaaacacaatcaaaaagcacaggagaatagacttaacctcttcagtgagaggaactacaaagttacatgataaaagggtagatgcagggaggggtaaagtattgtgcctattgttaacaatactgtattttgtacttaaaaatttgttataatctgggcatggtggctcatgcttataatcccagcactctgggaggctgaggcaggcagatcgcttgagctcaggagttcgagaccagcctgggcaacatgcatggcaaaaccccatctctacaaaaatataaaaattagctgagtgtggtggtacacgcctgtcatcccacctactcaggatgctgaggcaggagaatcgcttgagccaggaagtggaagtgtcagtgagccaagattgtaccactgcactccagcctgtgtgacaaagtgagaccctgtctcaaaaaaaaaaaaaaaaaaggtaatctcatgttaattgttttaccacagaaaggaaaggaaacgaaaggaaaggaaaggaataaggaagggagggagggaaggagggaaaaattagaaaaaaaaaaatagatattgacaaaactcccaaaagcaaagccaaaagaaaaagaatttgtttctctagaagatataatgtgatggcttgtcaataaaaaaatgtccaccaacgtagcagaaaaccatgggcaaatcattgaaaggaacgcaggaaggaaggaaaaaaagaaggaaggaaacagggaggaaaattcacacaataagaaatacaaataatgtttaaacgtatcaraagatttacagctttacctacccaagatatatgtgaattctaactaggattccatttatctgctatcaaatagataaatataatgtttaataacatattagcaaagatatggagaaacaggactttcagacgtagacataaattgaaacaacctctatagaatctaatttggaaatacaatcacaatgtaaaatgtgcattcccattgaatggccaattctattgagatttgttccatattttaacttgtatgtgtgagaactggcacttacacagtgttatgctttgtagtcctatttggatagcagaagaaaagacttcactggccttcaataagtgtgatattatgggatactatttaactgtcaaaataaaactttaaaagaatgaataagcactttacaaaaaaaaaaaggccactaatacaatgcaatcaatctagctcaggcttcatatgatttagtgaaaaaccagagatgagagagagagagagagagagaaaagaaggtggaagaggaggaggaaraggaggaggagcaagaggaggaggaagaggcggagaaggaggagaaggagaaggaggaggaattaattttgctctaatattaacccctttaaaattgaattcayttaaatttaaccctttaaatgctttgcaacaaaatatgcattatgtatttgctagtttgttctgtgcaatttcattcatacaaagttactgtcaaaaaacaggccagtaaagagccatttataaataacatattagtaaaccaagttaaagggactttatttatcctttaaccttcaatttgcattaattgggagcagtcatgggaaatagtgccaacctcacctcaggtcagatggcttaacaaaatgaactgtttcatgcccagaaataactatattccaaatataaatatgaatcagttacaaaacagattcctttgaaactacaaaataaccacactgttaatatatttgtgctccaattaaaaatgtgcamagaacacacattctgagctaaagctgtcccagggagtgattctcatttttgctttgagtcttgtgtaaacaaaactaggcagtctcctttgagccatgaagaaattcacagcccctgtttcctaaagagaagaactgaaaatgggtatgtttaagttggaagggtttggggcttgaacttgttgctttaaatttccttcatcactgggaaatcactttcaatttgtctacttgaagaactctaatttggtttgttctcggttggaggcacagcatgaaaaagatgccgcatgtttgtattatagcaaaagttggaaaccacctcagtgacagtgtttcattttcttctttgcagttttatctttaaaacctaaatctgttctcaatcatttagaacaaggcccatgacatcagactgcctgggtgcgattcttggctggcctcttctgcactgtttgactttgggcaaaatgcttaactcttctcctctcctttcttcatctggaaaacggggtcatttataatacttacctcatacggtcattgtgaggattaccttatgtgaaattagacaaaataattagaacaacccagtccataatgtgtgtttaataaatgctgtgtatacaaacttattaattatatgagaatttttaggtttttcacagagtcaagttcagatayattgctcaaagcctaaatcaaaattacactctcaaaaaaaaatattgaggtccaatttttgcatccaaaatatctatatatatatagttttgtatttatatattaatgtcaggggtaatggtgtatatgtatacataattgccataaagtcataacaactgctacaaacacaagccttcctggctttgttaatgtagtctttgagaatcctctttgaataagcttcttaattgccttggtcttcagccgcacattatcagagtttctgactgtcagccaaatggtgaggtgaagttaaaggttttggacttgaaggtttatgaaatgggcggtgcagagagatattgaagaaaataaataaatacaactccaaagtctaccttaatgttgttttaaaaggaaagaaaattagtaataagcaagtcaattttaataaatacatttttccttttaacatactgagtgtccactgcatggagtcatagggtggaagaaccactgcagaaacaagacagggcagcttcttcagaagcccagagtcaagagcagagaaaatgtgcttatgctcacatacatatgcacacccacacataaccaacaatcgctttaatgatataacaagggcttttatgtagccataaacgttggatattgggtgaaaagccaacaactgagtatgtatttactcaatgtggcagttaaagggaatgagctggtatagattagcgtggttcaagcccacatccatcatattgagtcaaaagtgtagaacaaaagatacacaaacagagattcatatcatataggtaaattaaaaatacacaaacattgttcattgccttcgatatgcatttatgtatgtgaatgttaaaaaggaaaaatastggtcttgaaagatacaaaccaactcacattctgggcttggtgtggggttgtcaaggagattatacctatgctcyaatttttctaatttaaaaaaaggcattcttcatgttattttaaaatatacccttttttaaattaaaaaaaattagagcacaggtgacaaaatgtttatatttkgggtagtgggaacccagatgttttccctgctaacctctgtttttctaraatttctacgttatttacaacaacarcaaaaattgtaggactgcagttagttgaaaagcggcttgtcacttgccatgcaggcagccactcggcgacatcctctgcggcatggcaggtgtcgtggtctgtttggctgcctttctcatcttgtttgtacctgggagaagtgttcaccatatgattgcatttagcacaatctagacagctccatggcttcatgcttacattcataccctgatgaggaacccatcgcttccccacaggttcatatggcagtgccccacccgacrgctcaattgcagctcttatatgttgagacctattccaggaaccatccactgagataaagcaggattccctttaacgcacagtggctaaacagtttgaggttcacatttgccttttattcatcttcccagactgccaatccaaagctcttgggtcttgttcctaaaactccacagaaatgtacatctctgagattcacaaaagttgtcccatgcctgtaatgtgttcttacagtccttgtgttagagtccctttccctgaaaccatctcccctttagaataagattttatctaagtctatttgcatctattcaaaatcagagatagctctgaaaccagaccctatttaaacatagaaataagaacagttgtagattaatcgaatgttgggaaactttaaaacaacaaattatatttatcttctgtgtttccttttttccagatctgcgatttccttctggttggctgtcctgcgtgggtgccaagttccacacatgatttaatgaataagaaggtcagatgtcagcttgactatttgcagacttgtgatctttgctattaattgtccctttttagcattattggaattatctcctaatgtgtagtgttgctgctgttgttatttaatgtagttttgaactctataggtattccgaaaaaatataaagcattaaatgaactaaaaacataacagaaaagcaatgatactgattcactcgagaaaagaagagtaacagggcagtgagagaaaagagcccattttcacttgttatgccagaaaattgtgctcagtgaagatccaacaatcctttcccatgtgtcttttccttgagtgctaaaaaggcaggcggatcatgaggtcaggagatcgagaccatcctggctaacatgrtgaaaccctgtctctactaaaaaatacaaaaaattagccaggcgtggtggtgggcgcctgtagtcccagctactcaggaggctgaggcaggagaatggtgtgaacccaggaggcggagcttgcagtgagcagagatcacgccactgcactccagcctgggcgacagagtgagactccatctcaaaaaaaaaaaaaaaaagcatgagaattagataacccattggttccagcgagtcagatagggtacaagcacctgtgcagtaaagatccacttgactagcaagtcttctgaatttgcctttcagtcctgaggtatgtggtcatatcaagcaaccattcagatcactgggttataatttaggatccagtttgttttcattattataacaacacagtttcagtttatctctgcatataaggttgtgtcagaactttcctttctgtgtttattatttttagcagtttaaaaactatggaaaaatggctttttggtaataaggtgacattcaggcttggtcaggatctggcagagtctatagaaatgctcactggctgcgggagccaggccttttgaatgctgtctttgtgcctcctcttgcccatggcctctggcctattgtcgaggcgcctgggttggggtggtgctatctgattgtaaccagtgctagtattacagcactcagtgcccaggccctcccttggggccccctgtctggctgcctctgtctcccagccctccctagagaggaccagccatagttctcatatcaaaaaacactatttgtaatttatagaatgttcaagaaaaagagatcactragaatcttcaagacctatggttctctaagtgtttttcatctttacaaatagccctctccttttcccattggaaatcttccagtggcccccaatttgtaaagcatggaaaaggacagctgttctgtttaaagatgagaaggctcctgcaaccccagtccccagcctcttcttcatcccacctcaatcaaggtgacctcagaggtcttccattcccaccaggaaacygggggcacctcccaatacttgcacactctttttacaaggcattctcctcaatttacagataaggaaactaagaagagatttctataaatgctgaaaacctgaggcattagacacaaaagaatgaacactgtattaattcattttatgtagttctagaaaaggaataactaatctgtggtggtaagaatcaaaatagtgattaccttggggagaagagaggattggctggcaaggggcatgagggaattttctagagtgatggaaatgtttatagaaccgtgggctacctggcatctgttaaaactcacctgtgcattttactttatataaattgtacttccattaaaaataaaaacaaagaggaaaataaagaaaacataaattcggcatttagtgaatgaaaatactgtagccaaatatttgagtttgatcaatgtccttaaagctatgtgggctgtttattggatccagtctaaagtcattacgcagagtttctgaagattgaaaatcatgctgttctaatattttttgttcaataatcaccaaatccagaaggaaaaaactctcaaggaattccaagcaatgaaacctgtaacgtggctaagatgtgagacctgggagttctgggagtagagattcagaggacaatatttgattccgctgaccacagaggccaagaatcattgccctcccagtgtgtagctcccaggaggtttagagaggcaccatattccagatggggtcctctgagcttttagggctctgagaagccccttaaaagtctgtgctgggaggagtgctggtggggagagaccatctgggtcaccacccaacatgcagctggacttttatctgtttaggtattgggcttctctatccatttccatgtatataaagaattccgtaagtgagaaacacgtgacaaacgttacacatgttgtatacccattctggtgtatattatttccttaataagccaggtgacatggaattctacgcttttaactatgctggactttgcctcctaagattgtacagaaagacatggtccaggtctggcacattcaggatggttctgcagggtcacactgatctgaactcaccctaagagttatggatagtcttagcttcagccactcccccaaaagaaatgtccctcctgagcccctttccagaatttcgatgcaatcaggaatactgtgaaagagaggaaagatgaaaataagcttggggccctctggaggcgctgagcatgtaattggttgttgttggctctccatccaagaccatattgctcattgcctggggaaatgagatgccatagtgaggccccatcctgcggggatcccaaagatgcctttctttaatttgggattttatgttgttcagtaatctctacttcactgatataaacctcatttttgtcatgcattactttaacatgtgcttttaamaatattcatcaaattcaaattcttcataattttttttaatcctttgctcctactcatctgactgctttttaaatgccctataaaatgcagacttctcatatatcttagcagagtggaacttctggtgactgaggttgaaaggccttcagtggtacctgtcaaacaggctacttgtgaattcagtctttttgctttcaacgggcaagaactatgaaataatgggccctgtacctgtgttattgcagtagggcattttgaccgtctaaaaagcactttccttgccctgaaattctttgaaacaacttcatttgaattttgttattgtatattttaaaagtcaggtagtaaagtggaaggtaattattgcggcagaaatacagctaaggacataggccaggacagatgggacccaggggccaattctgcgttttagagcctgatgagcgaaatgggactgggatgagcaaggaaaaggtttttgaaaaaggaaatgatgacggcgttaggaaacggcaagaagagtcatgtggagctggagaaggaaggatttaaagatgctcaaatgttccagcctttgaggctgtattatttttcttcagaaaggacaaaatgtctactatttgagtgatttcccaacaaaggaccaaagcctatttcactcacaacacagatccacattaacacaaatttagttcactattgaagctatggtaaaactgaatcatacgtgaaaaagaacactttaaataagcaggacatttttttaacccacacatactgtgctttgcctgcacatgcacacaaatttcctgatcaaaccaaatttaatttagcaagagatttttctccaaccagtttagtttaatgtgcatgagagcagacatgaaattacacaatgtaagagtttgagcagaatttacttttttgcaattccatttgaaaggacctatttcaagtcattaagagtcaatttaaccaaatggaaaataacaagatataaatcatatgtttctccattccggggactttgggcaactgatcctgctagcgccaaagttcttgaaatttatttctttcttttctctctcttgcttttcttcttccttggtcaagtggctaatgtaacatgtgtgtagtcagattccagttattcatgagaatgggagggtaaaatgtcaattgttaaagcccaatttattgacatttttccacttttttttaaacagtatgcattttcatccaccaaactgcttgtaagagctgttcacaagttagaaaatatatccgggtttcaggtttttttgtttctttgtttgtttgtttgtttttgtttttgttttgagatggaatctcgctctgtcacccaggctggagtgcagtgccatgatctccgctcactgcaaactccgcctcccggttcacgccattctcctgcctcagcctcctgagtaactgggactataggcacccgccaccacgcccggctaattttttgtatttttagtagagatggctaattttttgtatttttagtagagatggggtttcaccatgttagccaggatggtctcgatctcctgacctcgtgatccgcccgcctcggcctcccaaagtgctgagattacaggcgtgagccactgcgcccagcccgtgtttgagttttatctccttttcctttccccaaatgtttccctattggtgctgttgagctattaacgatttaaaagcaggttgaaagaaaaataacaaacaccccaatgtgtatattatttttattctctgtttgtagacaaagaaacttagggtaaaatggttaggagcagtgcctaaagaattcactgtcacagtggcagggctgggctttaactcagatgggtctatctgcaagcccctgttctttggaagagaagcaatagatcaaagtataccaacataatacattggccaaattggagaaatagctaaatttgtgaagagatcaaagtattattttggggctgcccatagtgaaaaccattaaaaacagtgacttaaacagacaaaggtttatttttttctccaaagcaggggtcgtggttctatcgtcagcagggactcagataccttctatgactctgcattgctattcttagcatatggctttatcctcaagatttcctcttggttcaaggtaactgctggggtgctagccttcatgtataaattctagacaacagcaacaatgggggaggggtagaaaaaggcacccattactagctgtgtttttcctctttagggggtcttaccagaatgcccatcaagcaacttctatctacaatctcatctaccgactcgtagttgcaaaggaagtgggaaaatgtggctgggtaccttgccacccggaatgaaagtgggatttcgttgtgagggaacattgcggagacacctagcagacttggtcacaattaggcagctactggaggcccttcaagtacggagaggaatggtcaaggtggggctttcaagggactgatcttgtagccaagtgtatgatggataaaaaggggaacgatgaaagggggttttgagtactgtagtttgtggttataagctcggtattagtgacatggtatcagggataggagaaaatagatgcatgtgatcaaatttgtagagtaaattgaccaaggagaatgtgtttattcattagctgccatccaaaactgtgaactatgtttaaacatacacacacacacacacacmccatacacggaggtgtgtgtatgtatataaacacactatatatgtgtatgtatattcatacacacatgcatacataaaacaaaaacaacaatgtaaaacttttctagggctccataccaccaatagcaatgatttcacactttggtatccctaagaatcacctggaaaaagaggctaaattacaggctttgaaagagaatgtgagaaggagaaattgtaaagatgactaggaagtcatcataagaagccagttgtaaagatgagtaggaagtcatcataagaagccaagctggagaaagtaggaaagtcaggacggggagaaaatagttgttaagttttgttctccctttttccctttcttattccctccttccctgctctctccccttctttttttctttctttttgtctttaattttttaattttaggaggagtagacttatgagtttggtaatcatattttcataaacgtataggctcccaaataagaaagaaattaacgctcaagtcatcatcactccctttttttaagccataagacagcaggtaatgccatttttcagaagacaaaatcaagactcatctatggtgttgacagttggagccagctctttcggaactccttatatccaaaaaaagatcatagctcttttggaactctttatatccatggtgcacgatacactggcaggtgcacacatcccttgtgtgtgtaatctacacaaaaatgacaaagtttgtcagtacaactttcttggtactatgtgtttgacacccttagcttcaaggcaaaacctactttttattttagcttttacagtcagcaacagttaaataagtataacttggttttcttattttaaccccctctgattgcattttgtaaagctcatgtgagctctattttttcccaccaaatgctggagaggggcaggtttggttggcactggctgctggctactccaggtgtcttcccatgcagcttgctggggcaagtgttgtgatttctgttctgacatcctggacaaagtctctcattaataagtagatgcctacacacttacgtagtaaaagtataaaagcatgcatgggaaaaacacacaccaactgtaaaacagtggttagcttggtgagagatgagagagagagatgggttggtagtgttttgctgttttatttcttttagggtgatggatcaaatacccgcagatctgaatggtgggtacatgggtgtctgtaatattgttttatataccttgaatgtctgaactgccttataacttaaactttttaaaaaattaagtaaatgacttccttacaggcaaagtgatttgaacccttgaaatgaaatctttttttttttatttgagacggagtctcgctctgtcgcccaggccggactgcggactgcagtggcgcaatctcggctcactgcaagctccgcttcccgggttcacgccattctcctgcctcagcctcccgagtagctgggactacaggcgcccgccaccgcgcccggctaattttttttgtatttttagtagagacggggtttcaccttgttagccaggatggtctcgatctcctgacctcatgatccacccgcctcggcctcccaaagtgctgggattacaggcgtgagccaccgcgcctggccgaaatgaaatctttacttttagttttgagcagtctaagacggtgtttctcaaagtaaagcatgcattagaatcatctagatggtttgttaaaacagtgtcttaggttccattgccagagtctctgattcagtaggtctggagtggggcctgagaatctgcactttaacaagttccccagtgatgcatgttgcttattcagagactacactttgagaatcactggtctgaaggaatttttcatcaagacaactagagttttgttgattgctcactttttctttcattaaacaaatgtctgttatataaatgtgtctattctagcacttgaactgggccaattattgtgcatggatgtataaagatgatctgtctgtggtggaaaggatacatgactgttcaatacagttgtgcagtttggtcactgtgtaaatggtgcccactggagtactacagcttagccagatgtggcagtcaaaagaattaccaaagaaacaaagcaatgtgtgcacaacagtgtaatacatgttatgatataaatatgcatgatgttctttgagagatcaatagaacaatgaaacccaaaaatgaattgggggcatggagtcaggcaaggcttcctggaagataggatacctcagmtgagtctacacaggtgaagagaagttgtctggccaacagtaaatgtataggaggacaggcaggggaagtagaatatgcaaagacatgaaatgtaatttgtaagaagatggtaatagatggagtttaagaattcaggctggaccaggtgcagtggcttatgcctgtagtctcagaactttgggaggccaaggtgggaggatcttttggggccaggagtttgagaccaccctaggcaacatagcaagaccccatctctacaaaatcaaaaaattagaggggcatggtggtgcatgcctgtagtcccagctacatgggaggctgaggtggaaggataccttgagcccaagagttggaggctgcagtgagccatgatcatggcactgcactccagcctgggtgacagagggagaccctgtctcaaaaagaaaaaaaaaagaagaaacattcatgctggcaggacaggaaagttgaccatcargagtcagatcatgaaagtctaaggcgtttggatattaatctgatagcagtagggaaccattttaaaattgtaaacaaagtaattgtttgatccagttttatattttagaaagagttctatagggcaaggaagacaggtaggttggaggtaagattggccacagtggaccaggccaagtaagcagctattcattagcctaagtataaaatggtgagggctgcgctagggcagttccagtgtgaatagagaagatggatgtattcaagaaacattacagtagaattgacgaaacatggggattgatagaatgtgggaagcaagagagaagccatcaaggatgagtcctgggtttgtgtcttaagcagtgggtgtaagtaggtgacattcactgaactagggaagacaaggggaagagatctaagggccggaatagggactggagaaggtgagtttgggtttggacatttggagtttgaggtatttatggaacatttatgtggaggcgtcaaatgctcatggatatttcctgggctgcagacttcagtttggataatatctagatattaatcacttgtatttatatattattataaatattgctgcagtaaatatacttatatatacattttgtcttaacttctgattatttccgtaagaagtgtttctaaaataaaggctattgataaatataggaaaattattttacaagacgttgtgtcattttatgcttccattagcattgtagaagaatgtctgcctccctatggcctcgccaacrttatttaatcttaacaaactagaaaccccaatagtgaggctgctttaatgtgtactttactgattatttgtaaggttggacatttttcactttttgttgaacttcattaaaggattatttgttgatgtcatgcacccatttcctatagggtattgatttttttwaatgatttttaagaactctttttttctttattaaggatattatctctttgtccatctcatgcattgccaatgtgttgttctactttcttgtttacctttgttctagcagtagaatactctcagatgtcccaccaatatgcctgttgggctcactccctcgcctattgcaaagtcttaatttgaattttatcctctcattgaggtccattctatttgctacttcaaatccccaacaaggacagctcttgacagttctgatcccatagcatctttcaccttttcacataaaatatagtttatttattttgttgttagtttccatccactaaaatgtaagctccttgagaataaggacacaggaacctttgtctgttttatttacagatatatcccaagtacctagaattgtgcctggcacatagtaggtgcttagtatctattggttaagtgaatattaattgcttttatatggtcatttattgtcctagggtttcaacttttaatccatataaatgtatcctttaggatctgattggaatatctgatttattccattgtctactgatgaatgatttaaacacttaccattaggatttcccaatactcttacagcaactctttgattgaattagaaacaaaattcaaatttcttaattcctaaatacatcaattagaagtgagagaatgagggtggcggtggggggggtccctgagcatttacttggatgaacaaaatagttcatcaaaaaatgttcatctctctcacaaaatcgtctaattaccgattttattctaaacacaagtttttgtaattgttcattcctatgttatgctgacttattttatgaacactctcaatggcaaccatataagaagtccacactaaagaatggacagctttgacagggagcagtggctcacgcctgtaatcccatcactttgggaagctgaggcgggcggatcatgaggtcaggagtttgagactagcctggccaatatggtgaaaccctgactctactacaaatacaaaaattagctgggcatggtggcacgcacctgtagtcccagctacacaggaggctgaggcagaagaatcacttgaacccaggaggtagaggttgaagtggcccaagattgcgccactgcactctagcctgggtgacagagcaaaactccatctcaaaaaaaaaaaaaaaaaaaaaaaaaagacaagactggacagcttctagtgaagaaaccataccaaggccaaacaatttctggtttgggagtttgcttaataacagagggaacaactatttactagctccctttgggaaaacacgttgtcaaataaatatttactaagcttttctctatgcaaaacaccatgctatgccagtgggaggtataaaaagtacagccaattcccttaagaaagttgtaactggccgggaacggtgactcatgcctgtaatcccagcactttgggaggccgaggcaggtggatcacctgaggtcaggagttcaagaccagcctggccaacatagtgaaaccccatctctactacaaatatgaaaattagccaggcatggtggtgggcacctgtaatcccagctacttgggaggctgaggcaagagaattgcttgaacctgggaggcggaggttgcagtgagccgagactgtgccattgcacttcagcctgggcaacagaatgggacttcatctcgaaaaataaaataaaaagaaagttgtaactaaccgtggtggtggaggtggggagaaatcaggatacatattcacaaaaaggtgaacaatcattctagttatttattatttatattttggcaactacagatgaatggggcagatatcacatattcaagatattaagaagagcaaaagatgatggtggattgcagtgatctatgaatccttgactgagggcattagaatttgtatcaagcctagaagaataagtggaatttgactttaattaaagaggagaaagggagagggagggaaggagggctatcagtcctaaaacctattttcaacacttagcaggttttgttctcttgttgttgttttcattattgaaggcaatttggtatcatttctggactgttgctatattatgatttattacatgttggaaaattttttctacctcaaacatttggcacactaacatacctttgaaattgaagttaatcaatgaagaaaaacaggcagggattgttatatttagactgatcatcaaagacaacagcaagtgttctycttgctttttttagacagagtctctcactctgtcgcccaggctggagtgcagtggcataatctcaattcactgcaacctctgcctcctgggttcaagtgattctcctgcctcagtctcctgagtagctgagattacaggcaggcaccaccacacccagctaatttttgtatttttaatagggatggggttttgccctgttggccaggctgatctcgaactcctgaccttaggtgatccatccgcctcagcctcccaaagtgctgggactacaggcataaaccactgcacccggcctctccttgctcttttaaaaccatttgcaattaattgagagtgaaccaattactttctttcagtgctgtttttcttcctttgagaggaagcatttaatatgacaggcatcatgccagccattagttatcaatgttaacagggtctgaggcagcaatgatgaactacctaccaatctagggaccaccatgtagtaataagcttaacctttctcccccagcaaatctttcatgagaatgattaataaataataatttcatctgatagactatgtgtttgacttctttctcttctgctgcttcttcttattgtctgtaaaattataaaagacagacagccaaaagcaagaarcaagaatttaatacacagtctgaagagatagaccctgactacataagagcctgctgaaattatcgattttattcattttattttgatgttcccatttaatccaaaatcctatcatacatattttataattctcatgtaatcttaaatagtataatacatatttttcagcaagtagatacagcattgaatctgctcattgtaagagcatttacctacttgattttctggaaatcaggaataagaaacaaagatttgagcatatcccatttagcaaccaacagattacatggacctttagtgttctcatttaagcttggccttggttcatttacatcttggatctgtggactacaattatagccatgttactaaatgatttatgtttttatttaatatgttgttaatgaaaagtaactgatttctccattaaaattcaaagagagtagaagttgaaggtaaaaagttgatatgtatgcagttttctgtatgtatattatatttcacaataaaaaagaggttagagcaaaaaaagtaactggatgtaacaggatgggcaaatgacatctagtaacaactagcaacacaatttctcaaggaaaggagctgtttatttggaaaaaaatgccttggtcagtgtgcttggaagtaaaaagataaatttccaaaggatctgggtgacagtggaactgttctgctgtagacaaggggaggttttggccattactctaaagaagagaaggagaaagatagaatgaatggatggatgdaaatgaatgaatgagcaaactggacaaagcaccacagagaagacaggaggctataaagttaacaaagtgacttctttctatgacctctcaggtcctcaataaagaaactgagatgtgcgrtgtgtgatcctagtagatctgctgtagaaatgacctacctgtgactcagttgaaactgagatgaagcgtggggtgagactgaggcaggtcaagtgcccacaggggtggtatccaagrtggctggggagattgtagaaaactttcatattgggtgttcagaccaaggtggaagctggaagaggaggtcttttattaacagatgtagcacattatggtggtttataacagtactgcttatggtttaatccttgactacacataatcatttcaaacatttgaaattcaaagagaaacctaacatttcaaacatttgaaagaactattagatagtaagtttggtccactgattgctttatttcaagatactgaaatgatttggggattgactcccatacttaatttctaaatcytcctatttagataaatttctacaactggtattatgacttctggagtattctagtggaggtcctggggagaatcttcatctgcttatgccaactattggtstttctgatctcacaggattatagaacaatgaacatggaaagtttcttagagatgatcctttgctgctcaaagcatggtttgtggctagaagcattggccccaccagggagctggttaggaatgcagaatctcaggactcactccagatctaatgaatcagaatctgtactttaacaagatcccaggtgatttttatgcacagtaaaattggagaaggctgagtcaacaagtcaacatgcaagtggagctcttgcactccacatagctagatgtattgtatgatggttgttcctccctaagaatgctatttgaaaacaaacagagccattaacagctcctgtcttgcttggcttggggagcagttgccattttaaagggcagaaatgctgctcccagaaagtaaagagacaacaggatccaaaaaaaaaaaaaccaaaaaccgtgcgtaggaatggtggttgcctggggcctgacttagttagaacaagtcatctcattgaagaaaacatgatggtaacattatctgtgggccacttaaagctcaacggaatgacatcactttatggaaaccctaaacaccaataggccttctgctatagatttttgaggaacagaatgggagtgaatgggaaacaagtggrcatgaatgtaatgctcataagaaaaatgctcttatggccaaattcactcatgagctctgtatctgtaccgatctgggactgatacatttattagcacccaaatygtgtttgtgttacaaaaggtggcaggatattaggtaggagagatggagctaatcttttctgtgaaagattagatgattagatrcaggaccatgcaataaaatgaacatgggactattctcatatattgatcagccatagaaaatacaagcttctgtaacaagaaatgacttccagtagaaggatctagatgaaccattgccttgataataacaatggaaaagaaaacaattcacagtaatattcctttgcacctgagcaactatacattgaaggaatcagctttcagttcagaaaggaaatgctgaagagagattgtgatgccccaagatgtgcagacccagagatgaaagcttctgtccaggcaaagaaaggagtttcaggagttcctctaaaagacttagacattttaattatcctagtgaggggccatcagacagagatgggaggtgggcctggcccaaagcaaatacaataaactctttgttatttggtggatatagattatattaaccaaagaaaatgatacttaaatcatttacctacttttcccaggaactttaaaaccgttactgttttctaccttcatttgaatctatggaaactgtagttttaatttgaaagaatagaacagtttaagcttctactactggtttattttcctggctaagtgattaaggggacaaagtgaagtgtatacctgtataattgtttctctccaaatcaatattttgtaaaaattcatttttttctcaaaatttatcttgtttcttacattataaatatgccttaaaatatattcataattctaatttctcttggacttcagagattatcttatttttcttggccttatactataacccagtactgtccactaaatatataaagtaagccacaaatccaactcacatctgtaattttaaatttcctagtaaccacattaaaaaaaaaggtgaaatttattttaatactgcattttctaactcaatatgtaaaatagtattccaacaagtaaccagcagaaaaatattaatgagatattctacattctatttttcatgstgtcttcaaaatctagtgtgtatcttatacttatagcacatctcatttgaactaggcaagtatgaagtgcctagcagctatgtgtggttagtgactagtggctacagtgttgaacatcacagcatagattctaggacaatcattcctaacattttggattcacggttctttaggggaaccttatgaaaactgtggaccttcctcccagaaaaaaaaaaattatattagcatacaatcccccataaattttcaaggaatttatgaaaccttagaagcccgtcttagaccctcctgaggtaaaaatcatcccaaactgccataatttcatccccagtctcacatttttttatagttgaccttttggatttacataaattattttaaaaggaatctatgttatttctataaatgaaaaatgtatcatttattaaaagcaaaagatractgtaaaaaaaattagtactattctttcaaaaattcataaacctaccccctaaacttatctttcatatcactcttcgggatacactgcctagggatstggaaaccagatgaagagaccctgcttttgggcctcctctgaatggatgcaggaatgaagtggagtctgcagggatgtgctattaggtcattayagtaacacaactggttatgttatttaagcctacacattgagatggagactgggggtgtaaaactgggcaaagtcactcactttgataaggttcatggactttagaataaataattctaaagaaatacttttcttctgctgatttttcttccctggctctgtttgccagaagatacacctgaaactctgtcctcttgggggaaagggttggtaagagaaagagacctgggtagtggcttagatgagctctgctccaggccttaaagagatggctctttctgtcatcttctttgctagcttcctcctttcacagtctaattggtgagacccaatggacagaggagaaaggaaataagtgcctggctgcttgaccttcctgccacataggcctcaagtccaagattgcaaatgcaaatgccagcaagggttgggtgggtaagttcaatgagtcacttcttgagggactggaaatttggacctttgagcaaagtcctccccctttttttgtcaaatgttgactaatttgttattaatattatgtttaacattagatatttacacttgatatttaatactagaaacaccaaccagaagactgactgtagattctaattcagggtggattaggccatcaggatgccaattaaatcttctgccaaaacatcagtgctggttctcaactcagaaacatgttcatacattttgttggtgtcacagtgatgggagggctgggatgctactggcctttaggacattcagaacaaggacagtcctgcacccaaacatttgtcctgccctgaatgccataatgtccttgttgagaaacactgaaagagtaaaagaaattctgcagctcctcacgtgataatccggttcaactcttattaggagccaaaaccctgtttggtaaagagcagacaatacatttttctggagcatctctttcctttcgattggacaggcatagcagacacagcaggcttcaagtatttgagatttctgatcatcttagggtaatctcacatttctgcaaagtttttctttattttctctcttctggttttagtatgcttacactcttcggagggttttagcattattcttttatgaagtgactttcaaaaagtggcacccgaagcaatgacttgactgaaagtatatgactgagaagggcctctgttgctagactcccataatagagagcgtagctgggatgtccactcatccccaaaagggagtcatgctacaggtgtgacctccagagcagtggatgtctttgccctcggttgtttgaatacactgagtttgccataatgctgtgttccgcaaccatgccagttccactggaacatgtgtcagcttttattcggtgctgatctttttccctgaacaagcaagggtgtatatgacccattctctgaattttatatgagtgatggggtgttttgtcccttctactcgtctaggggatctgtccattgagtttatgaagaaaaactttttagtgtgctataacatgcacatgctaaagcatataaagctccatttttttatgtagttgtatacccatgtaactaccacttggaagaacatacaaaacatttccagcaacmctgaagtttgcccatgcccctctctgtcactgcctgccccataccaggattaccacttttctgaatttcatcaccgttgataaatgtttttatctgttcttgaacttcttttacatattacataatacatattcttttgtatttgacattttttgctcaacataacatttgtaagattcatacctgttgttacatatgtcagtattttattcttttttattgcagagtagtattgagtacatggatataccacagtatgtttattcattttcttgtgtaacagaaaactggattgtttccagtttgggactgtcttttggtggacatatccatttctcttggatataaacctaggggaagatttgctaggctatagggtagatatatgtttaactttattaaaaactttcaaacagctttgcaaagtggttatagaaatttacagtgcccccaacagtgtaagagagttcagttgctccatatcttctacaatacttgataatgttagtctttttaaattttagtcattataatgggtatgtaatagtctctcattgtggctttaatatgcctactcctttgcattttcacctaaaatgggtgagtcataaacgttgaatgtcatgtagaagtttttaaattcttggttcaggctactgcatgtgcaatggtttttgaggaattcctaacccttttaaggaatcctaactatttctctttctagagagaagtgatgtgtaattgtacaatcatctcagcctagtcagatgtgaaaattcctcacccacatccctagtgtggtatccccatggcatggccttgataaacaatgcacaggggaggacccaacattgctaccataggcatttggcaatgaatttgcctctccatacacagggaatcctgtctgttcaataatatccagtgagcatttattgggcacatactttgttccaggcactgtgctgggcattgagaaagcaacagggaaatagacacagtccccctcttttttgaaagactcactgtctagtgagggagtgagaaagtgaacatactaattgtcatgcaatgtgataaatgctttgcaaaatgtgtatgtattttcagggggcttggaggctcatagcaaaggtccttgaagagagcaagaaaaagtcttcccaggaaaagtggacacctgagtgagtgttacaacgagaaggggggcatcccaggcaaggcagctaccaagcacaggtgtgaaggtgagcttctgcgcaggtttctcgaaggttgttggcacagctggagcataaggcacatgcaggaggcacttgcaaaagatacagccaggatgtgtacagggctgatcatgaaggatgtacttaagtgaaatatattttgcagaatttcaacccagagactctcccttttgatttacctgcaaacaaaaagaatcatacttccctttgactgtctctgaactctgaattttcgcttctactcactttttgaagccaaattgcatgaaattaggccccttccttccttccttcctttcttttcattcgttcrttcttttttgagacaaggtagagtacagtggtgccatcatagctcactgcagacccgacttcctgagggtcaggtgatcctcccgactcagtctcccaggtagctgggactccagtcacacaccaccatacctggctaattttttgcatttttagtagagatgaggttttgccatgtttcccaggctattcttgaactcctgggcttaagcaatctgcccaccttggactctcaaaatgctgggattacaggcatgagccactgaacctggctgaagttagacttctttccatctctttttgtgaatatagacatattttctatttaacagtttagaaccaatgtgaattttcccatatatggtagtctaagaattgaattgtagtttcttaactaggtttttgttttgttttgttgtgttgtgttgtgttttgtatgccttccagacccaacaccctagccagtgcaatggctctgagtgtggcataagcccacttttagttttcttatgggattgagtaatgttcttggtgttagcatctctctttttattggaggagtaaggcagacacttacatttctaataaaagatctgctcgttgaaatcaagcgagtcctgatggtgttgggaaccttctgccgtgagcacaacagaggcagccatggggtatcagaattacctccattatatttaacaaacactcaggtagcatgcacctctttcgattttccatgcagtattccatctatgtagcaacttgtttacttctcacaagcaccctagagttggaaagtttccacatatggggaaactgaggcaccaagatattaaataacctgctcaagtcacaggtggaatttgaacccacaaactcatacttacagaccccatactatgcggcttctttttacttataaaatatacaggataaactcaaaggaacaaagttcattcagcaaacctttgttgagcaactgcctggtgggtgagtcagtgacacctttgccccagaaactcttaaccgatttggggagacagatagtaataaatgtttgtaatgcaatgttaacctgaggaggaaagtcactaactttgcctgaggaagttagggaagggcttctgcctgaaatacgggctcagcctttcacgaaaaggagtgaacagacagggcagttctgagttgtgataaggcatagcttgtttgggaggtgtcaagtgttctggggggtggaggatgttttaaggtgtgctgtggagactgaagttaggaataggactggtggaaggtggtacttggggctgggagcgggggtcttgtatgtgaagctgagaagtaggactttagcttgtacctggtgggaagtaattgagggttgttaagtagaggagagasttgataaaccaccctctggagagatctggtttggataacattgcaataattcaagagaggatgaaaatttgcagtgtaggttgtgtagactctaggggcatcaggtgagttgacaattaaatgtagagtctgaactgtagcatgtggtgggggaggaggaacaagggtgagagcaagagggcgagaaggaagaaaaaagggggagagggtgagcacaatgtcttctgaaaggaaaaaaggaaggaaggaaccgagggagaagggaaaagagaaaaaaggaaggaaaggatggaaagaggagagaaaagaatataccagtatatttaaaaaatatattatgatgaaatgttactggcatgatagtcctatgattcaggcttttagaagtatgtgctcagccaaattttgttttggtggttgaccagcagttattttcatgactctgtagtagcccattgagattgcttctatctaaagacactttgtcaggtttatgtaagacttcatttagggggcattgccttggcatgcagacagcttccaggccttacacaccagcagaaacatgttctctaaagagtgcaataaagcattttcaattcatagctgggcacctcaggagcaaacaagagctgtcacatggagcactttcaaaataatgcttttctaacaaaaaagaaaaaaaacagaaacatacggagatatttgaaattcatcctcacaattgtcaagcctgaatcataatggctttgaacccaaggaaactttaaacatatgaggatcataaaaccttactttaagccaaattatcgctgctctctgtgccagttataagcagcataattagtggagtgaactrcttctccctgcaattattattatcaggctggtgtaagtatatkggagttgagaggagagtaaagttctaatcgtaacagggtatgtagatgtggataaggtagcatgtcaggtgttagctgtccaggcagcctcccagtgccataggagtctcatttcactaggggtttaggttaccacaagctttgctcatcttcctgctgcratactggctcctatagaaggccgggaggcacagtgcagaatcctgagccagagagagcagcctggagtagtgagctgtttgcctgggtgcgttatgtggcaaaatccacacagccatgacgccagccaagcgtcagtcaccacaggcatctaaggtgcatttcaagaacatataattgggatagcttagccacgtaagtgcaggacgtggctttgggtcccaggtggtttatttgtttagaatgccttcattctatctgacttggaagtagagaatgagaagctcatgctgaggatgtagcgatgtcggcaggtcctaaaagcccagaggacagcagggtaagtgtcaaaccacccccgtgatgctctgtgtgtgaacactgaaggagattgtgttgcaattaatgtgtgggtcaagacgtgtccatcagggcatgggcttccaatggacaacttctcttaaaattctaatgtatccttcctaagggtgggattacagaaacgtacttgtccagtaattctcatgtgtcctgaattggaattaaaagacaaagaaaatataattcctaaatttcaagcttttccgtcgggggcagggagaggaaggagggtaatacatcgatatagattataatcctgtgttttttaaacttcaaaaatgttaaggagaattgtaaaaggaaattaaattaccttcctattctgaaataagaccctgcaggaatatatgaataaaaaatgtgtaatccattcctagtgccatcctttgagagacatttagtttcctcgagtaccatacttgaggggacacctggaatatgttccaaagaatggctctgtagaggctgaaggtttggggtgttccatgttacaaagaaaggctgaaagaattgggaatgtgcgatctggagaagaaaagactgcaggagtgattacagctatttttaagcatgagaaggactgaagcacagagcaaggaagacacttgtcctgtatttccctcaggaaaagagttttatcctttgggaaagagggataacagatccctttggcagtttgatgttatttaaaaaaaagacctctcctsagaaaatacatttattataaatgcaaaattgccacataatagcagggatctcacaggaccctgtaaaatacatttaaagatctcttgttttagatggtaggaccaacagtgaataaaaatttcaggatttggcttgatttaaggaagaatttacaaatagtttggttattgctgcaatggaactaggcttttcctaaggtgattcccttcctcatccctacagtctgaatgaataattgtgtagaaaaaataccttgagctttagattcaccaggacctggatttggatgcagacctgcttcttctagctgtgtgtcttcagacaaatcattaaaccctgccaaatatctgtgaaatggagrtaaaaatctatcattaggtgattgggctagttaaatgacagcaggtgtataaaacgcctatctcagtactacagtagattatgaacaaaaatatacttttcttagtacttctcaaaggtcatgaatcgaaaagaagaacaagaaaaagcctaattcctgcctctgcataagttcttcatgattatgttccctttttactgttaagaatattatagacagcattctagctttgtgtgggaagctacaataaatgtctaattccaaatttgcatcagatttatatttctgaaaaactttaaaaatgaactgaaaggtgatattatggtatcttaaagttgtttttttttttaaaaaaagcctttgaaccaaactgtgaatgaacagtgtagaaaaggaaatgtacttgaaatatttcaaagtgttttcagtgaggagaaacttatcctcaatttctatttagtacaagaggaaatgaggttgcattttaaggtaatacttaataatggggaagaaaagtaactatatatcaagtgaaaagggataacactaaataacaatagagcatataatagacattaaatgcctttctttaagaagtagagagaaacatatttttcaatggcttttggtaatgggctttttaaaatgttcaattgagatatgaactggaggatgtgaacatttagtcccgtgggtggcaggatattcttagcagcttcaaggatgtttgctgcatgggaattgtctttaattccccaagcagcaaatttgatggagcactacatccaaggcatttctggatgtgaaaggggtccctcaccttcaaggaatgtgcgccaggttgaggagttcagcacatactcctgaaaagatgagtggtgcagacaatgatttcccgagtggttgagaggaaagagagaaggttggagactggacctgatgacagctttcatggaggaagtgaggactgagctgagccttgaaaattgggagttgctgtcttcccatctcagtaaatggcggcaccattcacccaggtatttaatcccaaaacctagaaatcatacttgcttcctctttccctcacccccaaatccaaactctcagcaactcctacctattctgcctccaaaatagatcctgagtctgcacactcccaccatctccatttctgtcctgctgggtcaagccaccatcctccctttgaaatgtttcaatgatctattaactggtctttctctttggtcttttggatcatcctccaacccattttccacaaagaagccagagtgatgaagtcaccactgtgatttaaactctttaaaggttttccattagactaaaaataaaatattcgctcttccacatggcctaccaggccctgtgtgatgtggcccagactcacagatctcaccccctcttcttctccccctcactcaccatggctgagccacgctggcttcctatgattctttgatctaggtagatgtacaatagagaaaaaaagaatgtgaaaattattgaaggatatagaaggagatcagttctcaaaattagcaggagagctcggttttatgtaatgattctgccacacaaatgtgggcgtatacgtaggaagcatggtttgatttcaaggacctctgggaaggaaccttttgtatctcaaaacttagctctttcaccagcttcattaaattattttccaggacaatatacttcataaattcccacctatgaggaagtacagttagtatttactctgtgccaggtacagtgctaggtacaagagctatgatgatgaaaaaaataaaaagaaaatagacatgaggactttactttcttgctgcttttcagactactggggacccagacaattaccacagaagataattacaatgaggagttttacaaggtgccgtgagaacaccccccacatgggtggggcacctaactctgacttgagaggtcaggaaaacttcccaaaggaaggacatttaactgagaattgaaatagtgggaagtagggcagaaggcaagggcaagcattcaagttttcttggcaggggaaacagcacatgcaaaaacacagtgttaaggaaaaacatgacactttcatggaacccagaaaagttcaggatggttgcaacacagtggcaagatggaggaagtggagagaagaggagcaaggtatgagaagtaattgstggcctgtgcgtacaaagccttataagccattgcaaggtctttggacctactactagtaaatgagaggttttaagcagtgagattacatacgtgttgtagacagctcagtctggatagagtatgaagaggggctaaaattggcaggccatttgcaaggctgttctataatccaggtgagaaataatgttggtatgaaccaacattgaaagagcaaggatgaagagtccagaagagagatttaaaagggggaattcacaacatttggagattaactggatgacataggggtggaaatgaaaagaacaataagaatgattcctaagtttccacctcccaggggaccatttgctaagatacggactcaggtgtaaaaaaggggcttagggaaagatagggagatgtcacatctgctagtgaaatgcctttcttttttctaatctaagatcaggttttctttgtagcatgggctctggaaattctgaaaatagatggttggaagagtctatgaaagatggagaggagagacgagagggcatcatagagaaccattgaagccctcctaattttgcttaagccctggccaagatgtcaagcaagttcttctttcattaatacacagtatttaaaagaaatattgcatcttctagttaactgcaaagcctttccaactccatttttctgtcctgcttgggatttacattttcctcagtcagaattctatctactttggacaaagtaattgtggccccttgaggaataaaagtgtttcctcattccagctggcttcccatccctcttcagccatacacagatcctcatttacattttgggtgagtaagtgtctaggctgtgtggtgttttataagcttaatggacttgtgaatgtgggagagacagacacagagaaagatgaccatagatatctgcttgagacaccacccaattaatgtctgtgacatcatcccactttagttgaaggcttctgaaataagtagctcttgttttacctattacttaaactcttgttaaacaatgtcctgccatgagaaagagagttccttttcgggcaggatttttgaacagcagcactattgacattttggaccagataattatttgtggtggggaatgtcctgtgcattgtagggtatttaacagcatctctggcctctacccactagatgccaatagagaaaccccatacccaatggtgacaatcaccatgtttgcagacattgccaaatgtctactgagagatgaaatttcccctagttgagaatcgttgctttagagcagtgagtcccaaaatgtggtgctcaaatcaggagcatcagcatcacctaaaaacttgttagaactgcaaattctatgaccccaacccggacctactgagaaagaagctctagggatggggcccagcaatctatgtttaaggaaccctctagattattctgatgcacactgaagtttgagaatcactgctgtagagcaaatgagtggtcactgaagttctggaagaagtagttgtttatgtaaagaaagattttgaattaaagggaagtcttctctcttctgttttcctttcctttttaagaaatgaaatcaaagtacatcattttatttttaaaaagcaaaggttattggtaaatcgtttcctatcatgggaaattcttatagatagaaaacaatatataagtcacatgaaaagttcattattctgaacagaattcctttttcccaagttcacaaagattaaacagtaagtagtagcatgattgaatatcacattgacaaagagagattttaaataagcacacagagaaacattttgcaagtagaattgaattgtgacatggagcttccaatgtgatatatggctcccatttagggtagcaagcccactcgcctgcccccgtactcagtagctttggggaagcaaagccagatgtctgcgcaaaacaatccttttctctatgttcttccttaactttcttttccayttgtttgttcacttaccccttttctacccaacacagcactgaataggggaatggagttttttaatttatttaatcagtggtatacatcctacgtattttacaagtttatatcaaagttctatttttcaagtgtattttcaaattctgtgcattgctgaacaatttagtaatgtcagtgtcttccttgaaatgcttaatggatccctgaacattaaattagattccaaaaatacttttatcaaaaaaggaaatgatgctccaacttaaataattatttttagttaaaagcataacaaaataaggaagatgaacttagtaagacattattaattattcatttttatgtattgatttgttcaaaagatatttactgaatatcaactgtgtaccagaaataagacaaatacagtagaattttattacctcatggagcttacattttttctgtaggctgaagggaaggagtggggagaacagacagaaaacaactcaatagttcaaattttggattgcaccctgttagtgggttatgagatcaagttaatgggatacaaacagcttttgtgattgttcctttaattagcaaactcaaagagagtaaagaaacaaaactttattccgctaacacttcttaagcgtgttgttttgtcaaactattgttgcagttatgtgtgtgtgtgtgcatgaatcaatgtaaaacatttctgattatcaacttataaagtttgaaaaatattggaattttaaatcataatacatatacaaaaaggccaaggaggtaaggtagaaaataacaaaaatgtgaagtacaaggaggtagaacccactttcgctgtgtggtcagagatggcctctctgatgaagcagtattccagctagacctggccaaaaaacgggagccagaggaaagggtagggaagagctttccagacaaagggagcaccaagggcagaggttctgtttggggcctgagtagcatgggtatggcagtttaaatggcaaagaaaataaacagtttacttctttccttcccaggaagaaagattctagaacttttggttgatagaggcacaaaaacaaaaggggaacatgcacctattccataaatgaagaagagtttcacttcaaagacctagaaaatttccaattcaaataattatagaaagaaaacatattcaattaaaattgagcaaatattcattgagtttataccatgggcaaagtgttaactatggtgtatttaaagaagaacacaaatttgaaaatgtaagtatagagttctaagtacacatctacacaaaagaccaaagattgcaatctacctcttaataaaacaattttccattctcccgtttaacaaggcagtttttcacatgcctcaaatttacttttctctatttgtttttataacaaagatttcattcattccagaatgatttctgcctatttagctacctactctactttatatttcaaaacagagggatgttctgtatccaccagtgattttacayagtaggacctcaaacaaggcttggcaaagacacttaaaaccttcgtaacaccctaaccttgtattgttaagcctccctaattctttcatagaattccaaattttaaagcctgcactttggtagtagttatgcctgtttctaaccattattgttattgataatatcattattttaatacactctatctcccttagtaagttcaactgcctagagcttcttttgttttaatttttatttttttcttttcctccaacttttattttaagttccaggctacatgtacaggatgtgcaggtttgtacataggtaaacatgtgccatggtggttcttattttatagtcctacctaatatcccttccccaacctttctgacaacttacagcctgcccttcttcaaaactcaacctctcactttctttgccggatgggcaaaattcacagaggctgcagcgatggcaacaaaagctatttcagtggttgcccatatagactcatagtcttaacttgaccacagtgaactatggaaacaggccattagctaatggcctgaaactcctggaggcaaccttttatacttcagctcaaggcaactggaacctggcagaaatctttgagtatggacagagcaaagtcacagggaaattcttgaaggaccctttaagcaaatggtttggaacagcaatttgcagtcatatcaatagtatactaactattcatattctttccagcagtaattttgggatcttctggaacacttctgaaaatatttcctaaaaaaaaccatccagaattcagaaataaattttggcacagaaagttatttgtggcattatttgtatttggaaatcagccaaatatctttcaataggagaatgttaaatatttaatgttatatctacatggtgaactatataaagtcattgaaagtgctgtttatgaagaggttatagcgtgggaaaatggttcggttatgatgttaggtggaaaaaaataagaagggaatttatttagaatttcaactatataaaaaacagatgcataaaaaactaaaggaaataagaattgagagatctgaatagttgcattactagtgattttttaatacttttctgtagtttaaattttttctccaaagagcatgtgttccttttatgttctaaacaaataaactttagctcagactttaccatgttatttctcttcagtaaatttaaaactaattcatggtttcagatagtgttcagcatacacatggcactgtgtaggatatcaaaatttgcttgccaacatcagtgagtatatacttgtttagtttaattaaaaattattgccaagtaagaaagtaacattaatattttattataatttattattatatttataaaaacagccaagaactctcatatgattcatttttttattttgagaaaaaaagaatgatctgtaatwgtggtttgcttttaaaatatgactttttttagaaccagatatgatagactaattaattggctcctaataaatagtgtgcctacctaagtgattattaaactctatcagttaattktaggaaagtaaagagacaactgtttacatccagatagattttagctctcttgagaagtttcatcaaactccaaccgtacgtggttacagggttgtgtatcacattctgcaaggtacagtaatgtgccaattcaaagactttgagcaatgggccggaggcagagggtgtaagcctaacactttgtttcttgacccagtagccaaagtatgctatgccttagaaaaaaaaaacctgagatcagctgttctgatcaccttgcaaattttgtgatgcagccaccaccattcctagagtcgattttagccagatacatgcaggaaaatacaaagaatatttatgctrtttttctttgggataatttttcccttgttccccagcccatttataattcctgctttcagggaatctatatttatgacaacccaatcatcttggcctgtgcactgcatctcactgtgaggaaccagagccctctgtggaaggcagctttatagaggagaccacactgttgacagattcctgcctcctccctgtgggtggtctgaagcarggaaatctgagctttccagcgcaggcctggcatgtgccaggaaatttagattcgggggagctgctatctattacagttatgaaccttctgaaaaccagaattgcaggtaaccagtattccttctgcatgccaaagcaaaccccgggcccttaatcttcaaatgactggactattaatattaaaatkgtttctattatatagcctgggtaaagatttgttagtttctgaggtaaagcaacaacaacaacaacaaaaattgaaggacttttactttgaaacatgtctaaattagcaagaggaggaagtatgtttgttatctattggaagaaacacttttagaagcccattgggggaggagatagactcagatttcttgggagtcagcccagtcttggaaaaaaagttctaagaagtttagtaggagatgccaaggcacgattagaggaaggtaaacctgattttgaatgctgcatagaactaggtattcttggtaaagttcctgaaattttctgaacctttctgtcctcatctaaaaaactgagctaataataatactttttgtggtagatacagagggaaatgagataagaatggatgtgaaatgcctgaaatttgtggtgtgaagctcacataactctttacctcattattaaaatatattaaaatgcttccaacccattataaccagtttgcttttacaatgaaaatataatttttctcatttggtaatgagaatgcagtatgcaaatggccatgtctaaattagttttggatcaattaccacttatgatttctaccactatataagcagctgctaacattaatactgtaattgtaatcccccttgaccttaccctacacatgcaacttctattgctagaggaagtcccaaccctagggtgttggtgctacatccaccacccctacccaacctgtagccttttgtatataaaatgtaggccagctacctctacagcaatggttttcacactttagcatgcacttgaatcatcttagagtcctggatgcccaaccccagagtttctgattcagtaggtctcaggggaggacagataatctgcctttctaacaaggtcccatatgatgctgatgctgatgttgctgatccaggaaacayactrtgagaaccactgatctatataattcataaaataaactcaggaggttttcgtctttttcaatgggctagactagtttaaatagcattggaattatctgttctttaagagttaaatggaacccagctgtgaaattatgtaatcctgatacttcttccccccatttaaatgatagacttttaatcaccatttctgtctcttcttattacattttagtgcttcctcttgggtcagttaatttctgttttgctaagaaatcatccattttttctaggtttcacatctattacaatggggctagttctagtactttcttaataatcattttcatttttgtgtgcatgtttttctctatttgctcaatcctagtatttccccctcttcttcctttaatcatattaataagatggttatatattttataaaagaaccagcttttgaatgtatttgttctttctactatttttgttttccactatatttcagcatctatctttattaattccttcttcatactttatttaggtttacatttttgttcttcatgaaacttactaaggttagtactatgttaacgtcttagttcttcagtaatgaagctattatagctataagccacacatttttcctctgagtatagctttagctgtgtttcataactttggatggaacatattctcttttttattaatactagatagcttatgattttaattttgcttttctcatgaatcttacagctattataaaggatgtttcttatttttcaagtagataagatttactagctattgctttatttaaaatcaattttatttgcttacgatctaagattatatcctatcaaaatatctacttttaaaaaaaggtgttcattttaacctygtgatttatattttattaatattccatggacaatcagaaatctattttattaactcatatgatgtgagttctgtgtacaaatctattagattgagtgtgtagaatatgtcgttcaaatatttatgtcctttcttgtatttgggctccttgatcacttccaaaagtttcaaaatcatttcccaaagctaatataatctttattctaaaatctgaccaagaaaatacagacwaaaaaaaaatatgagctaatttcacatatacacataagggcaaactttggaataaaatattaccaagtacattccaaagccatctcaaaagaaagaatactctatgatcaagaaaaatttattcctggaattaaacatcgttaaaaattaggaaatctatcraaatatttgtccaatcaataaattaaaggaggaaaaagattataaaagtacatgtaggaaatgcatctgtaaaattcagcagccatttttaaaaaacttagtcggtgtatccttctgtttcacttaaacatgataaagactatccaccaaaaactaacaagtaacagaattctaatggcaaaactctcaggctccttgtagtaaaattagacgtaagagaatgtatcaattatctcttgtcccagtaatgttgcataactatcaaacttcagtgacaagtgataattaacatgtgtagctcacagtgggaatcaggggatctcagctgggcctgcttgcacgtctgtggtcagctatagatcatctcagcagctctgcgatgataatcgggcatgctcacgtgtctggtgtctggggctggctagctgtgggctgattgaggatggcctctactagaacattggaaaaactccacaacatattctcttcctgcagcaggctagcccaggtagcggccgagaagcaagagcaagtctagtgtgagaagcacttttcaggcatcatgtttgctgaccaccctttggcccaaacactcacctcactaagcctagactcaaaatatgagggcactgcaaagattcacagcaaagattcatggcacagggcctagacacagggaggagtctctgtatttgttttttctttgtatttgttttatcaagtgaaaaacaaataaggatctctgcttccatcaacattattcatctttgtttcaggggtccctgtgattttagttggccaagatgtaactggcataatgaatacaaccaaatgagaaatattaccttttttgttgatgatgtgattgtatacctgtaagagtggaaggactccagtaaaaaactggagtgcaacaatcagtaagaatatttgacaaggctgttggactaaaaaataaaygtagaaaaatcagtaagtcttctttatagccattcgttcaacaaatatttattaaacactcactgaataataagcattcatctggtccctagtacagtcgtgaacaaaagaaaaaaatcattttctgcatagggcttatatattagttgggggtaatggaaaataaatgagtaggtaagccagatggtggcaagtgctatggggaaaaatacaaagccagagaagaagtatagtaaatgcttagccgatggactggatggcaggcagtggtgtgttgttttctatgaggtgattagggagggcttcacttacaataagttggcatttgagcagaaacttgaggtttgtgacaaattctgctgtgcagacaactgtgacaagcacattccagttcaggaagagtgaacagcaagttcaaaggccttgagacacggttgtatgtggtatactttatttacaagaattatcaattacaaatggagatggaattttcaccataacaacataaattttaaaagacttaataagatacaacaagaaatgattatttagaggacataaaacaaaatctataaaaacccagggaaactatttaaaaaacaaaacaagaacagaggctaacttgtcttttaccaggtacttgaatgtgtagaagtgactatatcaaaacaactggatattggcaaaggagtaaacaaattgatcagtacaacagaatggagggtacatctagaacggttgttgccctacttgctaatacattcaaaagtaaatgataggtggataatggtacacattaatttaaattaagcagcaaacatgtattgatttgctattgctgccataacaaattatcaccaacctagcggcttagccaacaccaagttagggccttgcagtctgtagggaagaagtctgatacaggcttcacaagggcttaggtttcagcctggagcctctgagggagaatcaactttcttgccattctcagaggtcagccatactccttggcttccttcctccatcttcaaagtcaacaatgttgcatctctccaacccttcttccatagtgacatctgccgctcaaggattcrggtgactagattgggcctacctggataatccagaataatatccccatctcaaaatctgtacccttaatcacatctgcaaagtcccttttgccatgtaagatagcatttttacaggattcggcaataaagtcatggactttttggggaaccatctttgtgcctaccacaaacattttagagaaaatttgggagaataattttataccccaagtgtcagggaaatgtttataatcaatacagagctaattaataagggatagataaaaagataagcatactgtaccatgtaattttttaattgcatgaccaaacatatcataaacaaactaaaaaatacaggctagataggtgtcttacaacatgtggcaaagtgttaatgtctgctttgccacagcattcataagaatcagtagggaaaatggggaaaagatataagtagttaactcacagaaaagcacattcaaatgatcattaaaaccacatgaaaatacgctcaacctcagaagttttcagacaaacacaaaagtttatggtaacaatgagtatatttagtttcctagggctgcagtaacaaattacatgagcttggtggtttaaaacaacaggaatatatgctcacagttctggggagaagaagtttgaaatcaaggtgttgacagggccacactccctctgaaggctctaggagtgaatccctccctatctcttccagagtctggtggctcctggtgttccttgatttatgaatgtgtaattccagtctctgcctccatctttacctggccctcaccgcttctccctgtgtctcccctctgtgtgtctcttataaggacacttgtcattcaatttagggccagccagataagccaggataatttcatgtagagatccttaattatatctgcaaagactccctttccaaattaggtcatattcatagttttgggggattaccacatggacatatgttttgggggtccaccattcagtcactacaatgagatacccctcccatcaaattagtaaaattttaacttttttcattgacatatacaagcttgtaatatattccaaatacaaatctaccaaatatatgtattacagrtttaaaaaataattagcaaatatttcaaaggagcgataatatccaccactgcagttagatgaagagatggggggagtctaatacattcctgtggtctttgaacttttgaaaagcaatctggcaaactctattaataaaaaacacagggagatatcatatatgacccagcttttggaagctagcccataaaaataaaagcattgatatgcaagattctgtgtacaggaattttattgcatcattgttgtagggagggaaagaagaatctggaaaccaagcgaatgcccagaaattggggaatagttgggaaataaatgtggtgcacgtgtatcatggatattatatactgtatgcatagagattcgagaactacatggatggatgagtattaggttttatcatggccagagtggttggtagatcatgcaagaatccatgtttgagggtttaagtgaaaaaaattcctttcttttgagtcgcaacacctggaatagtgtatcaactttgtccttaattcctggtgtaactgagcaaagtcacgtgtaaccagccaccctgggtctctggttgctcagcctcaggtgaggaggtggcactgcctgtgagtatatgctaaattccaggagtagcaaagtgttctgccctccctcaggcatagggaaaatattgttttgtgttggctggacagatctagagatgtaatcggtggcttttgaagagtcattgctgagtaagtgagaaaaattttatgccatttagtctaggaattgagagtcagtgttgggatgtgcaactcaaagctgtcctgctcctctttcctgtaattcccctggagtattttcagcaataggaacacactgaaaaagtacactgcttcctcctccagagaaaaccacatgcatttaaaggtataaactctggtatgtttgctaaaaaaaaaaaaaaaataaataaawaaawaaaaaagcatacttccccagaagcctcaaggcttcctggaatttctgttaagaattcagatgtactgatgataaatttctaaataccacaatttcagccaattctgttaacaaataggaaaaaaaaagaaagtttttatgaccacagaaactgttttaaaaaattgtgggggaaatgcagttacacttggtaatctgtgaaaaacagagatcagatagagttcttgatcttttcaaattttttgcatattgtataggatacagcatcgggtctssaccaactacaggacacttacaaataagttattcacattaaatttcttgaaaagcatccaaagatcaagttactcattctccttcccccaggcaaggctggagaactacacagcccaggctctttaaggtctttcttatttttaaagaactcttagttataatgcatgattcttagtttcctctacatttttattttattctacagtgaacctgaattacttttcttttttttttttttttttttttttatgaractgagtctcactcggtcgcccaggctggagtgcagtggcactatctcggctcactgcaagatcagcctcccgggttcacgccattctcctgcctcagcctcccgagtagctgggactacaggcgcccgccaccacgcccagctaatttttttgtatttttagtagagacggggtttcactgtgttagccaggatggtctcgatctcctgacctcgtgatccgcccgcctgggcctcccaaagtgctgggattacaggcatgagccaccgcgcccggcctgaattacttttctaagcagaaaaaaaaatattaacttaaaaaacttatctatgtgatttgagaactatagttcataaagtattttggaatgaatttttaaaaaacaatcaaatgagtcacaatccataatcatgtctagagaccctttttcatgctgatttcttacaggaggttacaaaggtgagagacggtgtgcatgcagcaatggagggaaaggccttccatgtaagaggaacatgaggccaaatcttggcaattcacttcctccctaaggctctatttttccatctgttaagtagagatgacgataattcttatctgtacagagttgttacaaggcttagggtaaaaagtatttgaaaattgtacccagtaactaacaatctatgaaaatcagagacggtatttcttcctggcctcgttttcttcttccttgtttaaaataatcataaacaaatgcaatacaagatgtgttaggccatttgtcctcaaaatactattggcctcttaattatatctgaataattatttgcatgaaattaagtcaactttactgcaattgtaccgaattggaacaaataaaacttcaggtgggagaaatgttagaatcaggtttgtggttcccatggggcgtggatagtacctagaagggagggattgtaggggactggtaagcttcagatttttgatctgggtgccagtgacacaatttgtgatccttyctcaaggcactcactttcaatctctgcatgtgtctatttttaagtatgtgacactttaataaaaagttgaaaccaaaataaataaataaatatcctctatgtagtctttaacggacctattttcattttctcacatttcatatgcacaacattaaagaagaaatagaaattcgatgctttagaacaaggttttcaactaagggctggaatcaaactgacctaagagtttattagaaagtaacatgaaaatctgccccccagagatggtgattgagtagatctggggtggggcctagaaatatgtattttttaaattcaaaagttaggagccactgctctgaagtctaaagcacgggcccttacacgtgctacaagttggaatcacctgaggcatttaaaatgcattatgggctgggtccaaacccacagcttctgatttaattggtctgggatgtgtgacccgagcatccaggttttttaaagctcccaggtgattataatgtgcagcatcaagtgtggaacagctctctaaaacagagggaaggagtttggaagtctgttgtagctacttaacagcaggcgagaacagtgagggaacctcacatcatttaactgcctcaagacgaagccgccagcatcccaccatttccctggcctgtggatgccacgtaagrcaagtgcttactatatgtttctgtaatgagtatgcatttgtttatagggccttcataactcgtctgggtcatcaccatctttttagcctgtaaatttctaaatggcaggggcaaggacaggagaactgctttgtaaaagcaactaagtgctacaatgaaatagatgatcacaataatgcagaaattcctttctgcagctcgccagagaggcaaactccagcattttatatttcatctgcccccagtgacttcactgtaggaagaggaaatgcagaaaaacaaacgtcttgaagactgaaagcctgttattcaaagaggttagcagtagactgttggaagtaaggtatgtattccaagattcagtctgtgtggtgataagaaatggttgttttgatggaaaaatttatgcttcctattactcactcatcacttacacttcttattaattcattgtctcctttctaacccatggatactacctggcattcagtgccttcaaaagatgtcttccctcagatatgccttgtgatttctcatactatacgggtagagttaaatggggttagaagtactagggccactcattgtttatgaaggaagtgaaagttgctccttgaaatcaacaaagattcagaacccaaagtttgaatcattttacctatttgagaaatcaccttgctaaagggctcttcggcaggaagtcacaaaatcagtactcagttcttgctgagttccctgaaactcaaacctaaagtgtgtggatagccctatttaactgacatcccttaaggagccatgctcctctgccaggaacatcctccccctccttggtgctggagttaactcctgatcaccctccacaggatacctcctttatgctctcccggctcaccagaaaggaggacagggcttgctctgttctctgtactcttacagcacttttgttcctgtactggtcataggatgtgtcacagtgtgttataaatatttatcttctggtcaggctcttctgttagacctaggcttttattactggagggaaacttactcatattctcagcctctgaactcagtcctgtgccttggcacatagtaggggtcacaccacgtaattgcagtagacggtgtttgcaaaagaattgcccgtcctaacaatgtggccatatttattagcaggagctttgggaagtcaagcttctaaccgaagccgacattatcctaaaataggaagccacatcaacgctgccttttgactcaataaatgtcagatcttattccatccaaataactcttgactctccaactgagctctaatggaagatcaaagagcctctgagagctggtccttttctccatttcaagaagtgggttaatgcttatagttaattctaagctcttgactctaggctggaatggcaataaaggcatatctgacctttaattctaagtaaaataaaaagactggagagttgttacagaggcaaatgtaggaaagagaaaactaagtggaaatttggggtaggaggagcaaataatctttagatcagaaggacctagatcacctatctgtgctgtccattactgcagccactagccaaaggtggttaaatgtaaattaataaaattaaataaaattaaatggttggtagccacacagggctaatggctcccatattggaaagtgcagatgtagagcattgacattatcacagaaagttctattggacagtgcttgataaattccatcgctttacagatagggaacctgacagctggagaagttcagtgactgacccaaggattcatacatagttggcctagacctgagacccaagcctcaggaaccccaagctggcctcattaacactctgtgatacggggttttcctaagycaaagaaaatgaagagggctaacaagtttcaattgaattcaaaagtgcagagtagccattaagtagtgttatacaggcaaacttactgaaataaaatttgcaagcaaaaaactcctggcacaataattgtcttaagtggaaaacttaacttctgaacaaaaacttgtctttgtacttaagtcaaaacactaagttatgtcacagtaaaaagtaccattcaatcactcaatttaatgtcaggtgaagcagttgcatactaatcaataacctcagatgcacacatttgtgcctatttaaatgcctgccctagtaatcctatactgtrttattgtgtagtaaaatagtccccaaagaaaaatgtaccttcttgcatcttcgaagtatacatgcatgtggttagggctatcacttaccatctttagatattaattacttggcttttccaaatgttgtgaaatgttttttcatatttctatcttgagctagtttcgataatacaatgctgtgcctatgtttgacctcctataaaraatatcagcccccgttatatatttaaatctggtttccaggtggtgagttttcagacctaggacagcatttaaaatataattgtgtgaggaatttgagttggtatcatagtyacagggacatttttggacatagtatttcagaaagctaacatggattttattgaattcacaggtgatttcttacatttcagtgaagacatctctatcctgtttgttttagcaccttggatgattgtgctgagagccagtgtattattagaaagcagcatgctgctagcattaagggaaagtttccttgctagtccctagagtcaaacaaataagatttgtgtcatttgacttgaaatacagaattctagacccaaaatgacttaatggagytccttcacaaagcaggaactccaaggtagtgggtttaatttagttaattgggtggcatgacaggtcatcaaggtgccctccatcttgttgccctrctattgtctccgtgttgccttttgttcccaggctgtccrctcagagtcacctctctaggcagcatatgttcacacagccacatccaaagaccaaaagagaagcagtgtcttgtcacatgtgtcttcattacaggaaggaaaatatctcttccagaaaccctcctcatactacctctagcaaactgcctcttacatctaattgcccagaattgggtcatgggctcataccttagcattaagggaggttgggtgagtcagttactcaataatgtgtaacaaatcactctaaaacttagtggctttaaacaactattttttacctctcatgattcttcagtctgggctgggctcagcaatgtggtatttctgcttcacatggcatctgctggagctacaacatccaggatgtcctgggggttggccaggcatctaactttcttcacgtggtctctccgtttagctagcttgggcttcctcacagcatggctgcctcaggatggtctgactgtttacatggtagctggtttccaaaagagtataaaagtggaaactacaaaacctcttaaaacatagtctcaagccacacagtgtcacttatgcactctgttgatcaaagcaagccgcagggtcagctcaattgagaaggagtccacttctcttgatgaaaggaatggcaaagtcacattgccagagacatgcagggtggcagtgattattgcagccatttgtggaaacaatctaccacactggaaatccaagtaccagkcattttcagactctgaaggaaaacaagatggttggtaagaaagagtctgagtagggtgggtaattaacagtgagtctaaactaaacttgatgctgcagccgccacaatggcatctgctttgccgcactgatcacaacctggacacagcctattttagttaagcctccctaccctagatggcctttgggaatgtaatcaggccatgctcaggaaattataccctatacccaaattccatttgaatgaactgaattcatctggcctcattttattgaaagttttagttggtaaaagaatagattactgtacctttgtaacagaataaaaatgttcatgggacagataaacactacattcagcattatggcaaaatgatacaatttgattaaytgaggtagcatgtccttggattttgcaatattgtcttcttttcttttttgcatgtttgacatagtatataattttaaataaaatgacagattaccataatgagctagagttttcttagtaagaaggggaaaggcatttctagttgattttcattcctttctctatgattttcatttctttctcttgctaggggcacagcctaggaagggagaactctgcagtatgattgaatgatactgggatgggtgactccacattctagggaaagctcaatagcttaatgatcaacacgtctcaacattctcaaattcattcaggtatcagagcttgtagaagtcgtgataccctttcagaccaccccaaaatgatgatggccaggaacttttaaaagtaacatgcctaattttgggtaaaaccagcttatattttatacttgattctgggacagaccagtgagtggtagcaggtgcaaaaaattatgagcaacaaamaaaaactttgcagctgagaaattctatcaaatgctatttttagaaaattgataaaattgactaaattttaaataaattaaacttttttaactttagccaaagttctgttttttttcattgaaatgcctcagtgtagtttatgggaccccaatgttttgtatagtccaagattcccttgccatagatcagtgagagggcccaggagccgagggatctggtccaaacatgcagctaaaatcccttggttatagcattctattattgttattgattttcttaactctaacatttaattatcctgttagaactgtagttgaaatgagaccactgacttctttactcgacaagatttattgagagtccactatttgccaggcacagtgctgagaaccaggaagtcattaatgaggacaagatggttcctgacccccagcaggaagcttaacgtcgagccagggagaagggcttgaaacaaggtgatgcacacagtggagaggacagggagcttagaggacggcaccagcacagcacactttggggtcagcacctacatctcagttcagagccttgccaccatctaaaaatataaatattagaattggatgtgtccctgatgcttctggggactgaaagacttaatttttacagctactatggccctggagcacttaaaaaagcattttagtaaaagcaatccatgtttatggtaaaaatagtaataacattgagcagttcagaaggatataaaatgaaatgtagaaggccccctccctatcttccagccctactccctgtaggtgaccactagttgcattttttcattttcttgtataccttaccagaaatattgcagacatagtacaaacatgtgcacacacattgtatgtaacacagattaaattttttccttaaataataaaatttggcaccttttcatacctctctatataactttcactttatgttactcttttttctcaacagccacatattagtccattgaatgattagatgtaccaaaatttatttactgagtcttctgttaatggacatttaagttatttccagaatgttgcaatttcataaaacctacaatgaacatatatatatacatatatatttacataaatgactatgtctgcaggataaattccaagatgtagaatcacagtgtcaaaaggcatgtacatttggaattttgtcagatattgccaaaatgttggactaatttgcagtcttgttgacaatgtgcaaaagagccccagttatattttgcaagaaatgtagagtcagccctccatatccatggattctgcatccatggattcaaccaactatggattgaaaatatttggaaaaaaaatgcatccatactaaacatgtataaaccttttttcttattgttatttgctaaacaatacagtataacaactctttacatagcatttacattgcattatgtatcataagtaatctagagattatttaaagcatatgggagaatgtctgtaggttttatgcaaatattacacccttttgtataagggacttgagcatctctggtgtccaagggaggtcctagaaccagtcctccacagatgccaagggacaatggacaataactcatgtgcgcacagaaacactgatgaagctttgaaagcaaagaggagtttgcactttatatttaaatatgtctaggcagagccctgtgtcatttgctaataaaaggaagtggcaggactcaatattcaaaaggcctcccattttctgtgtctttcttctaaagtctttaaactgctgcatcataggaatttagtttactaaatccaaattacaaatttcaagtacaacttggcttctaatctcctattgtgagaggaaggctgtaacaggaacctattttgtggatctctcttttgggtaacgctctcaggtggtaaggtgtggaaaggtacattaaggaaaatgggagggcagttggaggggatcaattagtgttttttgcttaattaagcacagtcctctgtagtcccaaagcctgggctctgttgatctgcctgaaccacttctctttggtacggaaattcatgagaacaggacatcttacttgagtaacagatgccacctccctatagtcaagttagtcaagaaaattccaagaattattttaaggtattttatttcatgcctggcagagcatagaaaaatattagcttctagggctagacgactgctttggggtttccaagaaaaaggtttcaaggttagtcattactatgcaattctgctgctgtgactgattttaatgccatcccaggatcaacaattgctagaaaaatcaggcttcttgtcagaaaaatacatttcttcccctaatatctaattaattaaggtattttaaccacttgattgtgcatcgtgtctcttggaggagaaactgaattgagttgtcagagaatcaaaactttaatgaccaaagtcctttgaatataactagggaggaactttgattcataatcattttgtttcaaaatgctgagtatagtttttgaagtttacagtgaacatgcccaggatatgatgctcactggagagaacattttgtttataagatgtctcccgtgttaattcagacatttcagataggcccaaagagggtctcggcctggtgcctctccgttgtttgcagaacatggcaggcagacactccaaatgtatggcccaagagagagacaggccttgcatttaattaaagtaacccagtaaacttcctgaaagatttatccccccaaccccaccccttcatatctcaaaagaaacgtaactaagcaccaaatatttttctttctgctagtgttttgaggtttttcttggctcattttttgcagctcagacactatggaaaactttattgccttgcaaacatgtctctgggtggctgaggaaacagggaaagcacaacctaattcatttcttttctataggaaataatgcccagaagagtaaatgttgtctgccacagttaaaaatcagaagagaggagctaggcattgactttaaaagtaaggaggtttttcatgaaagacactggaggcctttgctggggatgggggaatctataagtaaaggtgaagagattttaggtttgtcaccatgatagggaacatcccaatactctgaggtatacatatagatataatgaatttttagtcatgtcagtaagtagggagattgacttcagcctcaaggtatttaaaaatatgttagagagatttcatgaaagaaaaaatgtgacagccttttcgatattttagcctaggctgcaattaatatccactaaccaagaaacagactcctcgaaataattaggttttctttgagtagctgctataataaaaagccaagtggtattttaattttcacgtcatttctgaaaggcaacttgtattttagttcttggtccctccctcctcaactccaaaaaaagaaaagactgatagagggatagataggtagatgggtaagtggatgagtagacactgatgaacttgctatttacctgaagaaaaaaaaatggaatgcaatctctttgaagggaaaactatataaaattgccatttttgtaggttaaaatgactgaatgttggcaattttttatgttttaacctaaaagaatatgcatccaagcacatttgaacttgtgtttgtctttactaaacatttagaaatttgtgatacagtttatgaaacatctttctcatagtgaagttgtctacctaaagatcttgttggtgctttaaatcctacgtgtttcatttctttaaaaattccttagtattcatgcagctaataggcagcagtaatgaagccctcgtctgtccacttgccagccttcccatttggccagcaagctctggcttgaaaccccacactgggctcttgtccatttttcatgaggctcctcatcccctccctcttcttagccagcactctggacaacagtcagaaatcagaagggctttatttccttaagcaagtcacttctttcagtgtttctggcattgctttggtgcagtggctttccaattgatgaccacagcccacagtaagaaatacattttacataacgaccaagcatacaaatggtgtgtgtttgtaaatcaaacaaaagtttcacaaaacaatcctaactcttaagaaacgcagtgaactgacgctttccagtctacttyatttcattttttaaaaggcactgcttgctacccactaaattgatttcacaacccacttatgtgttgggacccatagtttgaaaaacactgctttagtgtacttgattcaacccgggaattttaagtcttggcagtcaatcacaggcttgcttatatcggcagaaaaagacaggactattcattgctgggaacacggtaaaaacatcctttggcagccttcagaaaaattttttaatagcagtggaaataaacaggtattaaatctattaatggaggacagcctcagmcaaaaartaacaaggggttaaaaaaaaagagcagtcacatactcacagaaagtagacagaatcctgcagaacctagttctagaattttgtgtccaagcacaactctcagctgagaacaacaggttagcctattttctaggtagtatggaatgtgtaaatagttcagatgtagacggtggaaaactcacaatgttggtttagaaatcctggctctgcagctgccaatcatacttcatttcttgttaaggccaggaactgagacttctctgggcttccagccactggctgtcttcatccacatcttggccttcacccagccttccttttactaccttgggtcacaatttgtcctgctccggccacttggtagaaaacttgccttctatatttgggacagaataaaagatgctcttaaaacctagaggaagtcacgtatcaggtgctactggtatcatgatgtgttaatgtaccaaatcagaatcctattcagtgcaactttggaaccacagcttttgtgaagctataatgtggagaaaatccaagacaagtgcacagtaaattctgtgcttggcagtgttcactatttatatgagtaaatgttgttcctttctcttcttggcctttggctactggtgtttccttttaaagttcatgccaaagtagggtgggaatttatcatttgacaatagaaagtgaactggatctaatcagtccaggagcctacatttgaattgtgttcctacaatgcaacatcaggttctgccttcaaactttcctgctccccacatcatcccaaaaacattttaaaggccatcaaaagaatgctgtcataataaagattctcaaacattctctagaattgcagaaagctgggacaacgctcctgttgaaagttagttttcttctctccctttcaagttgaccaggaagagctggaagagcatttttcaggatatcagaatcccagaacaactctcatctcacttacaaactaaaggacagtgrcctcatacaagttatgcttcactagaactgattttcttcttctctaggctgggaaagccactcttggcctacattgctcataaaatgaatgaaagtttaaataaaataatgcacataaaaatactgtgacaaacatacagtccaactgcaggttctttttctgtttttgatcaatcaagacctaaattgaagtcttttaagtccttgtagccctaggaatctgatttttaaggtaaatgtgcaggtctcagatctgcttaaaggagagtgggtaaagctgaaggcgctgggtaggggacgaacagagttattsagtggcaaaggaaagaatatgaaaaggaaatgtgtgtaagatatctatgtagaacccactgcattgggtctgcaagtggtggtagatattctgaaactctgcaaaagcctggatttccacaagctttggggccttcaaaaggttgcttgagtacctatctgtgaatgttaaattttattccttggaatttacccaacttcaacttctgtctaacttgatcttcaacttcttactttacacaagcacatctcacttaaaagtgagaagggtcattttaagccccactctcgtgttcctcttggaaccccatgccgcccaggctaacggtgagaaaatgtagcacatgcccttctcattgccacatgcttgctcctcagagaaataaaggtaaagaaaggtattaaaaaaatagtgttttcatagaaggagatgttgcaatgagaaaactttgacataaaatttctattttatctagtcatactatggttactgggctttgaaactgagtttcaacatgaataaacaaagctgctagtgaaatgcgtcgagcttgaattgagtgtcctcagcctaagagtggatcaacattcttcagctatatctacaagccatctagctgtttgtccaaatgcagatttttgagatgtttggagaagaacctaacagttgaggctgaaatcttaaaccatatgcattaagtctcttatgtacaaaattcctctcttgcctcttagccaatgatggtgacagggttgaacggtgaagaaatggagcatgtctgggatttctttctttcctcccaactatgaatatcttcttgaaccaagctaaaaagagtacaaaaaatataatgctttccttagaaagttattgttttatgaaagcatgttggtattgttgaagctgttttgccaatacaggcttctaaatgggaagaggtatgtcatagttcaggctgctgtaacaaaatatcatagattaggttgcttatacaccaaacatttgtttctcacagttcttgaggcttgggtgtccaaggtcaaggtatcagcagattcactgtctggtaagggcccacttcctggtttgcatatggttgtcttctctttatgccttcacrtggtctttccttggtgcatatgtatgaagagcaaaatctctccatcttcatcttcacataagggcactaatcccatcatgaaggtcccaccctcagacctaatctaacccaactaccgcccagaggccctacctccaaataccatcacattgggggttagtgcttcaacatgtggatttgggcagaggaagacacaaacatttagcctataacaaggcataaccctccaagtgaacattataaagcactaaaaagactctaaccttaggaatcaatgtaatgcaaaatcacttttactctaggttaagaataggtataatttagcaattgtttatatgatagcagaagcactgttttcttgggcattttagttaaatttgagacataggaagttaccaggtagttagggttaaatggycagtattcytgggagaaaataagattaatatggcatcagaaattggttctatggcttttttttttaattayactttaagttttagggtacatgtgcacaatgtgcaggttagttacatatgtatacatgtgccatgctggtgtgctgcacccactaactcgtcctctagcattaggtatatctcccaatgctatccctcccccctccccccaccccacaacagtccccagagtgtgatgttccccttcctgtgtccatgtgttctcatagttcaattcccacctatgagtgagaatatgcggtgtttggttttttgttcttgtgatagtttactgagaattatggtttccaatttcatccatgtccctacaaaggacatgaactcatccttttttaaggctgcatagtattccatggtgtatatgtgccacattttcttaatccagtctatcattgttggacatttgggttggttccaagtctttgctattgtgaataatgccgcaataaacataygtgtgcatgtgtctttatagcagcatgatttatagtcctttgggtatatacccagtaatgggatggctgggtcaaatggtatgtctagttctagatccctgaggaatcaccacactgacttccacaatggttgaactagtttacagtcccactaacagtgtaaaagtgttcctatttctccacatcctctccagcacctgttgtttcctgactttttaatgattgccattctaactggtgtgaaatggtatctctttgtggttttaatttgcatttctctgatggccagtgatggtgagcattttttcatgtgttttttggctgcataaatgtcttcttttgagaagtgtctgttcatgtcctctgcccactttttgatggggttgtttgtttttttcttgtaaatctgtttgagttcattgtagattctggatattagccctttgtcagatgagtaggttgcaaaaattttctcccattctgtaggttgcctgttcactctgatggtagtttcttttgctgtgcagaagctctttagtttaattagatcccatttgtcaattttggcttttgttgacattgcttttggtgttttagacatgaagtctttccccatgcctatgtcctgaatggcaatgcctaggttttcttctagggtttttatggttttaggtctaacgtttaaatctttaatccatcttgaattgatttttgtataaggtgtaaggaagggatccagtttcagctttctacatatggctagccagttttcccagcaccattgattaaatagggaatcctttccccattgcttgtttttctcaggtttgtcaaagatcagatagttgtagatatgtggcgttatttctgagggctctgttctgttccgttgatctatatctctgttttggtaccagtaccatgctgttttggttactgtagccttgtagtatagtttgaagtcaggtagtgtgatgcctccagctttgttcttttggctcaggattgacttggcgatgcgggctcttttttggttccatatgaactttaaagtagttttttccaattctgtgaagaaagtcattggtagcttgatggggatggcattgaatctgtaaattaccttgggcagtatggccattttcatgatattgattcttcctacccatgagcatggaatgttcttccatttgtttgtatcctcttttatttccttgagcagtggtttgtagttctccttgaagaggtccttcacatcccttgtaagttggattcctaggtattttattctctttgtagcaattgtgaatgggagttcactcatgatttggctctctgtctgttactggtgtataagaatgcttgtgatttttgtacattgattttgtatcctgagactttgctgaagttgcttatcagcttaaggagattttgggctgagacaatggggttttctagatatacaatcatgtcatctgcaaacagggacaatttgacttcctcttttcctaattgaataccctttatttccttctcctgcctaattgccctggccagaacttccaacactatgtcgaataggagtggtgagagagggcatccctgtcttgtgccagttttcaaagggaatgcttccagtttttgcccattcagtatgatattggctgtgggtttgtcataaatagctcttattattttgagatacgtcccatcaatacctaatttattgagagtttttagcatgaagtgttgttgaattttgtcaaaggccttttctgcatctattgagataatcacgtggtttttgtctttggttctgtttatatgctggattatgtttattgatttgcatatattgaaccagccttgcatcccagggatgaagcccacttgatcatggtggataagctttttgatgtgctgctggatttggtttgccagtattttactgaggatttttgcatcaatgttcatcaaggatattggtctaaaattctcttttttggttgygtctctgcccggctttggtatcaggatgatgctggcctcataaaatgagttagggaggattccctctttttctattgattggaatagtttcagaaggaatggtaccagttcctccttgtacctctggtagaattyggctgtgaatccatctggtcctggactctttcgttggtaaggtattgattattgccacaatttcagctcctgttattggtctattcagagattcaacttcttcctggtttagtcttgggagggtgtatgtgtcaaggaatttatccatttcttctagattttctagtttatttgcgtagaggtgtttgtagtattctctgatggtagtttgtatttctgtgggatcggtggtgatatcctctttatcattttttattgcgtctatttgattgttctctctttttttctttattagtcttgctagcagtctatcaattttgttgatcctttcaaaaaaccagctcctggattcgttaactttttgaagggtttttgtgtctctatttccttcagttctgctctgattttagttatttcttgccttctgctagcttttgaatgtgtttgcccttgcttttctagttcttttaattgtgatgttaggttgtcaattttggatctttcctgctttctcttgtgggcatttagtgctataaatttccctctacacactgctttgaatgcgttccagagattctggtatgttgtgtctttgttctcattggtttcaaagaacatctttatttctgccttcatttcattatgtacccagtagtcattcaggagcagtttgttcagtttccatgtagttgagcggctttgagtgagattcttaatcctgagttctagtttgattgcactgtggtctgagagatagtttgttataatgtctgatcttttacatttgctgaggagagctttacttccaagtatgtggtcaattttggaataggtgtggtgtggtgctgaaaaaaatgtatattctgttgatttggggtggagagttctgtagatgtctattaggtctgcttggtgcaaagctgagttcaattcctgggtatccttgttgactttctgtctcgttgatctgtctaatgttgacggtggggtgttaaagtctcccattattaatgtgtgggagtctaactctctttgtaggtcactcaggacttgctttatgaatctgggtgctcctgtattgggtgcatatatatttaggataggtagctcttcttgttgaattgatccctttaccattaaataatggccttctttgtctcttttgatctttgttggtttaaagtctgttttatcagagactaggattgcaacccctgcctttttttgttttccatttgcttggtagatcttcctccatccttttattttgagcctatgtgtgtctctgcacgtgagatgggtttcctgaatacagcacactgatgggtcttgactctttatccaacttgccagtctgtgtcttttaattggagcatttagtccatttacatttaaagttaatattgttatgtgtgaatttgatcctgtcattatgatgttagctggtgattttgctcgttagttgatgcggtttcctcctagtctcgatggtctttacattttggcatgattttgcagcggctggtaccagttcctttccatgtttagcacttccttcaggagctcttctagggcaggcctggtggtgacaaaatctctcagcatttgcttgtctgtaaagtattttatttctccttcacttatgaagcttagtttggctggatatgaaattctgggttgaaaattcttttctttaagaatgttgaatattggcccccactctcttctggcttgtagagtttctgccgagagatctgctgttagtctgatgggcttccctttgagggtaacccgacctttgtctctggctgcccttaacattttttccttcatttcagctttggtgaatctgacaattatgtgtcttggtgttgctcttctcgaggagtatctttgtggcgttctctgtatttcctgaatctgaacgttggcctgccttgctagattggggaagttctcctggatgatatcctgcagagtgttttccaacttggttccattctccccatcactttcaggtacaccaatcagacgtagatttggtcttttcacatagtcccatatttcttggaggctttgttcatttctttttattcctttttctctaaacttcccttctcgcttcattgcattcatttcatcttccatcgctgataccctttcttccagttgatcgcatgggctcctgaggcttctgcattcttcacgtagttctcgagccttggttttcagctccatcagctcctttaagcacttctctgtattggttattctagttatacattcttctaagtttttttcaaagttttcaacttatttgcctttggtttgaatgtcctcccatagctcggagtaatttgatcgtctgaagccttcttctctcagcttgtcaaagtcattctccgtccagctttgttctgttgctggtgaggaactgcattcctttggaggaggagaggcgctctgctttttagagtttccagtttttctgctctgttttttccccatctttgtggttttacctacttttggtctttgatgatggtgatgtacagatgggtttttggtgtggatgtcctttctgtttgttagttttccttctaacagagaggaccctcagctgcaggtctgttggagtacctggccatgtgaggtgtcagtctgtccctgctggggtgtgcctcccagttaggctgctcgggggtcaggagtcagggacccacttgaggaagcagtctgcccattctcagatctccagctgcgtgctgggagaaccactgctctcttcaaatttcagatggaaatgcagaaatcacccatcttctgcgtcgctcaggctgggagctgtagaccagagctgttcctatttggccatcttggctcctcccccggttctatagcttatgaaggaaagataataaataattatctttgagctaaggcagccaagtgtttgtaaccatttttgtgcgctggaccctattaactatctggtgaagtctatggaccccttcacagaataattcttttaaatgtgtaagataaaatacgtaacaaaggaaactaattctactgaagcagagctttatccctagacctttggggaccatggtccatggatcacagattaagaactcctcgtacttgaagcctaccaggagataagtaagggagagtaataaggtttaaaaaggaatttttcagtgttataattactgtcttacaaggcaatgtgaggatgaaatacagagttttgaagtgatctaaaagtagaacaagaactcattgcatttggccgggcacggtggctcacgcctgtaatcccagcactttgggaggccgagtcaggtggatcacgaggtcaggagatagagaccatcctggctaacacagtgaaaccccgtctctactaaaaaaaaaaaaaaaatacaaaaaaattagccagccgtggtggcgggcgcctgtagtcccagctactcgggaggctgaggcaggagaatggcgtgaacccgggaggtggagcttgcagtgagctgagattgcaccactgcacctccagcctgggcgacagaatgaggctccgtctcaaaaaaaagaaaaaagaactcattgcaatgcttgaggagagagtgcccgagaatgactgcagaaaccatagcttctttcactgattcacttctctctcatgaactttccaggtgtttttcaatattagatgtttttatttttctctcaggcaagcgaacatgttcaagttttctattgtaaatagttccagttctccatttatggaatcgaagtaccaatcaaattatgttctttgaaagttgaaaattaaaatgtaagccagtcatagaggttcatacctgtaattccagcactttgggaggccaaaacaagaggattacttgaagccgggagttcaagaccagcctaggcaatatagtgaggccccatctctatgaaacatttaaaaactagctggaygtggtagtatgcaccggtagtcctaactacttgggaggctgagggggaaggatcacttgatcccaggagttcaaggctgcagtgagctaacatagcaccactgcactccagcctggacccagagtgagaccctgtatctaaaaataaataataaataaataaatgtaatataaatgtaaggaatgaatggtgcatattcatcagtgagcagttctgagcagctgccacgttgggtgctgtgctggttactggaattataggcattttgagacaaggttcttgcccacaagaagttaaaaatctggaaacagttacagagaagtagaaagataatttcaataccatgtgatgagtaatttttttaatcttgttgtctcaaatgttgcaatttaaatagagggttgtgatatggctttcttttctataatcctaggttctttgtaagtgaaaaatctgtcatcattttgtataaatgataatattatgctttctattcagaagcaaaaataggtttttcctggagatgctgagcagagctctagaggtcaaatattctatacccctgcttttgggccaggcatttgcagaccacacaaatagaataaaatctgcctgatttttaatatattacataacttctcagcaagtcttaccaattttaacactgttcaaattatttctcatttcttttccagtttctttatagcatactttatgcctgcttctgccagtcctgaaaatggaaattagccagacatcattatggcttttatatacttcatatattttatcaaataaataataattagtgagagagtgaacaaatgtacttgcaaggcattacaaatctttctgttgtgtaatctgtaattcagttccctttaatttttctgcatatcttctgttctctaacattattatggatttctttaacccaccttaaatccccaagcccttcatcagattagaagaacagaactagacttctgcctatttggaggaaaaacccagcataatgaaactgtccatgcatggggcaaatatcataccataattattggcaggtgaatgcattattaatgttgtcaccccttaattgagaacatcaattatttgataaatgtcaaagggctgatttattgtaacaagcttgaatcttagagactgccagtaattctttatacctcatatttatatgtaacattagttttggccaggaaagctcttgagggaaggcatccagaaggcagcagctgaaatttggggtaactttataactagcttaattctacatatttctagaactcactgaataacctttgttggtaaatgacataaatataactttgrtaacttttcacccaaaatcttgtrtagatgaaaaaactcacataaatcatagattttagatttgagagggaatatatagttatatagaccagtcattctcaaaatgggatcccaaccagcagcatcagcatcaccggggaacttgttagagatgcaaattcttgggtttgctccagactcactgaatcaaaaattctgggggtgggactcagagacgtgggtttctacaagctctccaagtgattctgatgtacactgtattttgaatattactgatttagattggcattactgacattttgaaccagatgattctctgctgtgagagagtgtcctgtgtattgtaggatgttgagcagcatccctagcctctacccactagatgcccgtggcacccgctcctcagtcatgacaataaaaaatatctccagacattgccagatgaaccctggggtgggatggaaggtgcaaaattgctcccttcccaaaattgcaaaattgataaccactgttccagaccaacttccaaccctgacacaggaatctcttctatggcaacgttgacagctacgattgttaccagtgtaagatatttgctttcccttctgcctttgaaagccatggaattgagaacttatacccctcctcctaaatcattactggaaacttaaatattttaagtagttttttattttgaagtttgcatataacttttataaatggtatacatttaatcatataaaagacaagagtaaatatgttttataaaatgtagttgattacgaatctttcttcaacactttgctccaacatcgtatcattcaggcttccctgagcacatacgactttccctcccctacccactcccagcagacactgggtccaccaggtgttttctgcacacttactccacgtctgttatagcattggtgttgcctcctcccttctacagtcttaagtcatgtaatcgtatccatcactgcatcctcaggacctagtcccctgccttgcacattgtggtaataataatggctaacatgtctgtacagtcactatgtcctaggcactgggctaagagttttcaaattcatttcctcataccttcaccaatgaggcaggctgtatcattattccttttgcagataacaaaatgtagatttgtaaaattaggtactcttttcaaggtaaaaatgttgagaaatgatgcaacctgggtttgaaccctggaattttgatccctgagctcaggctgctaataatcactgcactattgaaaagtgcttaataaatgtttggtgaatgcattcacgattaagttaataaatgaatgactgaataattgactattaagagctaatggtgaatgctttcagatgagttacctaaaagttcatacgtcaaccaattgtacaatgtgaataccaattattatacactaactggcaatattttggggaaatgatttarcaactgctaaaaacaatactacttagcatagccatacacaatagatgtttaaacttgtccttgagtctccaagtatgataatggyttaactcagaaggctgtctacaagagcatggaaaggaggttattaaaaaaaaaaaaaagtagaagactgcagggagatttcccacacttctttcttctcttgcagtccctggacatttcagtttctgggaaatgagtaaagcctgtggtgtgtgaaaatccagtagttattcagcctctggagtatatcagaattacctggagggggcatatttgaaatgtagagggttatggggaggtgaaactgaactgtagaatcagaatctcaaagggcatagcccagtctttcatgtagcgttttaaggtcctcaattgattcaactgtacaccaagaactgagagccaatgcatttcactgtctcctgtcagtcagttcataaagtccaaagaaggggacagaaaagaagccrgcaaaaaccagagttggatggctctcaaaaacccaaacaaaaatacacattttcatctcgctcatgttggaatctaacaagaaacagaagtatggccccccaaaacagtgacatgatgatggtggcaaaacatggctctccaaaccattgcctcaaatgtcagctttttccccctgacctcttccccttagaagaaaactgtcaaagttttcaaacagcagatacattagccacaaaggtgcctaactgtaggctggcccctcaaagcagagaatttttaagaaagttcagagtgtcctgagagagtattcgtttcaacttcatttaatagatgaagaaggtgggacccatttgtgtggccaattttaatgttgcataaacttagaagtggttattaatgccttgggaaaatgcacagagcatttttttaaaacttttatttaatttttagtttttcaagactataaatcttttttgcacgaagaaaataagacattttatttatccttgtgtgaatttaaaaatgactgctatatattgttttctatattttttccaaacaaatatttatgtttttcttaaaacccaagatacaaagttcctgtttcaacaagctgccgtgtaaatcaagaactaagcttacttgcttctttgctctttctcatttttctcttcaatcgatgagtagatggatagataaggaaaaatagatgaatgcrcaaattctcatacatacacataatttagagttcagatattgtacattttataagtacacaaagctcataaaacacaacataaaaaaaactgtctctctcatagaaaataaatagaaaggcaaataatatatgtgatatgtaagtgaaacctttgctggaagtaaaattttctattaggctcagtgtttcttaaaatttaattaaccaacaaccaccaattggggaagcaacaatgccacattgaggtagtgaaccaaataagatgaatcttcccttcactttttctaggcagacacctgtgaaattgagctgctttgtatgtcatatataaggtataattgcttttgattatgataatttaaaaaaagaaatagacaagaaagagagaagggaaagaaggaaaggaaaatggaaaggagtgaaagtcaccaaaattgttcattacaaaggctataaaaagtgtttagacacatactcattcctggcttcttgagataattttttaatatttggtaatactgtgcatgcatataacccacaaagaaagagaacacaaatgaatctataggctcttcaaaatagcactattttgcttccctaggtaaccctaattgcttattttttgttttctgttctgaacgttctataatttaagtccatataaacagtatttcaatatagtatataccattattaggcctgtgtaagtgccatcagatgctattcatggcaagtgatacaggctttccatttatggtagtgatataatagttcagttttttaagtggatcattgtaaagaagtataataaataatagggcagatgtctagaatatgaatgtctaggcaacaagtttgttagatcaggtcagtatcgcctgagtttcacatttcacaggtgagcataatgttaagaaaaaaaatagaggattgacaayctttctattttgctaaataaagytatctgaaaacagaacaaaccaatatttatgctatcacaacataaagaaataatattttcctacccccaaagcaagaaaaataaaggataggcctttctgagaaaatatggttggtagattcaaaaagatacatacatacaggcccatagttccttatccaaaatccttgccagaaataattcagttttgtttgcttgggtttttgaggrgtgggggggttcgggaagatagtattgtgctctaccgcaatgggtagaactctaccccagtgacatctgggggaaygccccattgcaaacacatgaatatttctgcagtgaagcatacaaatatttacactaagttggatcaataaagactatgaaacactcatatgaaatcaggtcagcttctgccaccaactaagttatgaaaaaactttctgtcttcacaagctttaggattttgagattaaagctaaggaattatgtgcatatatatcattgccctttttcttctcattttgttgtggagcagggaccactctttctgacaggcacaatttattctaattattcagttataaccataaccctgtggtagatgataagagatattaattaatgtcatattccactttaatcttattggagagatttccaaatggacacctgttagaatgtaagctctatgaagcagggaaatctatattgtccactgaattaccccaagcacttaaaggtgtgccagagtgcctgacacattgtagctactcagtatttcttaaataaatgaaagatttgcaagttaacagcctcctgcaaatactaaaattattgttggcaggtcctggatagaaagagtggagttgtggtgtgtgtgggtgtgtgtgtgtgtgtgtttaattcakagcaacctgttacattctttctattagaaaaagcacgtgtacatttgaatgcttcacacggattcttccattgtaaacagaatttgggtaagggagctccaggtgatgatgtcatatactgaggtatctgaaactctgagtcaaaaccaacaagtacttagtattgatatttgttttttaaaaaactgaatatttaattttctttgctattttggatccagagggtctaaaaataggtgaagggtcaatgaactttaataggaggaaagaccataggaagagtaaaataatcctgcgaatgaatatttgaagtttgaaaaggaaattgcttagtgctaaggatctgaaatgatttatatggtcacaacaaaagtgactacagctaggtgaaatatgatgtcaaaaaagaaactagtgtaattgtgacctaatcctaccagaaatgaattagttctgtcctcttgtcttgacttacatgctatggttttgagaaaagtgtgagtcaatgagcaaaaattccttgccagggaaaagatgtacccccamataagggtaaggtagtatcagtatcctttaagtgaggggaacatgtgagtgcattacaaattgttggcaatgtttttcagaactaagacaaaatcctgcaggcacttaacaaacatggtatatagggaaattttatttggttttctggggggctttgagagggtttttggttggtttttttgtttgtttgtttgtttttgtttgttgttgttgttgttgttgttgttgttgttgttttgagagagagtcttactctgtcacccagactagagtgcagtggtgcgatcactactcactgttgcctcaacctcctgggctctagtgatactcccacctcagccttgagagcagctgagaccacaagtgcgggccaccacatctggctaatttttaaaattattatttgtagagaagagatctcgctgtgttgcccaggctggtcttgaactcccgggctcaagcgatcctcctgctatggcatcccaaagtgttggaattataggcataagccctatgcccagactataggaaaattttaaattgtccgcaatcctatccatccaaagatkatggagctaaattattaatgagtagccactatcttctaaacataataacccaagaccatcataatcataatagctaataatcaaatattaacttaggacctgtatccttttctctacatcatttaccatgtgataaatattttcccttctacctttactattgggaaacaaagttccctagagcttacatacctgtactctgactattaaattaattattaaattaaattaaattttctcaaggaaaaaaatactattgtaatagtacatgtagtatatactgagacatacagtatatacttgattaagaaattaggctatgaggaatagccaggacaagcttttaagctaaaaagttattacattctaattctggtaagaataggagcttcttggaattcaaagagggcccaggggggtgtattttcttctaatgagaacctctaacaggaaaaaaaataataatagaaatactctgttcatccctgatcaagttcagtgtgcttcgttttaaaggatatcagagaagccctctctttgccctgcaaaagccctgtagtaacctcacaccacagcattggttcccacagccatttgctttacaagtttagccacactcaggaacggacattctagaaaggtccaagtcttatcttcattactctctttcccctgtttttttgagctgctgatcctgagagatagaacagagaaaaaagagcaagttctgattgtttagtattttcataagccgcatgcatacagtttcaggaataaaatgctctggtttaaaaacaaatggttgtttgattttgtaagaataaaaaaagaaggaatgacactttggttccagcactaaatatcctcttggtatatagaacttttttactgcctttctatcctcaacgaaaatatccagtaaaaaattttgtctgagaaaatagtgacaagttatcctcacatgcctagggagggctatggtttggatgttatctctaaaggaaaaatttgttagaccagagcatccaagggagaaggtattttggaaagggggggagcctttcacacccttgcatcattgtaatgaaccttgtcaggggtcactaaataggtagaatcctaaacatttctgtgtgagattagatgaaaactcaattctttttaattaacaagaaatgttacagaaggtaagagcttcagaaataaactagtcaagccactccactttacaaaaagatccagagggcaaaaggattttcccaagagcccctggctgattgggaacagaagttaggctagaattcactctgcccactcccaggcctgtaaatttccaggacactgtctgatttaaatctccatgacctgatgaactgacccccgttagctgtcttttcaagacccttgcaagaattgcatggatgccaacaatgcttctcttaagctccagctggaagggctgggacgtatctaatttctagccagtctgagtaatggcattatagataggtgctcataatgttagcacctaagcctgcaggctcacttgattaaatggcaacatggatctcttttcattcttgttattttgataattaaatgggatttccagctcatctctgacctgacacatgtttttcatttttaaagtgagtcagggagtgagcaattcatggtagtttagtagtacaaactatacccatagctcattaaaatgtgtttaaagattaataaaattgcaccctgtccagtagtaaacctggttaagtgtctaacacatcaggcatgcctttaatggcctgtttgcttttcaaagatgtgaagcaagaccaattattaaaaagaaagatgcaatactgccttagagttgcagtttttaaaatttattttgcatagaaccatcttttagcttttatgttttcaaaatataaaattctgatcagtgtgaccacattaaaaaaagtttatttcccaatctgagtaaacactatttgtaaaaccttaaatagcatagtttaatttttgatgctcaaatacattagatggtgcaaaaaaaaagctaagagttttgtgagaaaacaattcagaaaaagccaaagaaggaaggaccaaaattatttttgcagaaattatwaaggtacatgtcaaaatttaaaaattacacttaatttcttactgataaagtgggcatctccttgctcaaaatacttgtcaaggtgaataaaatagtgatggaacacagaagctgatgccattacccttaatcagaaataacttaaggctgggtactgtggcttatgcctgtaatcccagcactttgggaggctgaggtgggaggattgcttgagtccaggagtctgagaccaactgaggcaacatggtgagattctgtctctacaaaaaaaaaaaaaaaattaaaaattatccaggtgtagtggcacacacctgtagtcccagctacttgggaggctgaagcaggagcatcacttgagcccaggaggttgaggccatagtgagatatgatgggtgtcattgcactccagcctggacaacacagcgaagataacttaartgtgtrtgtgtgtgtgtgtgtgtgtgtgtgtgtgygcgcgcgcgcgtgtgagctatgatgagctatgatggtgtcgctgcactccagcctggacaacagagcaaagataacgtgtgtgtgtgtgtgtgtgtgtgtgtgtgtgtgtgtggtgtatccattttaataagcctatgggaatgtctgcccttatttcctgagataacattagtaaatcattaaaaccttaatccttctcccatttgtattatgtttctgtgactttaatcaaattgacatttcttagaaagaaggcaacattttataattgtgggaaaatgactgaagcaatatgttggtcatgaagcaatatgttgatattgccataattccatgtccatctgtgggactaggtcactgtgacaaactatataataccctgaggacatgggccatgttgcctgtatggctaatggtgcctacccagaaggggaatttacattaataatgccagtgctaaaagtatgtaagaaattttctattttmttttatttttaagatgtcacttttataaaatataataatgtatattgcttaattatttatataatagaatgtagcacttcctgttaaaatttaaatataacataaaatgtaagaaataaagcagaaaataactcaaagctttaacacccagagataacaggcacaaacatttgaagaacattctttctagattatttatccattcataggtataaaataggagaaaacaaggagaaaggaaggatgggtaaatagaaatagttttataaatataggatcacattataaatgccattttaaaatgtgtttaattttacttgaatttgtcaggagaaaaactaaaaggaaattgaagaaattgctgaatttcagttaaatgttcttcacccaagggatgttaagtttcaaaagatccccataaaattaaaagatttttctaaatgaggtcttttttaatctactgtttcaacttgaaacaatattaattaactacagcaattttttaaaggatctcatttcttcccacctcgctgcactatcttccagcttttgttatattgcattatttttatttgtcagggtttacaacatttgcattctaatttcaccaattgtttagtcatattctataggtaaataggtgatgctcactactggatttcactctccagtttttttgtttgtttggctgttttttcaagaatcactgaggggtgccttaatttcctaagttcctccatttttgagaatgcatgtcttttataatctcgatgatgttggctgtgtccattcactttatttcagaattttgtagatatttgtctcattgtctttggggttgaatgtcatgaaaacatcataggctgaacaaaagtattgcctttatagagaactttctttgtgtgcctaattgactaaagaattattttcttgaccctgaaattcataatttatctaggatagggctaatggtgttgaagaaatgttactcaatgatgtttgttaattcatgataaggaagrctttcttcaggaccattgggatgggtaccgggaccacagcatggggtgttgcagtcagggagagagattgggctcaaccccaaaagcagcgtgggcaagtgggaatttatagtcaaggggcagagtgtggtcagtggatgaaaattactaagaggcaacatcaagtgtacaggagattctggctaaaccaacctaccgggattattctgaagacaggctagagtgttagacatgacctgagggttggtggaggatgatgaacctgatcaaatatcaatggtgatcagatattaaggataaggggttttggttaaactgacttagcagggttctttgctaaaactggattttacaaggaagtgcatagatgagcccaggagaggcttcaggaggctgactaaattttggtctagcagagaatttttgtcagtggtcagtcattgtttatcactctttatcctggaacactgtagtttttttgatctgcagattcaagtcttttttttttttcaggaaaagtttctaacattatacctttacatacattttctattatatttctcatctctagaaacactaatccttatgttctattgtcttggttctccacctctacccacttatgtaactgctacaaattctgtcattttcctcttcactgactattttatgaaattttcttcttgtcattatgttagctttatattcctcactgtttcaatagttttatttctgtaactatggcattttggttctcagtttgtttctctcgttctgtccccccttttcatcccttttcatcttattctgttcttttataatcttcttttaatcttattttatttaattaagtattcaggggaaactttcttatttttcttgggttatgttttctttatagatggagctattctatttcttctctctttttctctctctctcctccacctctctcctccctctcttccttcctcgtcctgtcctccttttctgtcttcctctctttcctccatccataggttcatgttatatcttttcatcttatttatgtttaatatggaaggtctgtccagattttttcactctactagagtatgggtgaatttttattggcattttctccatgtcatctcaaaatccttcatcttcctcactgagtacattttgtggactgggtattagcttccaacatcagtgtgttgcctttgctggggacctgggcttggctggctccctctttaaatcccattcgatgtgctaaacccgagtcccttccatcagctgcagtggatcctgtggctgtgggcttcagctctttcactaatttgggtcagagccctgcctctgccaaggtttcatgactgtacacaagagctcctgttttctaaggtgtttttcttgactttttccaagcctgcctcttcactaccctcagatcatttcttcccaagtctaaagtcatcattagagattctttggattcggcccactccctttctttcctcagtattgtctcagaggtggaggagctggagccacaccgccacagcccagctattcctactctttagccaaaacattttaagatgaggatatggcgttacactcctttcttggttttgtggctcctggcaacactttgttttgacttgttttattttaatatatgtttttgttcrttcattaagtgttaaaagagggcagagactctatgatctaacttcactctacaaaattatcttttctccctgtcatctcaaaaaccmtatcaatttctatacaaaatgcagtactaaacagattttgaaagtttagggaagattaaaatttcaatgccagatatttaatttcattattatgactgtgaaatagatgcattctttgcagaaattttaatacaaaaaagtattataaagaaaatacagacattcattctcatattatttttgatattcttatactaatttgcttatctgtgcatagttcttaaaaattgggttcaaacttcatatatcatttttattttgttgcttgtctttcctctaacagtaccctatgagtatgtaacgtagccttacatattccttgaaatgatattttaataattttgaagcaaattaatacactcaaataatctacgattggacatttatgctatttataatttttgttaacattaatgctgggatgaacatccttctatataaatcttaggatgtatttcctttaaaatatgttagtaatactttttaatgaagacatttctaagataagtattctttgccttagcaaaataatttaatggacattattataaaccttgattattrtacagtaccatataagtagataaagagaaatcctgcacctgattagacttagaacataaaattttgaataaatttaaatatatgtccctcactaatttttcctcataatttcaaggtctaaaatcatgtgatttctgatcaattctttactgagaagcactgagacatttcctaaattattttcattatttccaaaaaataccacttttamtgtcttgatcagtgccctttggctttttcttcagagttcaaagtagcatagtgattcagtgaacaaactccaggatcagaaaggcctgggagctgctcattacttgcatgatctaatgttccctcctcacctctttcttcactttctttcactgcccttctttctgtcccccaagtagaccaagaccatgtccaatttggtccctcctattttttccagtgtaatactcttccccccagtctactgatggctaacccttttttatccaaaggtcagttctccactcagttaatgttcccattaactttcccctcgaggcattctctgtctaattactctgctttattttcttcatagtatgcgttatcactcaaaagtatcttaataatggctcccattgatggtattattagcttacctcatcacccacaattcccttccacccacctacggttctggggccctctgctgtaaggaggactgccctcttgtggacttttaggatattgctactaaaagcacaaagtcyagttttwtttttttttgcaacaagattgctgttttagggggttctctaagtgtcaaatatttgaaacattgattttcaggtttattctttttttgattaattgaagtttttaatctacctggarcaagaataacttaaaatgtgaaatgaccttggtaataacratagttctgtttaatgaatgttttgtcagtagcaaccactgtcctaagtgatttttcatatattatctcatttagtttacgcattgtcagctgggaaaacaaggagataatttaagacatataaagaaagcttttccaagtgtcagggtaaagctgattccctatgtccaaactttgtctgcaacttttcaggaaaaacaaacaaacaaacaaaaaatttaagaggtacaataaacacagttatttttttaagcaccaagggggcctgggttctctactcaactctgaccctaattattgtgtgtcatttagaaatttgtcttttcaaggccctagtttcttcaaacgtaaaatgaagctttgcagagagctcatgttcaaaggtcctgaggcasaagaaacastgatatatttgaggaaaagaaggaggtctgtgagactagaatggagtgagtgaggaaaaacagccagagatgcaatcagggggaatggggaacwtggtttttacccwgagtgtgacaggaaagcattgcagggtttggtgcccagggattaaatgaactgacatgtaatttggccaatagacattaatgtcagtaagacataaatatgttctgccaatgccaagcaggagcaaaaacatcaytttttcatctttcctcagttcagtgcctccaaaactctaagaactgagacatcactttggatgatgacataggacttgtgtacttattacatgtagtatcaactgtccattaatacttttaaaacccatgctttccaacaaagttacttctttaaagcttccagaggtcatctttaatttatgaatgaaagatatgttctaaaaataagctatgtactagtataattatctatgtctatatttaagtcagcaagtatctattctataaatgtttattgagtgcccactctgtctaggccatggtgctggtatggaaggaatgccagcaaaaaaaaaaaaaggcctgtaaccccaatccacatgaagtttactatctagtgtgtcattaagtcatttccagtataatctccaaaaataattgagggtgaaaagccaaaatttaaatactaggaaactggacatataagatatattatgcatattggtgacatcataatataattttaaaagcgtggactttaggatctgacacattctgcttcaacttcttgttaactatgtgatcttgagcaagccactttacctctctgtgcaactgtctcctcatttggtaaacagagataatgctccctaattcacagtggttttgtaaggattaaataagataatgtgtataaagagtctggcatacacattcggtacatggcagctgttgggtgaaaaagaacaggaaaggagagagaagaaaattggaagcagtccagcaggcaaggtgggattggaagaatgccaaaagtagcaaaatattttaatgttgcacataaatgactgaaaggcataaaaaagctcaagaataatgtccccttctattatgtttaaagccaaaaatggaatggtttacccctgtatgtcacactaatatttattgtctttcaatgctgggcccagatactctagaagacatgttcagttttcgccagccacctaaactggatgaaagaatatttgcaagaatcaaattctacacataaatgtattgagtatctgctgtgtgcccagcaccattgtagtttctagagatagagtaattaacaaaatagaaaaaaaaataaaaaaatcccttcctcatggtgtttaccgtctagtagggggtaggggaaaataggcagtatattagaagtatattcaaaggtgaaaagctctctggagagaaagtggaaaagtgattaggaagagaggtgtaatttaaatgggtgattaggcaaaatcttattgaaaggtaacatttgggcaaagacttaaagaaggtgttggtataagatctctgacagtatctgggagagaagctttgcagagagctcacattcaaaagtcctgaggtgagagcaacccttgatatgtttgaggaacagarggagttcagcaagactggaatggagtgagtgaggaacaacagctgaagacacaatcagagggagtggggaacttggtttttaccccaagtgtgataggaaaaccattgcagggtttggcacccagggatcaaatgaactgacatataatttgccctgtggagtcatgggacataatttatgttttaaaaagactacctctggctgctatgttgagaataaaatgttgggggacaaagatgaaagcagaaagaccaggttattataaaaatccaggtgagagatgataacagtaatgatggaggtagaaagaatgttttgattctgaattatttagaatcatcatttatagtgattaaggaagacagaggatggaacaagtttgtttgtttgacttttaagggaggcctggggaagctctgtaatctagtttggacatatcaagtttattaaagtagacaattagatatacaagtctagagttcawggagaggtctggggtctatagagacacatatttgggaaatgtaaccttatgaataatatttaaagccattgagacagaatgagatcaccaagggagtaagtacagatagagaactgaagaataaaaggtatccmaggcgtaagtcttgtagcttgtaaaggctggatggaaaagaaccagaaaagtctgaaaaggattgttcagtgagaaaaatcagcaaagtgtctcatcctggagggtaaatggaggaagatttgaagaggtagtgagaagctagctgtatcaagtgttgctgataggtctaataaaatgagttccaagaattgcataggatttggcaatatgagcctcatgggttggcttaactcagacagttttgaagagtggggagagaactaagtctgattggagaaactttcagagaaaaargcaggaaagaaattggaatcagggagtaaggacaactcctttgctctaaaggggagcagggaaatggagtggaagctgaagagtatagtgggatctagagagttttttttggttttttttttttttttttttgagacagaatcgcactctgttgtcaggctggagtgcagtggcacgatctccgctcactgcaacctccatctcctgggttcaagtgattctcctgcctcagcctcttgagtagctgggattacaggtgcgtgccaccacgcccagctaatttttgtatttttagtagacggggtttcaccatgttggccagaatggtctcgatctcttgmcctcgtgatctgcccacctcggcctcccaaagtactgagattacaggcgtgagccactgcgcctggccgagagatgtatttttgaagattcaggaaataacatgtttgctagttgacaggatggccaagtaaagaagggccaagtaatgaggcaagaggtaaaggagagaatttctgcaacatgtctctaagtgggagggcttggggtcgcattcccaagaagagagattgagcttagataggaccaggtgtgggcccagaccagcagcatcggcatcacttgggaattattagaaatgctaattttcaggcccttcccaggcctactgattcagaaactctggggttggggccagcaacctgttttaacaaaccgtctgggtgattttgatgtaaagtctgatctgtggtaatagaatacgtaggtatagatcctggtccgagagtagatgtggtcctaagaattgtagggaattatcttccagttgcttctgtgttctcagttaaataggaagacaggacatagctgagagtgaagactggagggaagttgttggagatctggggagacaggagaagtttgatacagttgtctaggagaatggaagagtcagtgacctggggaagaactgtgagtgcctgagagcatttagtgcgcacctgagttcatggccatgtgtctacccagagcccatcagtatgattgtgtctttttctccagtgatgagcagctggaattgacatgatgataaagagaaagccagagaaagaataagtgaataaaatgactactgtctcataaacaggagctttacaggcaaacattgctttccagcatggaaattgtaccatttcctgaagaccaccttaccttttattcttgcagtccaaaatccaccctgcaaccccagcctacttgcctcctggtgagagtcatgtctacagtcttggggctgccacacagctcatgagtccagagtgctggatacggcaagggctgcctggctagtaagacacaaactggtcagctagagataaagtgtgactcaccgagtgcccagaaaaaaacatttcttcattttctctcctgacaactgtattttcctaaattattatatagataagagcttgtcagacacaaaagaccacaatattatataattccatttacatgaaataggcaaatctatagaaacagaaagtagattagtggttgcttagggttgaggtgataagggagtgacagctgaaaggtatggggtttctttttaagatgatgagactgttctaaaattgaccatggtgatgaccacacaactctgtgaatgtaccatgaaccattaaactgtatactttctgtgggtaaattgtatgatatgggaatcatatctcaataaagctgctttttaaaacttacatacacacacacacatttaattaatctatttgtatagatgaaaacaaggacttgttaatggaaataaaccaaatcacttaaatctataactgaatttctttgtacctatctttaaacaaatagaacttcctttaaatgctgagggctttccaatatattaaaaacaaacaaacaaacttytagtctytgatatgggaaataacttgtaggagttaagcttttttccttaaaaaaaaaaaaaaaaaaaaaaaaaggtaagcagagctaattcccactttgtagtgctttgttgtgaaaaacttggaccaaagtggctgttaattctacttttcaaagctgaattctttctgacccttcaaaacgtatgctcccaggagtcttaaggcggtgtgttcctctctcgtcaaagcagcatacacatacactgttaaraacatgttcatttctgcttctgtcagctttgtgtctgagcactaatagtgtccatggtttcacttttgcatgaacgtttttgctctaagcttagggaaggacactcttttccatgccgtagttgaaatgtgtaacttgtccctgtttaraaaaatgccgccacctacttgcttcatgtatctggtgatttaaagcaactcctgaatcattcaacttggccagcttgtctttgtgtaggaacaatcccaagcccatgtagagtcttgccttgcagcacctgaaaataaattctgtcgagactgatgctccatcctcgaatttttgataaatctttatggaagagttattggatgctcatggagcaggygtgggtctgcagtgggggcacgaaggaagcatcaggaggccaagttagcttctcagctagtggctctgtgaccttgggcaagccatttaattttccatttccacatctaaaaataaggactgaatcaagcgatctctggagttccttccaactctacactctagaaaaggcagtgtacttctgagaggttaagagctggggcctccagtcagagtgacctggtttgaattctggttttgctacttgctggtaacctcgttctagttctttggcctctgtatgtatcaatgacttcctgttgaaaaaggaaataataatcatacctgctgcccaggtagagctgtaagttactgatcacaggactcatgctagagtaaaagctgttggtattcaaagtaatgatgtgcccgcacagatccacactgagcctgcactacagcgtatgcagtaatgtatacatctgtactcaacacaaaagcagatgagatggccccacctgcatgcttttagtctagctggggaacaaagctatcataggtgagatgattacccgtatggtactaagtacagagcagcagtccttcaggggaaggttcaatgccacatgagaactggagttgcaggcagcttggcgcaggactggactgtgggttgggagaaaacataagctgaagctccacttgtttgtttgtttctttccttcctcccctctggctctcctaagtttattttggttttgaaatcaggcctgcccaggggagtgaatcaagcagcagacccttcggccttttcctgtctctgtgcctcagacggacagggcctcccaccctgttggttcttaggcgtcgcttgcattgctgggtgccctttttaacttttccatcttcccccaaatgagtccgaggccccagcctctgtgcctaatcctgcctcttggcatgcttcctttcacctyattctcctccctctcttctctgttcaaagtcactcatctccagccctgcggtgaataaattcatacaaagagagtgttttgatttatgtcaccaatttgatctcaraaaactacagaccctgattctccatgcagtccatttattgttcatgcactcactattttggaagtgttgctccaagtgtgaggtgccaagccacataactgagcttctaattgcagagttctccaagctgaagctgaatgaatggctgtggaatattagcctctgctagaatgctcaaggcctcacagtgactgcaggaggctgtcccacttgtgtctaacagtgtgcattcacttgttttgtttgtgtgttgaatgcattatataattcactgtggaataaactgtggaaagtgcccactgcctgtttttgtaaataaagttttattgggctgtgctcattcacttaacattgtctgtggctgctttcacactgcatggcatggttgagtaattgcaaaaaatactatttggcccaaaaatcctaaaatatttattatctagctctgttcagataaaatttgccaacacttgatttagatgtggacatcagatattataggtctrtagagaatagccatataaattatctaaatttctttttttactatgaagcatgtattttcctatagatcttaaaaagatctatttcatattctataacctaaaattaagatatttagtttcttctcagagttttgcttttgttttgttttgctacttggataatatcataaacatctggacttgttggttcccagagtagaattatttaatgaaaaggtatcaaaaaataccttttgatataccaaaaaatatatcaaaaaatttatttcattttaaaataaaaactaaaggcatcaatagaaaaaccttaataagcttaaagggcctctccatgaatattgaggacatcgtgaatgtttagagctggaacaagacttcaggtatcatctaaactgatctcaccatttggaaaattgaagaaactgagaaccagagaaggatgtgcttaaggtcacatgacaagttacagctatcacaaccgagaacccagaactcctatctttctgcaaagggcttttgccagtcctgcaaaaacaaaaaaggtcacagaacagagctaatttgtgctactatgaattcagatggccaccttcaaatgggccatcaacatttccctgaatcctactaaatatctctgttcaacatactcttccactttctgtaatgctgtttcagacttcatcttccataaccctctaacatctctttgtcctcccttgctctcatcaaataacctcaccttctccttcagagaaaatgaaacctatctctctgtaactctaattgtcctgacaccagacacatgagcctacctacatctgtgtccatcctcccttcctcccaagtacagtagaggtgtccacccttcttgtacatacttgagacacgtatctctctccttccagatgggactccctcccaggatctttcagtatgagttatctttttccctctctcaaaaacaaattactatcattattattattaatatatcttccttctaaacatgtccacatcttccattaaatttttttaaagcatatcaccatttattccctgcaacgaactcacaattatttattctcctctttccagccaaacttctgaaagtttggcttcccagtctttggctgggaagaggagaataaatgwgcaccatttctgtgtccttatctcccatttactcttcaactccatctgtctggcttcaggccccttccactaaccaagtaatactcattaaggcctctgatgaccctcatattgctaaatccagtgaccattttctagacctcatctcccttgacctctcagcagtattcagtaccactgattactctgtccttcttgtctcttcccttagttccatgacacaaaactctctgggatttctttgtacctcacagactcttgccagctcacttgatcctcagactctctcactagctcgctgtttcttcctgacttttcaatattagagttctttaaatagtgggtgctcctcttcttgctctagctgcagttctaaagcaatagcatccatgttgacaccttcagttaccatttatctatatgacaatgaaggcttcccctcaccccctcaacacagtggatacagtggtttttgaaatgtaaatctaatcattgctacttccttcacttaagacccttcaaccttttctgacttaggataaatataaaatcttgtctatggcctaaaaggccctgcccggccagtctcctgtctgtctctccagactcatctctctccagctccctgtcctcacccttctgcctacaccagccatctatcaccctgtacataagtacgggtccctcccttctccatgaaacccacacatgggattgcccttccctctccttccacctgggcaactcctactcatcctttgacttcattctagttggcacttctgggagtctcatcccactcatcactttgtctagaaagccttatctaagtgagagcccacattttggccataaaggaaaatgacacatagctttaattttacattggcttgcataattaacttcattaatatatattctctccaaaagacagcaagctccctaaaggcagatattattattgtatatgtgttgtattgtatatgtatatattgtattatatatgtgatrtacatgttatttttgttttacactgcatgcctagcacttagcacaggggttaatcagtaaaaggcactcaaagaatatttcacaaaaggatgcatagagggagggaagagtagatacatggatagacaaacagttatggcatatttgatctaagatctgtgctttaacaaaaatactggaccgatgggatgaatgtttacagactttccagtaaccaagagcaaaggaggcataagcatcagacaacaatggaattgataaagcctatatcttggtggatgtctcagtgccatttttccattcttcccaaggacactctatttctatgggaatacaataagtgcagtatgtttcctaactaccacaaatatttctgaaatgcaaactagtggcttctgattcatacatgttattagagaggaaaactgaagctgtcaggggctcatagaaagctttgcattcttcctcaatgtgattctacatggctaatgtcactaactgaccacagaaactaagtcattggtcataggaaaataaaaatggtgtacgtgctggttatgtttggcacaaggcctttgtttgggtatatgcattccaaggatccctagaatgaactgccttatagcactcaatcaggtccaaagaactgagccctttagaagcagaagaagaagaggaaaaaccctgatagcaatcaacagaatccaaagtattgagtgttttattaaatgcctgtaaggctgggasacttgtgttgactcctacacatttaagtgcaatcttcttcaatgattaccttggaagatgcatatttattttagtgacactgttcttactctaaatatttgcagccactcttttgggactacctttaaggccaatagtatatgtattattaaacacatcctgagcctttggaaggtaaatttggttttcttttctttttttttttttaagatggagtctccctctgttgcccagactggagtgccacaatctgggctcactgcaagctttgcctcccgggttcacaccattctcctgcctcaccctcctgagtagctgggactacagacatccgccaccatgcccagctaatttttttttttttttttttttttttttttagtagagacagggtttcactgtgttagccaggatggactcgatctcctgacctcgtgatccacctgtctcggcctcccaaagtgctgggattacaggcgtgagccaccacgcccggccggtaaatctgatttttagaaaaacccaaatgttatgaataatcaaatctagtgaatagactcagggtccaaacaagatttcagttcaaaatgataacagctttccttgtgtggtaagaaaaaaaaaaaatggttctgagggacaactggttctctctcggtgaggagttccagaaacgtttgaagacatggaaaacatgcatagcttcataagatgacagggcttacaagttctgctgtgtttgttttcaaacccaatctcatttctttagagatctgaactgatcatctacctggccagccttggctagcaagatgtgttttatttggccamcgtagtggttttctttaaaaattgagtcaggattgaaaaaccaggagatttcyagtacaaatctgaatttcttatctccttggaaaatctgaagatctggcaaaactctttccacagccccatgtgacaattccgtcctggagcagagtatctgctgcctcctgtatgaaagagacagttaggccagcagctctcaactgctatcattgtctgtcctgacctcactatttaaatactgtactcccagtgcactttgctgctkcttattccatgtgacatttatttgtttaattgcctgtgtcatctccctctagaycaaaagctcagtgagggcagagattttttttcctgtgtttgttcaatgctgtatctccattgtctggggyatggctggcacttgatgcctatctgttgaatgaattaatgtctagcccctgtaagcagtaaagtttgcaacctttgctctagagttgcactttgtagaaaagaagactaaatggttacctttctatagatatacaacaatctataccatatatactttycattttcctttttatattatttattttatgcctctattatgttattgcatttcatctccacagcaattttgtaaaacgtacattatctctgagtgttacctcaaatttttctacctttctttctttcccccacctttatttgtattcactgtattgtattgtattgtattgtattcatttattctttttgaatagataccaaatcctatacatgatccagaatctaaaatgtatggaaaggtctgcaataaacctcatcccttaaccatccaggtcccctcctcataggcagtgttgttagtttctttgtgtcyatccacagatactctttggatacccttttatattcttctttctctttgtatatatggatgtcacataccgtgtacactgctatgcactttgcttttctcacttaaccatatttcttaaagattatttcatattattctataaatgttctcttattctttttttacatttatacagcattccagttggtgatttattcccagatggtttatttaactagttcctgttgatggacatttgcgttttacatatctccttttatagryattygagatatggttgttacaggtgtttaagaagtgagattgtgggtggtttctagatttgtgccatagttagtaagtcttcaccattttaaagctgtggaaagattttcttgtggtttcttctagggcttttatttgttacattttaattttttcatatacttggtatttaaccaggcataaggtatgagttatagattcaactgtgattttttttctagatgtttactgtttatctcatctttaggagttaaataagccagtttttattatattgtaaatttccatatatattgaggtctgtttctgaacttctgtcctgctccattgatctgctaacttttcatgcaccaatactgcactgttttaattactaaggcattatactatgctttcatatctgatgggcttaattctccctgttactttttgttcaaagtgtttcgtatatttaatattcttacaggataacattcatatagtcttacttccctgtgggtttttaagtcatcaagaacaagcagtgactattatcacataccattttagcgtctttcaaggagatcaaatacttttttattcagtggacttattactctgattagcagtttcagcattcctaatgttgacttatccttgctttcctagaaatattccattttttctggtgtattgttcttctaatttttccaagagtcatttgctgatattttatttaagattttttgtctcaattaaaataagtcatctgggcaaatttcttttttatgctgtcttttccaaatttttggtatcagaattatgctgatttacaaaagtaattgaggaagtttattttttccctgtgctttcaaacagtttaaataattttttttatctatgaaataatcacacacaaaaccatctggatttggcattttcagggaagggagaggaggggggttccttgacagtgtttaagtttttcccatgattttcagtctatgcaaatttgtcttttctcctactttatgttttttaagaaaatcaaacaattcatcaagattttgaatgtattttcacagttactgaaagtcatctcttataattattctaatcctcagtatacataaatarttccctttctttttcctaattttgtgaatttgttatttctccctttttttctccactaggytaactgctagttcwtctatttgttgttttgttcttggtttttccaaagaatcagctttgggatatctttacacatgagacctgttaaaatgttttctagtcctataagctttctracttttattaatttctctttcagctttcttttatctgtggttctttttctacaaatgcttaactcatttatttttaagtcataaaaatgtataaaactatgacatttaagatatttcctttagtaagtacagcattgagggtctcacataggttttaacatttgttatttagatcataattattctttacatatctagcaataaggcttctatttactctttgacaaagagttgtttaggagataattttcttggcttccaggtaattgcagtttttctttttttatgtgtctgattttctttcttttttttctatttagtttctaagttaagtatattttagggagattgttttgtcacatttctacctatttctactcttggaaagtttctttattgcctttggtcacatgctataattattctatttttgcagtattctgtttttcagatatgggtatctgatcctagattaacattagtgatgttattctggtattctttcttattttatatctacttaatctttgaaggaatgtaaggtaggttaaacaaccactattgtgtttccatgtatttttccttgaattttctacagggtttgacttcatctatttctctttttctttttaagagacaggatctcactctgttgcccaggctggagtacagtggtgcaaccatagctcactgcagcctcaaacgccaaggctcaagggatcctctcaccttagtctctcctgtagctgagactataggtgtacaccactgtgcccagctaatttgattttaaaatttttgtagagatgaggtctcattatattgtccaggctactcttgaactcttggcctcaagcaatcctcctgcctcagcctcccaaagtgctgggattacaggcatgagttaccatgcccggcacttcatacatttcagtactatgttacttggagcataatgtatggttatatctattttctacctgataaataattttaaggcagatggagactgaaacattgcaccaacaggcagtcaatactacctgcgagctatgagaagatctcaaagttggagacttctcaaggggtacagggaattggtgacaggtatacctgagggttaggcaagaacaaatgcatctaatactaagatgttttattagttaagaaaagtgacatgaggatatatgtgcttgatcttttaatttcttctttctggattttgtttcttataactatgaattttgtgtaaaaagaccaacagtcatgtcttatttctgtgcccagcaactaacacagtgctttgccctcacctttggtagatactctggtactaggttggtgcaaaagtaactgcagtttctgccattaaaagtaatggtgaagactatatcactctaagagtttaattcttcatggtgccatgtggaaatactagcaaaaacagcaattacttttgccccggcctaatagttgttgtgaataaatgaatgagtgaagtagcaaaatatgaaataggtgttgcagaccagggtaattagcactgacatttgccccacctctctgtccaaacatgccactccttatagagcagactgttgagttctatattctttcaaaatttttcatagactcactcctggagccagctcataatgtattaagtattcctcctgaatgtgtacagatttcttgtttactttatgaatccaactgagaaggtataacagatataccagagatgggagtctgtggccctagccattgattgtttaagttctgggttagaggtaagcagcccttgccagagtgatccagtcccaaagtagaaggaacaagttttcttgtgrtgtggcaaggttatatcgctctaagagtttaattcttcatactgccatgtgaaaatactagagaacaagggttggtttaaaataattatcaccttaaagtattagaagtataagggggaaaagatcagaaagaatatgccaaactatccactgatagtttgttagtggttaactctatggtgggttttaattgtttctcctttatactttctgttttcaaacatttccarggtgatcaggaatcatttttatgcaaaaaaaaataagaatttttaaaagtttgatcctttgaagmcttctactctactatcctttggattgggccttatcatttctcacacatgctggctctttgctggaaataataatttctcacacttagcagaaacagatttgcattaagtcaayggtgttgtttctgctactgcactttyacaagtgtagcactgacatgcagcagtcaggatccagagaggaaacaaaatcacactaggtaattcaaacagaaggatttagttcagggaattggttgttacatcggaattggagcactaaagcactaaaagagcaaaaaggaacactgagggaacccaattgcaagaagtagctgtcaccctcagagttgggaaacaaaaagaggagatgaaattagtaggacctaagaactcaaggaagtagtcctgtggagctggtgcttggaccactaagaaaggaagccaaccagctgctgctagaacctctgagggacgcaaagggactggttttggaaatgtagaaagaggcccatactccagacagcmgtgactactggaggatgctcctggggcatgaaaaaggagaaaggaagttccttctcctcaccttccagtcttcttccagtgaatagaaagccctctggcaagggactctgggaaatagccacatcccagccccagcatcacagaatagagcaaagaagggtggatctggagctgasgggcaacaggtaacaaactagcacccagcttttgggtcaaaaactcagtagttttataaatggcagctaaccagctttattcattgtactattccaaacctttcctttaaacaactactgatgtcctaaatttccaaatatctsttggcttttcgagaaaagagtattttctttattagaggagtattcatttgtagtccctttagaaatgtctccagcagcatcaatatggggttgagcctgatagctcaatgcgtggggttagggttcaagggcagttcatttgtatatactcctacccagttcgtrtactgttagggtccattcttatgaatttgacctcaaagtaataggaataatatcctaatcaaatggagcactgattattaatagaagttctaattttctgagaaaccatgtaacctttactgaactcagaaatgtctcatatccaaaaagaaaggttttcctgccacttaagtaatgtgtctcactgatacagggttggccatgtgaaaaattccagactcatcaagagtaaacttttcaaataattggtttcagcctagccaaatcctgtgctttatatattaaaaatttggttgcttgatattctgagctataaactttatttttgaagtatatatatcccatagatgtgatttttgctcatagaaaaattgtagaaaattcttaggacctttcattcagaaaagattgaagctctaattcttcacaaagaagcttggatttggggtcaggaggcatatttttgggtcctgacttccccatgtaccagtatttatctttagacatttaacatctgagcctcagcttcctcatctgtaaaagagatgataaaatgaggttgtaagcatcaaatgaaaaaatacagtgtaaaaaggcaatataaatgcatgtaatcattattattcttgcaagatgcagtcaagtttagtgatttagagcataaaggatttgctccctgtctctcccactttaaaattcttgcagttttgggcaagggagtcacatctcttaactttagttcccccaactgtaaaatgtggatggtaccacctacgtcataggttgagaatacaagtaataagagtaataaaggaggcagcagaatccttagcaggttccctagaacttatcagaaccctttagaacatagcaagcactcaacaaatgttagctgctattgctattatcgcctttattgttatcatcattactattcttactttttaggaaaccgtgcacacatgtgtaagatgtatggtgattaagatatttattcatcataaagaagtattgktattttcttttttctgtactcaatttcattgaacacaacaaatagaaactctttacatttgttgtagatttctactcaaagccaagagccacgttttgtctagttggcctttgccatggagctaagaagtgactccagaaacacattcaagcatatcatatgggatccgcaatatttctttggcattttagaaagagattaattcctctttctctggtaatctttgttttcaaattacatgaatttttttctgaaaagtgaaatagttcatgtttgtttatagtaggtaaaatcaacaatacaaattgatgaccaagatccactgtctttccttttcatgtacaaaaattagtcattaagtgggccttgtttatgataaactttttcttgactctagagatggtacaactgaggcattccaaattacacctataaaaactatcattttgggatcaaaactatattttttgagggaaagtaaagttgtgaaaatattcttctaaatattctctcactgggaaagcgttagttgaagtcccaacagagacatcaaatggttcctattaattgttgcagaattgctgaaaagagtcagttatgcaaatgctgctgcccccaaagaactgggttatcccgtcattaaatctcttctactcagtatcatgctagagaatagaaatcccactctttcctaatgttaccaactattatataagaaatcatttcacactgagaaatatcaataccatgcccttttcaaaaactgcaaccgtacaaccagtgcatgaagtaaatcaagttctcagtaggcarcagtggcacttagtgagtgttccactgccttctttcttgaaaccccatgaaaggaacacacttcacatgccagctcttctcttggtgtgtaacaaaatgaccaggaccctacggaattaggtctctggtacccaatactcagttatccagaacctaggcttaactatgcataacaataacaactcacatttattgagcacttactatgtgcaaggtactatcctaagcccttttcttgcatgaactcatttaattcctacaacatctccgtaagggacatgctatcttctttggggacacatgtacaaatgatattaaaacaagctgatgtagctattctgtccaagcatccagattgcatggtcagaatgataccaacccaataaactacactttacgtaacccacattatgaaagaccctctgtttgttttgttttgttttgctttgtattgttttgtgacagagtctcgctctgttgcccaggctagagtgcaatgccactatctcagctcactgcaacctctgcctcccaggttcaagtgattctcctgcctcagcctcccaagtagctgggattacaggcacgtgccaccacacccggctaatttttgtatttttagtagagatggggtttcaccatattggccaggctggtctcaaactcctgacctcaagtgatctgcccgcctcggtctcccaaagtgctgggattacaggtgtgagccactgcacctgaccaggccctcagtttatagctggatcttgacagagaaaattggcgtggtccctgtgcggggaggcatggtaatctgtggagtgtccatgttttgtaaagttgggtttttttgttattctttccctttcacacacactaatggccctctgcacttctgacagagtattaaatacagcctcccctaattagaattgtttgtgcacatcccgtcttctctaccagtcaatatctgtcagaaggaaaggggtggggcttagtcatctctgcacccatcatggcacccagctgagtgatgtgcaccttgcaggtgggatgcagaatggcttagcagttaaaagcatttgttgtggttggcagtctaactcttccccttgccagctgggtcacaaagggcaagtttctcagtcctctggccctctgtttcatcaatgagcagaaaacttaccattcattcaaacattctaattattaatggcatagtgactgtgtcctcctcaggagttctccagacacatagcagcagtccccaagagtcttctcatatcatcacgttgctcacatcttagggattcccaaaagagaaggttgaagccaggactctggatagccycctgacctttgttcaaacagaccctttgtgcactgatgggcatatgtcaagattttgagcagagaaacaggcagaagagcagaaagaaagtttcccccttcacagcttaacaaggtatgctgttaagctcccagaagagggagaatggtcttcattgagttgtaaccatgcagcattttcattgcaatgtgctgttattgttccatatatgttattagattaccataacatcagtgagttctcgggaggaagattcacagggctgctagctaagcaacatctcagttcactgccacagacactttgagctctgtttgtgtggagcaattgcccatcagcagatggtactgatgtcaacatgcctggagttttccttggcattataagttcaaaagtgtcaaagttcagtttcatacaaagtagctgcttgttttccaaaactgacctggaggcctagaaaagactgcagaattttgatagatgtggaagttattaaggaaagccatttaatccaaataaattgctcttgaggtaggccttgatcaagaagtttcaattacatttctttaccaataaatagatgtctctggcagcaaatgagagataaggaaggttctctctcactcccaattcaaaactcaagccagagaaaatccacatgcctgacaagaaataataatagcctatttctttttcagctctgtctttaacaccctgtatgatgcttcagttaggtgtgtattttyaacagttttattgagatgtaatttatataacaaagtttacccattgaaaatatatagttcactggattttggtgtatttacagccatttatatactgccgtcaccacagtctcctttcaggataccttcatccaccccaaaaggatcccttgtatccatgagcagtcactccccatccttaaaccaatccctcacccccaccacccagccctagctgaccactcgtccacttcctgtctctatagtgtgcattttttttaacctagacattgcctggcaactcctcataattagaatttaataagtgtttcctcaaaatctgtcatttttgagaaaatttatttccttttgtgtcactgggcctcccttcctccattcagcacctgtccctagcacccccaacaagggtgttctccatttaacgagtatttactaagggcctgctatgaactacacactgtgttagcacttggggtcatcagtgaacagaatgaaaaagatccctgtccccgtaaagctgacttcctagcagagggagaaaaaacagtcaacaacagcagcagcaaagcacagaagtaaaatgtacagcatgttaaaagacactaagtactatggcaaagagagacaggagaggaagataaggggtattgggaagcgccgtgcccagggaaggggcaggtgacagcactgggatgttcaaataggcatcccgagaacttcaggtgttcaacccttaatggaggtgagggagggacccaagcaggtgttggaggcatgagcatttcaggcaaggaaaaatcctgacgcaaaaggccctcttgtagggggcacatatgacacgttygaggaagaggaaggagttggtgaagctgaaactgggagaggagagacagagaggcagatggggcagatccttgtgggagccacagtgggattttgagcagaggggtgacaggagcggaatcgtatcctamctgttggaatgccattttaaacagagatgagaaggggcaagggcagatgcaggagacccctggatactacttcagaggctactttagggcctctaaacctaagtggctctcaatcttggctgggcatcagaatcacccacgctgctttasaaactgaggcctgagctacagacactaattggcctggagtgcacctgggcactgggattttttttttttttttttttttttttcaaaggtgcgcaggtgattttgatgtgaaagccaggttgaccatgagagctttcagagcactaagtagtccccctgatttgactttgcagctaggaaacaaaaccccacagatgacccctcttgctcattggcaaagctgtgctgagaggcagccaaaaatcttgctgctatagcagkggcaggactggtgctgcagacagtgtgcaaactgggatggggctggctggagcccacctggatcatcagaccttgaggtcaatctcattctttggctggatgcaaacacgagcctctgaatgtgagagcaaggctttctctctgcacctaagaaagggcttattgtaatatattagggcagaagagaaggataaggctagaacctcaagaagaaggtatgtgattcactcaacaaacagtgtttaagaataatagtgacagtgkgccaggcattgtgcaaggagcagctgagaaaaaaataaggtttaactgtccttgcccaagccaaatggctcaaagtgagcaccgtctaatatttcaaaatgtgttatttgtgggaaggctttaaataagccagaggggaggggggattcttcagttgcatatctgagctgctggcatttctaattcagagggatgaatagaacattattgtgttgcatcggtacaagtacagcaggaaaaaaaaaatgcttggagccgtgagccgaacatgaatcagcaatctggttctattgttcggaaaataatcaccatgctgggagcatggaatttaagaatcatgcagaaatgcccttccccctcccagcaggaaacagacattggctaaaacatgccatcttgtttttggcttcctgagctgaaaagaatgtaaaaaacttggagaggatttagggaaagctgatttgtaaatatggaaaatacaacccataagaaatgggagataatttagacccagtgttggcaacctctcagaggtggcacgccaagggagtgtttattcactcttgtgagcaggcagtacagctgccctagcttcaagaaawaactcatgttttttgagttcctactatgcactgatcagtgtgctaacttgtggggggaggaaggagagtggtccctaccttttgaagaccttctaatttgtggcgatgggcaggggagtgcaccaatactataaagcagtagttctcacactcargygtgcatcagaaacataggacccgaaccccaccttcagagtttataactcattaggtctgggatagaggcggtgcatctgcattgccatcttgttcccaagtgatctgattctgctgcctgcatactttgagaaccccgctctaagaaaataagtacaaggggcaggcaaggagggttcaatacagaagtccactagaaaggtgcacttggtttgttggtgcaatagcaggtacccctttttggatctgttctctagcacctagctaatgagtgttaattggcaacgtgctttggatagatcacactggccatgactgccaccatccaaggaagggtgacaagaggcacaagaatagatttctctgtaggcctgaggaagttgagcaggacataatacagtaagacatacacatgtggcctcgcagtggcagagcaaatggctgtagggttaagaggacagtagggtgacctgtctccacgctcaaactcaagcacttctcccatgagcagaaggtctcagtggaatcacctgagtggcttttctaagtacgcattattgggcccaggcctggagacggtgagcaaagctcctcagatgattctgccgtgaaaacccctccttgagaactgagaatgctttttctgcatcctktgtggttgtgccycatacttacaagtaagcagagtgcaaagccaatcttttggaaaatacaaaatcaaagtgcccaatgggtacactccccttcccattgtgtctcattgccgttttgttgccacaggagttgagcgtcccaaattcaggtgtgcccatttaaaatgcaagtggccctcagtgggcacagtccaccaacacagctggacgtgttggccagagtaagctgccgttcactggaaatattctagagaaggctgaccgtgtgctggtcrggatggaaaggtgggggtgcctgccatgtgttgagtgagtacagcctaccaggatggcaccttagttcctccaacatgttcttaaatggatcaggctggtggttctcaacatgtgggccctggaaagtatatccagatcacctaggaacttgttagaaatgcagactctcaggcaccccaaactaactgaatcagaaactctgggaatggarcccagcaattggttttaacaaacccttcacatgctcaccaaagtttgaaagacactagtttagcttatgctataggtagctccttgctacctgtaagtcagaagcagcacagaattggaatgcaggcaaccggtcatttattcatctactgaggtattcgtacaactcttccaacatggtgaacatcttgtgctcatttgtctgattttcacctaagaatgtgaagtgttcagtatctagccagcttctcagctatggttggcatcygtgtaatttccagtgataatctgacttactgcatcctcttctcagattatataagggctgtgttcttttactttttagattcttcgtcacagcctccccatttgacgcgggctcagtaaactactgaataataaccaagcctgatttattcccaggactgccttaaatcctgctaagacttcactctgtgtctctttctcatatcctccacaccaagtggtaagccaggccgactcacttggctgtatgaaactttttaatggcacctttaggtcaaatgttgtggccatggtctcmcaaagagtgaggggtgaaaggagatactgcaaatcacacttctagacttttcactgattttcaaagctgttatagccatggttcccaaaatctgtaccagagcaccttgggtaccacagcaaccccacagaaatacagtgggatgtttttaatttttgagggaaaccyagaaacaactgtcagacaccatgcaaatccacctrtcaagctgtttggacctcataacttcataaacagggcatttaagtatttcttttgacctagggtcaccgtaaaaaatattactgaaacactaagagtgacatacactgagaaagttgggaatctctgttacagcatgactgtccccaggtatagtttaactgtacacattctggcaggatcatgcattcaagccatcacattgcaggaaatacacattctaaatttaaatattagcaggggagaagctgaaagaaaattagaactatatgcatctttgagggacttctttcctttataaccttcctacccagacctacccatcctagctccctgagacaacccttaaccaaggctcctgtgatttttcaaaataataaataataatgatagaggccaagacaggagaattgcttaagaccagtagtccgagaccagcctgggcaacatagcaagactccatcaaataataataatgatgatgtaaattctcatttagtgtcccaaatatgatggattaattcttgcaaattggaactaatgattgctctaattgctctggtgcattcctgaaaatcacctttgatacacactgttgaaagacaaattcaggctgtgtgtgctataccatgcacctgacacctcacagaaagccactggaatttctgataaagagccaacagaacctttaccaagcagaattaaacaagaacctratgtgcgactgaatgcagtggctcacgcctgtaatcccagcactttcagatgccgaggtgggcagatcacttgaggccaagagttcaagaccagactggccaacatggtgaaaccctgggtctacttaaaatacaaaacttagccaggcatggtggcttgtgcctgtaattccaactactcaggaggcagagataggagaattgcttgaacccaggagaaagagattgctgtgagctgagatcatgccactgcactccagcctgggtgacagagcaagactctgtctcaaaaaaaaaaaaaaagaacctaatgcgtgagaatggagacaaagtttccgaagtcaatttctgcaagagctttgcaatgtagccccatgtcycctgccccccatttgacactgaagaagtagtaaacagttatatttattaggataattttattttcatcttcaagggaatttcaggagcacagcagtcttcataacactccatttaggaagattattctttttatcccagggttaaaaatctgaaggagctcactgcagattccagaggcagcagagcactggctcagactgagagacactgtctccctgggacaagattgaattttcttttaaatttcagatgatactatcaaggggtcaagtactagagtcttttcttatgacaccatccagggttgcagaagggagtggattgtttgttattgtcttactcattatcaaactctttttaaaaatcaataataaatcatttgctgcagtcttaatgttttattttcacattcttgtttgttgtttttcatgcatgtgtctcagtgagtcacctaaccacaattatatattctggcatctggtggttctgcatggtaccctcattccttaggaattaatttccctgacatgatgaatgtgtttccaatccgttcatcacacacacaccccacacacccccccccccccacmcacacacacacatacacacacaccctctttagcagggagaagttaccctactctccaccaggtgtcagtagagtcagttttaacagcatgctttggccaaaggggcatctgctgaagttgtttttcctgctgtcagacgtttcctcaaactacctctgggctgtcctcttaagagactatcttccatttcttaggagtgttcggagatgatagtccacctgtagagaaagacagccataaggaaaccgcactataaacagcaggtggccaagctggtcctttcaggttggtctcataaaatttttactggctgttttcttctttacttttctatcactaccttatttggcttaaaagtgctccatgtttcactcaatgtgacaataaattagatgtggttgatgcttttagatttgcagggggctttgtttgtttgttttaaggcccattccacctctgccactgctgacctagtcctcaacacaggaatcggattttactctgcttgtagccccagaacccagcattgaagggtatagaatactaccatggattaagtgtgcacgtcccacttaacccaatgtcacctttgagagctacggccttattcccattttaggaatggttactcctgactcagtatcccatatttaagtggcaaggccaatgctctttgtaacatgccatggtgactttgtctgggagagaggtggaaaaggagaggggaagaggaaggggaagagagagaagaggacaatgatttggcctggatattgactaacataaagagtagggggaactctagaatgagattgttgaactggagttgagagagtgggtggagtggaagtaaargtgaattattttactaagaataaaaagaaatatcagcaacagcaaattaagctcagtttcaaccatagaccctggttgaattatttcccttcctgamggcaaaacacttacagagactgcctgaaaatctgaaatgaaaagtatagctttgccattcaacagtcatttgctaaagtctgttatgtggggcatgagtctcctgccatacccagtggagaaattctgactgccttcccctccaagaggtgacccactcagattaatacctgggatacggtacagacagagctttcactagttttccacatttttactaactcagagttttatgttcctytttaggctcatgcccagtctaactacgctagcttttcatattttttctcttactgattttttgatactacattcccaaatagggttagttttactgaatacaaaaggtggatcacagcgtggtatgatttgaaaacaccttgcctctgttctcctatttgagttcttaactgattcctatcatgagaaattcaaccattatttattcacttcattgggtcctagatttaatattaaaatgcaaagggctcggggaaggatarctggggctgcactcaggatgctatagacttgggaacaaatttatttctgtgtccaaactttcttactccccacagcaaggttaaatgaacatgcaaagtaaccttgaaagggaaaaattttttttcacaaaaattcagccttgcaagaggaaaatggcagggcagstgaaggagaagcaatttcacctccttttaatctttgtaatgacagcatctggggaggtgggctctgtattgttcttgagtctttaaatgacctcaggtaagcttaaagttagaccaggcaagagtttcagttcccccatgcctttgggatgattgaggctggccaggagttgagatcatctataataatgatgatgcctataataataaagaagtctcccaataccttacatttgtgtcctccttttaaatttacaggcattttccaattgctttggtcctcagcataatcctgagagggcaggaattgtgatttatctttacaaatgaggcttgargagttaaaggaacttgtccatgatccccaaactactaaactgagacccaaagccatctggaatgacgcccagtccaggagcctttcctccatacctgggattggacttgttctttaaaatattccccaaataccagagtcaaaggtttgatgtatagctctccctctcctcctatgagggggataaggaaaagaaggggaaactccacttttacccccaagagatccacagcctcactgccctcctagcatgggtgcagcccacctagggggacagccatttgcatttattcagctgtgcttccagatgccacagacagagctgtgggaaggctcaagtggggacagggtggggtgaggggttcagccccatcccatgaactccagtcatacccagcaccccacaataccaaataaacttcataaaaatagttgcttgctacctaaacacaacttcaagacacatccctaagctatgcccccctcttacacggcaacttcctaggaaatctagcatgtccactgattctgcatctagtcacgtttgctcaatgctaggtgagaagatggatatgtccttctctgaaggccttcccagttttaatggtcttgggctagggtatgtaataacrtcacactcatgggtctgaccttttaaaatgaaccaagagaattgctaatgaaggttccccaacccacagcccccaacccagtcagtcatggcttttctgggctgcccatgaagcacctgctgaagtattaatagatgagccctgttaaatcttatcatctgatacatcaggctgcatgacactctgctacccttcctcctgagagagccaaggagaagaaaaactaaggaagacagtttgaaaaggccacaaaaggttgatgatgagctgtgaggggaagcatgttttgattcagtgcacaggttggataaacaatgactcaccaggtctacgtggaaagatttttcatgaggtaatttttacagatgccccttcagtgctgtagtttcgatacagagaaaggaaacacaaggggacaaaggtgtgtggtcagggcaagcgtgctggagttctacaagaaggagtggaggtgttctctctggcactggtctagccttgtgaccttgaatactgagacaggcaagtattaggttggtgcaaaaacaaaagcaattagaagtaatggcaaaaactgcaattgcttttgcatcaacctaatagcaaygatcccactcaaagaggtgccaccaaagggtgagcctcccaagcaggcctcctccacactgcagcagggctgcctttctcacactggatcactgcttaaagaccttccgtggctccccatttttcacaggataaagcccaagttccacagcaactctttcaagactcttcaccatctggcctgaaactacatttgcagtgtcattcatggtcacttcctgccccgctcctgcagtcacataccctgggcttttttggtacttctaagccatgcttttcatccctggcgtggaaaaaaatcccagctcatttttccaaagccaaactcacatatcaccattgggttccctcatacaggtgtaattaattacagtctcttcagtgccttcaaacacatcttgtatccctcttgttcagctcttctgcccctgagttacaggttggttcttcacctaasccttgcaggagtgggctccatgagtaattcatcttgaatgatctaaagcctgagttggtgtctgatgggattaatggggcagccctagacagatccttgggttgatggattcctcttcagcctccaggcttgttttttagaaactcatcttccacccacaaaggaatttactgctggtaggttctcttctctttgctcccaaccaaaaatagctcttgtgtctccttttcattctattcactagatcacatttacatcaacttatatcttttccattagctatctgcattttaagaatgatcaaagtccatagccaaagcttaatatggcagctgtgagtagattttgcatgtgtaaagtatctgtgaaccctctgaaaatatataccaaatggcttacccatttttcaaggggaggggcaagtgatataattaaatggaaatgtaatttttcattacatttcttgaggagagcacactccctaatagttgagatcactcagctaaagaatgaagctttaaaggagaatttgaaggagtgagggacatgcagcaggattttagcttgtccctgaagccatttcatacacacagcgcctgctttattgcagcttaaagacccaggtcatctcaagagaggcttaacatgccctgagagcaaaaagcagtgcaaggtaaggagactgtgttcttctgtgtggccatcccagcctatgagacatgcatcttcttagacgtcaggcagggcagggaaaggcccctcagcagtctccaacagcatctctccacccgttctctgtccactgaacatgcctgcactctgttccacgtgacagcttttcagatatttgaagaccactctctacccctcatgtgactcttcccttttctaggtttccttcaatgtttccttaagatacgttttccatcgtccaggatattgtacatgagacatccttcttaaaatgtagcagcccacatgtggtctgaccaatgtcctacaggctctttctctttctttctttctttctttctttctttctttctttctttctttctttctttctttcttcctttttctttctttctctttctttcttttccttccttccttccctccttctttctttcttcctttctttttttcttttcttatttctttctttccttttttttgagacagggtctcactatgttgaccaggctggtctcaaactcctgggctcaagcagtcttcccaccttggcctcccaagtagctaagagtatcaagtgcatgccactgtgcccagctacaggctatatttctgtccatgcagcccaagatgctgttagagtaattagcagcagccacagttcacagtgtggcatggaacccaaggccttccaaagttcctggacctatttactaagtgttgataataattccatttacttttcagtttcagaggattcaatartaactttaccatcatttggatttttaaaatacaaacacactttgtgtgtttgagaggtgaatgcctgcttttctactcttccaatgagtggaatgagctttatttaagggacacagcactgggctgagaacaggtagaactggcagaggaaggctccacctgcatgattctcagcaccaccccttggcacatggcatctgtgacttttatttttagctgttccttcccaaccagcttataaaatggattgtaaattccttgagggcagagagcctccaatcttaacctatctgcatccgcagtgtttatcccagtgttaaatgctcatatcacattcttcacaagtcttgtttctacctcttaaatgtcacttaaacacctagccctctcaccatctccaccacctccactcaagttccagcacctttttctctattctggacctgccgtggcctgaccagtctgctttccacccacgagctgctgtaaagctttaaaaacccacattgggtcttatcacacccctgcttaaaacctgcgtaatgtaaaggcaccacccagtttttctgtatgaagctcattccttgcagrgtagtccatgggccttaggagcacaaggatgagaacaaagggttaaatcataacctggggataggtctatttgaaagaaggkcctaaaggtctggrgtcacctccactcaaaatcctccccaaataagcccaagtagaaatgacctttccttctctcatggccccagtctactctgaagagacaggtaaggtgaaacctgtatatatttttgcatttatytggtgcaattctctccctatgttagtttagaagctgcttgtggacaggccacagtgttgtctttaaacaaaacctagggcattgcctaaacagagtagcctcaaccaaggcctcgcgataaccaaacaaatgaatgacccatgtcaaagggatattctctacttgggtagcagttgcctagaagactaaatggaatggcatttcccttcccctagtgctgaactgttgaagcagttaaaggaccatcgactttgaagggccgtggtacacagaccctcactggatctaactgaaaacccttmcctgaccagagagaaacagggcatgttttaatgaatgacacacagatgctaggtgtcaatccttcattagcgtagccacccctttctaacycaacaactccttgacccttcctcctcactgacctacaaagcccttcgctgtttttstttccttcctggcaaataaagaaactcagcttgctttacttttaagttcttttggactttcttttctcctttgatcccatgatttgctggtgagctccaggcctctgccaaggctgtggaaaggaccatcttgggattcccctcctcagtacagagcattttaccaacacccaccatgtaggacaggagaccaggaaaggaggccccgggacacctgcctkccctgggggattgttagaagctttactggaattacattgaaaactctagagctcactgaaggaaaattgtactaaatactactaaatactaaataataccaaaatactacagtaaaagtaacactagtatactattaatagtattagtaatactatatctgttatatagtaacagtaacactaaaatactgaagtactaaattgtactatagttgaaggaaaatagtactaaacagaaaaattggtaccaaattttgtggtgataacactatttttaaagtcttatatagaattaagattttttccattcctagatactttccgccccacacacaataatttcctatagttcatatgcctattcaattggaattttgaaaatgaagatatttttaactgataatatcataaggacataactgggattttatagcttcgccttcaagacaataaaaagcatacaaaactatgctgacacatttgtattaatgttgtattttaatattatcagtcaggattcttttggttgcaagtgacagaaacctaagtcaaaccagcttattgtaaaaagggtaatattttactgagggcatccaaggaagggctgaatagccaaatccctggaggagyagaagaggatacagctgggcctcaggaagagccgagagacaccacagctttctccttccacttcaggctgtctgtgaatgtcagatggatcctctctctcaccttcaaatggactttttccaggtggctgagagatatggtctcagtgttagagttttaacttctrataaattctgtccctagagaggaactagataatatctctttctctctccctcaatccctccctttctttcaccctgaaaaatcatcttactagtccasctcaagtcttaagccagttttgccagaggtggggcacagtccaagccaagttcctccacctctttagaatattcaggagtggtagcatgtgaaaacatggcagcttccatgggttcagagggggtggttaatggcagcacagtttctaagaggagcaacagagtcaggacccgcaatactgtaggtacgacctgtgctctcacctacagcagctcagaacttggtgcctctcactcaaaatgctgctggacaggtgaacaaagatgggacaaagggcttgtggtagagacccttgacsagctaatcagaggcaagaatgcattttcctagcagtgaatactcatcctctccatcaggtgccaatttggcagcttacactatgctatatcaacttcattcatcttattttatttagttgttcaacatatattgttgagtacctgttatgtatctgacattccrctcagtgtagaagatataaacatgagaaaggcagtctctgccataaagagattacagtgtggtgggaaaggcagccgtgtaaacatgtaatttccacagaatgggacaagaagtatgatcaaggtttgaagtcattgctgcagcattagatgtggagacagagcatgaatrgctatgtataaatctgtgttgtaaacataatccacacacttcctctgcctcgttctttttcttctccaaccagttatttaacaagattgttcctccctttcatgggcacagtacgttatagattacccagcacttccactcacagcatcttcaaacctcagaaataccagccttgtgaaataagtgggacaagtattagtttcctcatcttacactgaagaaatcgtgtttccagtgctttgaaattacttcctctgatcccacagctagtagtatattacaacgttggacctcaagcccatgcctcaggcttcagtgctattcctaagccaaaatgctaccaccatctaccactggccacagaacacactccagaaaaagaaagctaatcctaatctgtctccrgcaatatgctgaaggactgtgacccaggttcatcacccaccagtgtccatctgtgtcatcctgkgtgcacccttccttggcattcttccctgggtcagtgcacctctggccactgatgcataccaggcctccatccccagcctgagggccaagtctgactgttgctcttggatctcattaaggtagtggtgaggtggggagttcagctctgactaggacaagtcataaatrggcagatgagaatatggattcagttctctagggcagtgtgtctatgacttkaaagtgcacatgaatcacctgggggtcttgtccaaatgcagattctgactgaggggatgcccaaattttctatttctcacaagctctcargcaatgtcgagactgctggcccacagaccacaccttgagaagcaagatctagattagagatgctaatacatcttagccactctygggataaacagcaaatctgtgagctggtagctttcttaaaaatctgagatggaaaaatgtgmscttgataaaaaatttatttttaaaacatgtttatagaaggaaccctgagatgaaaattaagaggtcttacaaatttacacatatcacatagcccacctatgcttcggtgtccccagttctgagttgagagtaacaaatattgcttcaaggtaattaatgcatatgatattgtttggaacaaaaccattatggaaaatgcagattataatctgtgattttttttgtattttttccttgtaggagatgtcagtgaaaaaagggatccagaatgattactaacctatgactcccaacagtatgacaggtatctttttttttttacattttctttgtgtgcctccatttttgttccacctagagtgaaattatagattcttaaagattaacttgcgagttttagcaaccgttatttccaaaccaataagtgttattaaatcctgtgaatacctccctagaaatgtacttccatcttcttctgatataagatgcatcctcaccagaaaggtgatggagaggaaatgactattcatttttagccatcctttagccattgcacactaagtttactattttcttttcttttttttcctttttttttttttttytttgagacakggtcttgctctgtcacccaggctggagtgcagtggtgcactcayggtttactgcagccccaacctcccagggctcaagtgattctcccacctcagcctcccaaagtgcttggatttacagtaggccactgcacccggtgtatgtttacttcttacagtcattccaattaatataataaatggctctacatactttgtgaccacagaaagtgtatattttcagaagttggctgtttattccattcagcagtagagtcagaatggaatatgattaggtcatgtaaggtataagtcagttataaaactcttagcaagggtcaaaggagagrcagaatgaccttggaggaatacaaggttgcaatagcacaaattctttgtgcaatttatagagcgatggttgtacactcagtggtgccagggaataggcygataacaccagtgatgacaaaggttaggtaaaaggaaaaacaagtaaacaaagctggagaactctggttctctctaaaaggaagccatytcccactctaagcaatcactgacaagaaggaatgaagccccatgtgtccagagatttcaaatttgcaagagaagttggaaattcggattttaaatgaaatatcccaaattttagatgttagcaaataacttataaaaattttatagacttatggctcagtcgaaatatgtctgctaactagaatcaacccatgagctgtgagtttatgacctcagctatataccttccagcctagcagcaagtccaccactgtcctttttgttaccatggcaacagggcaggtcctcatagacctctgtgtgtcgaggatgcagcctgacctttgattatctattcatgtcacctccccaccctatgataagctaaacatgtaggacaaattgctccaagaacttattctccagtagacctgagaaactgaagcaactgaaagttgccactcagccttctaaaagttttgaagcctcccaatgaccataaactttaactctcccagcatctttgcccagcctctctacccacccgtactggagctcctgatatagcaaaaagatggggtgcctgggcaaatcacaatgattcacacctgtaggagctgagggcatcggaatcacatatcttcttatttcacatcaacaggcaccaaaacgcacccactcccacatctattccactgccaactaggtcaaattctccgccactaaaatygcactccttctacgtcataaaccaacacattcaaccttagctacagcctcaatgtttctgttgggatgaatggcaatctcagtcaggaggagtgatggcctaagtctttgcaggcacacgcaggtgtgagcacacagataccagacagcaggtagccacgctgcaaaatggagggacagtattcctttctgataaaggaggacagtgtgagagcargtgctataaggatggctctctactccatgataatttgcccacctgaaaaagtgtccaaagatctggactcaaagaacataccccaagacatatgaaatggcaaaacatggtgtaaaagtaggtaataaaatggtcttcgcttgctgtggggattagttctaggtacagtgcagttcatctagggagagtgaccattcattccagctcctctggatcaggggctggcaatttttattgttgytgtaaagggccagtgaataaatatttctggctttgcagcccatacagtgtctgtcataattactcaattctgccattgtagcatgaaaagccatagactatatgtaaataaatagacttggctgtggtttactacaaatttataaaacaggcagcaggtcagctttggcccatactttgtggacccttgttctagagcccagggtggtccaggcagttctcttctagctacaaaccatctcattactgagcagagcccccaggtctgagtcagcttgagagctgagctaggaatctaggcccactcctagacagctctagggtaagccagcttttcagcccatcttgtggaagctgggatgctttcctcgcagactgagccagaaccccagctgcctcctagtgaaggagggagttttcacttccagcatttgcttcatagtggagaaactaattgtagttctattttcaaaagaaacctactccagacacatacatgtacagtatacgttagtgggctcatatgagaaaatcattactttagatgcccttgtttgtgtatgagataaaacaatgttcttttccctccttcgattgcagtgggctcaggggtacatgttttaagaaacccaaaggaagaccataatgaagttataagctgtcagaactaagtgcttgctctaggagcatacttcaaaggccaaatgtgcatatttttcctttgaaaagcwtaatagataatattactgctattcaacacaggaaatcaattaaacccttatgaaaagaaaatcattttttagatgatcagtagttaatatggaatctattttcctcaaacagaacaggtcagcattttcagataaatgaggcatgttttttgtaggctctttcaaccgcaatgcttattaaatttatgtactttgcactaactcgaatgaataattgtttattttttgaggttacttaatataagctacagtagagtcaggtcttgccaaaattttctcactgctttacgccacctaatttgaaattaggactatatgaaatcattcattgaaaaatgcgattccttccaacctcagcagaaacaagaaaaaaaatacaattcttaaagaaggaagtaaaaaagtaccttratacaatattttatctgtctggaattaagcatcacttcctagataatctgagggaaattctgctgacattgatgacaatataatgagctctatttttaataaaaccgtgatcctcagcatagggaaatttgttccaagatatgagtagctaaaaygttaaataccaaagttagaggcttttggccttgactgaacaggaaaccaagaattcaaactgtgctggaagaggcaaaaacaaagacccattatgtttgckctgaacctggctgtatgatattaggatatggcataaagctggcaaagtacttgacgttttcattgaaactgggcctccagtaatttaaagtcactctattatgatgcctttaatgtgaataatgtattccccattcagttattaacttggacttctttgtgacttgcttgtttgtttagcttccctactgtgggaaggtattttctttatcaaggcattattcttgagtatccctctgtagcagggaagggatgcgtgccaagatagataggagctttcagatgttaccccaaaatttcccaccatgtgatctttgtactgtttcctgtgagcttgctttgggagggctcatgtgttaagcaaaactgagaacaacccaggtttttaaaaatttcccttatgacaactgaggttgagcattttttacatgtttattcaccactcgcatttctgcatctgtaacttgcttgttcatagtgattgtccatttgcccactgtagtttttgtctttttctcattaattgtagaacctgtttatgtgttatggatatatgagctctattttggataaaaccatgatcaacagcatagggcaatttasgctgagatgcgaatatgctaaatgttgaatatcaaagctagagtctccttttgctaagttaactaagcaagtcacgtcatctccctagatcttgaattccttatctaataatgagaaagtgaaagcagttcatccctagttccccttccacttctcaaatttgaatatttataaatcacatgttcataaagtaaggcatacatacattgatggttgagtataaagaaaaagtgaacactgaggcagtgcattttgtgttttgagactgtcctactgaacaagcttttcagagtcagacaaaacatttaagttgggaaaactcggcattttattgtgaagcccatgccatttttcaaaggtggaccttcaggtgtcccttaggtttttcagctgcttcttaatggccatttcttccttcagaaatagattcacggtggtgcatatgtcctacaacctacgtagaatggctttccatggtttcaaaargttactgatggcaaaataatgacaccattcaaaaataactaatgttaacactgtacatattgttaacatttcctgctgtcaataaacacgcttcctcaaagggatttgttcatggctacttagtaattcatcatatggtgatatagtccctgattattaggctattaacataatattgttataaataatatrygatgaatacatatttattacatattgacatgatgaatatataatgaactgccttgtacataattttgcatctttccgataatttccctctggataaactctactatgttaaaggaaatgatgggtcaaagggactgaacagctttaaaaactttttctgttttcacattttagccagattattggaccaattgagacatccaacagcagttcagcctccatttaagtatataccctccaaatgtagaaatttttggtatagttagcctatttctttgtttttgaggaggtaatttattaggcaaaattgtatcaagcctttcaaaactttatatttttcttattgattataaatttgactatataccccccccacacacacattgattggtgactcaaacttcaccttttataacttaacctgtttgtttaacttttctattgtggtatttgtctttttcttaatgatttagatattagggaattaattcattttctatcttaaacagtatatatatttttctcaatttagtacatatctcttctttttgtttatggcaatatttaaccttaayttttcttcctttgaaataattttatacttacaggaaagttgyaaaattaatacaaagaatttcaagccatcctttaccctaagtcttaaaatgttaattttatcacatttgctttaatcttctttctctctctttccatctctatctaatttttatttcaaaccatttacaaataaattgtaaatatggttccatagcatttttggtcatacaaaagcttttaatttatatagaatgagttctattgaggtgtcatttatgatttatttctttgttgtcaagcttagtaatatcttctgatgagtactgagggacagacctcartgggctctttggaatgtgttagcacttttatttcaacatgtagttctttttaattagacgcaggaatgacttgcttaaggttgargatttttctctctcatacttacctttaacacttgcattgttacctttgtgcaccaaacactcacacaaagtggtgagcctctgaggcaagggaggggcaaacctgattggtggaggtccttctgtcccttctcccaaactcaggacagtcaatccccaggccttaggactgattacaggtgtagatgaagtaataacagaagccaaaggagagcaacgatgcagaatgccaacacgaccctcggctccgcttcccacagtgccatagagctgggaggctttagatagatggacacgctcctggcatagccattctgaagggaaatctggaggtttattgcaatttctcctgaattcctgtctccccagatgtgaccaaaaataaaacttggccttggattccatacagccatctatacacattacgaatgctgccatgaatagtttggcagaaagaaaaatagcccaaatagctagctctactgttggctaagctttgattttatttcttcagtatttaaccacacaatgtgatgggggcctttttgctcctccctctgcatgctgtcacttctaaaagaaataaaaatctcactgcaagtaggctagaaaggaagcatctgtcttcccccaaattccttgagggcagaagggaggctattacacacatcacacagaaagtctttaaattcatgctcagacatctctcccacagatccatgcctcacaggaactgctgaaacctcacatcctcttctccctctctccccagaggctaaaaccctgatgagtckgctgtacacactgcctcccctccccgctgcagtcaggaatctggacccttcgctcccctccctcttctccccactactacctccaccttcaagactgtgagcctcttctctccacttcctcgatatgtatttccttttaaaaccccactcagcaaaataaacagatcttccttgggacctcacttaccttggaaagcaaaggaagggaaaaccataaatatttgtcatcttacttttttttcctgtcacacacaaattggtagaagaggatgaaaatcactccatggcttccatccagactagggaagagaggagaccagcacctcagttcacgagtttctctagtttctgccataataaggggcaaatcaagagaccaccaggaagaatttctgtgcagctaatacatcacctttttctttaaaacaagagcaaatgctccttttttcctcatgaaacaaagaacggtaactcttcatgtggtatgactgggtaaaagatgccctataggctacatgaagaaggactggtcctcttgtgctctgactgtctctgtcctcctttcatccctcctstttaacttcctgagcttctcttggaagagaaacttactacagaaaagtagggagctttctgaaagagaccagattaacaaaatctcaccaaatccagacagactagcgaaaaccttccctcaaatctcccagcaactcttagacaattacttctagaacaacttcagtttccaaatttgagcagctaggtaatcaggaagttgaaatgtcaaaaggacaagactttatagagagtagaaggtgggagcagaagagtgaaaaaaaaattctttctcagcaacccctgtrttcttcctagaagtcaccctttacagaaggcaccctttacaaagctggcttcttctcataccccaaccacaatcatcatcacaccaacctccactatgatcattgcctcccacatcatcatccccattatccccaccatcaccactctgctaaactcatctcagtctcctgcaagccctgctgtaaccaagagctgtccagcacatctctacctaacttttttcctaacagtcacaaataacagctataacttaacaaggttctgttatgtgggggatgtatcttcctctctagtctcctaaatgccactaaagtccacagcagttgcacatatataggtgcaaatcccttcaaaagaaaacaattttcccaaccagaatttggtttctaatgactatatggtgttattttgtttgcaatgagccaagagttatttttatacggcaccaccacctgccaccattgccatctgaaaagtcccaggcgcttgttttatccatctttgcttttctttcaagtcttggctatgatgacattctcgctctggaatctggctgtgttgtaaaaaggaaactagtgtggaatgccagttccccaagcctgcagagtgcagatgctttcttgtcttggttctgtaactgaactgagtcattttctctaagccatggttcacacattagcaggctgaagccaatgtggtgaagtgtcttgcccagggccgccacagcagactgttcagtatttggaccatcagttcccaaagactgggaaactgtgggttaaatggcttcaaatggtgattatgtttctttcttttttttttttttcttttgtttaaccttgactgaagttctttgtctttttcrtgctgcatttccaaggaagatgtattaagcattctttcttctcctttttagtaagctgagaccaaattaataaaatctcagcaaatttagtcagattagsaaaaacctccctcaaaactcctagagattcggacaattgcttctagaacaacttcagtttccaaaatgacagccaggtgaccagaaattygatccctctctttgaaagaggacctaagtttgtcctgctcaaacttggctgcatattagaatccctctgggagctttctttttgagacagggtctcactctgtggcccaggctggagtgcrgtggaatgatctcagctcactgcaacctccaccttccaggctcgtgtgattcccccatctcagcctcccgagtagctgggactacaggaactcaccaccacacctagctaatttttgtaktttttgtagagatggggtcttgccatgttgcccaggctggtctcaaactcctgggmtcagctgatccatcccccttagcctcccaaagtgctgggattacaggcatgagccaccacacctggccactctaggagctttttaaagtcctgatgtccatgccatcctagaccagtttaatagtaatctccaggtgggggcccaagactcagcattcttttaaaactgtccaggtaattctaaagtacaacccagtgggacacagtggttctcaaccctgctgcctattacacatcagctggagatctgttaaaaaataccagtgtctgggccccacccctagagattccaattaattggtgtaaggtgaaacctctggtagctttgtttttttaactcctcaagtgattccgctacgcatctggtgttaaggaaagagctgttgttctcaaacttggtggtgggatcagaatcactgggaaatttagcttaaaaagaaaaaagttctatccaaccatcttacctaatgacaagtgccttggcttttcttgtgcctaattagctctccaggtgattctgatgcacacagaagtttgagaatcactgatgtagagggttttgttttttccacagaaaatgttagtttggccatctgagtacctacaaaaaaatctaaaatattaccctttaatctaggcctaacctgacctagggtgggcaaattgaaatgtaattagtgatgctctactcctgaggactgtgtaggtgtctgttgttacttttgcccacaaatgacaaactcatggttcctgaaaccatgcatttgaccagtgaacatcagcatcttcacttacccaaatggctcatcagaacagcaaactctccagctcaaatgatcacaaagtccttcaggcctgcactccaaggccagcatttttcattgaagtaatggaacagtcatgaggaaacttgtttctctgtcccacaaatgatttgataggcatcgagtttaaaatcctatttttttgtttttgttttttgagacagggtctcacactctgtcacccaggcagtggtgtgatcacagcttactgccatggagacagtgacctcctcctcccaaggagacctcccagactcagttaatcctcccatcttagccttgtgagtagctggaaccactggcacacaccaccacactcagctaaatgtttttattattattattttttgcagagacagggtctcaccatgttgaccaggctggtcttaaactcctgggctcaagcaatcygcccacctcggcttctcaaagtgctggaattacaggcatgagccaccacgcccgagcttagaatgctattctatgctgctttaatgtattgtctttagatgtgtggtacttttggttatgggaagaggtatttatatacttattatttttaatttttttaaataaatgagaggacttccattttggggtctgaagagaatatagcactctggtgagcagtccccatagggttattgttctcagcctgatctacatgtttaactcacttggggaaatcttaaaaatcccaatgctgaaaatgctgaacttttctcaaaggattgtggtgaggatgtaagatttatataaatcacttaacatagagtctggagcactggggcacaacatacaacagccattatgagggagtacctggcacatagtagatactcactaacttaatttactgtggagaaaacagccaacagaattacgatcctacaatggaaaaaaaaaacaaatgtaaatgagtgtttgtacttttttaagaagtttgttttgcagctaaccttaaatgtctatagctttgcttagcccattcccataattcatgtcttctcactagtgtcacatacaaatttagcaccctagctagaattttctaaaagaattttccgtacagctaaggacttttctttttwaaaaaaaaaaaaaaaaaaaragagagagagagagagacaaaaaatttatttgttattctttatggaaatttttttttgttttttgtttttttttgagacagagtcttactctgtcgcccaggctggagtgcagtggcgcaatctcggctcactgcaagctccgtctcctgggttcaagccattctcctgcctcaacctcccgagtagctgggattacaggtgcctgccaccatgcccagctagtttttttgtattttttagtagagacgaggtttcacggtattagccaggatggtctcgatctcctgacctcgtgatccacctgcctcagcctcccaaagtgctgggactacaggcgtgagccacagcacccggccaggaaagatatttttaatgaagcagtaatctaaacataagatttgaagcaaacaattcgggcaaaaggaagtagatagtttttcatacaatctcttcctttctgcaatccctgataaaataagcatctttaaacatttgttgctatgattattattgttgcttaattttttaacaggcatcagttcctaggccagacaaggcaagggaccacaccacacagtattttcctgaatgcctagcgtcctgcaggatggaggacttagcatgatacaaycacatcatgtaggaagtcatagcagaaaatgggaggggaaacataccttcccactactgccaataaaatgtgtttaaaagcactggcttcccttaattcaatttcattttacttgcttggtgtcaaattgtgattttcaacattttttttttttgccaagatcctcttattttctcccaacacacacgtcccttgaaccccgtgctttcaaacatyttacctgccaagccacttttatgaagtaatagcattcattgactggtttttaatcatcaaagacatatttggttactaatctgatgttttcaatgagcaggatgaaatgatcaatgttcccacgctatacagatgtatagaaaaatttctatatctttttcaaaaatctgaaggcatttttcatggaagtgtcacagactgcctcatattattgtacaacttcccttgggccttttcaaactttttaaatggctcatagtttcctctgacgctgcttttatagacctcaggttagaaacatttgaaaaagaaaattctgaatattcttgtaccccaattttctcaactctaagtaggattacattcttatattaattaaatattatattaatatcttataattcttataatatttattattttaatattataagagtgtaattcctacttagggttgagaaaactggggtacaaggactatggaaccataaatgaagccatcagaataccaattactgctggcattacctttcatcaaaaaagtctttcagtattattataaaatcattcttcaaagatttctatgtaaatgaatataaaatagcccatcgaactcagcaatgcataatgaaaatattcatgagaagtttaatcatttaacaccatgctctaaattagattaagaaattattgggataaatcagaacattcgtaaattctttaagtttctcaacagaaaattctaatacaatttaacatttttgagcatctcagatattacatactaaacatataaacatgactgagcaagagttcttgcctttgagaagctcatagtcaagagatcacagtttctaaacacagcaattcatatatttttttttttgaggcggagtctcgctctgtcaccaaggctggagtacagtggcacaatctcggctcactgcaagctccgcctcccaggttcaggccattctcctgcctcagcctccccagtagctgggactacaggtgccctccaccacgcccrgctaattttttgtatttttttgagtagagacagggtttcaccatgttagccaggatggtctcgatctcctgacctcgtgatctgsctgccttggcctcccaaagtgctgggattactggccactgcgcccagccagcaattcatatttttaacatctgactcatggaagttcagcattggaaggaatcttagagaccatctagttcaatgccatgaaattacaggtggagaaacaaagcccattaacttgaagtaataaatgtgtggccctgcagcagtgcatcacccagacgattcagttgtttgccttcacacttctcacaccttaagcatccattgactctgactggatttttaaaatattgaatgatataaaagatagccaagctatttggaattgtaaagcgtctattagcaaaataatgctctccactgcaataaatgaaccccaaaatctcagtgacttagtacaacagaattttatttctaactcatgctaagtctagtaccacatgttcttggttggcaggtgacacttgtcaaggtcatttatggacccaggttctttccttcttacatccccatctacctctaggacttcagaattttctccactaaacagaggcaagagaaagacaatgaaacaaarcacataagaggtgtttcacaggccagacctggaaatagtgcccaatgctttcattcattctattggctagacctcagtcacatggccgtgtctcactgcaaggttgctgggaaatgcagtctagctgtgtgcccaggaagttaggagtatgcagattttgatratgagtctgtgtcataaagggctatacaaatgcctaataacgttatggagatcagttcaggaagggcttgatctttacagtgaagtcatctttttgtttaaaaagtgtctgtttcagtcctctgaccctattccaggttttaccaacatctctagacaggggtaggatggtctgttttacccacctttcctggttgctgttggagttggcatggagtaatggaaagaaaacagactttggcgtcatgtgtccttgggttcaaatccccagttttccactaagtaaccttgtgacttggagcaagttgcgtaagcytcaattttctccttgtaaaatgggggcagatagcatcctagagttgtggtgtgaattaattaaatcatttagtaaacacttactgagagcctactacatgtcaagtcctatggtacactctggggaaatagcagagattttttttaaaggcacagagcctagattaataaatgatatatatacagttattgtcatgagaaagcactcagtaaatgttagtgctcttgcttttttgccctctatagctaagctgtgaagatatgttcatccctagaaattctagatagaataaactagtgaatgatggatctgtaagatggataggtcaagtggaaaacgtttcaaatgttwccattgttcctgttgtttgaaattgatttgatggggtgataatatttatgtctatgaagsatgtttaatttgcaagggcataaaacataatgatttgagctgcaaacaaatacttgttcagtcccaacaagagtaaacagaaacatcaaattggagagccctcttcaagactggtggcctttccattgctaagcctcctttacaaatgagatgaggagggtcttcagagatggtgaggaccatctctggttgcaggccaggttgcaggcttcctgaggaccagaagggcagtaaatttgcagcagcccctcctactcactgacagatcagaaggggcaagcaaggtccccaagagaaggaggataacaccawgtcggcatctcagccactgatgcagccttggtctttgggattcagagactggtgagggtttttgcctgaggaaaccggcaccttcggtgctctttgactccttcttgtctctcagcttttattgtttcctatgatttccaaatagagcagaggacctttatatttgttttgtttgatagcctgcctattttttcctctcttgcttcatgctttccaggaagctgttttatttctctttacttctcttttatctttttaccttaaatgcagaatagtctgggggagaaaaggggcacataatgaggatgatgggtcttcagaccaaagtacataccatcttgactccagctagccctgcaccagccattttatatgccctaaaccacagctgcattgctgacccctaatgccacagaagagctaaaggcacaggctttgtcacatccacctcaagtccattgtggctttacctcttcagctgtgaccttgggcaagtcgctttccctttcttaatactcagtttctttacctgtgaaacggagatgatcattacttatgtcagtattcatgtgagggtcaaaagaaataacagaatgtgcatagcatcatgtctagaaggtaggtagtgagcctctaataataaatgacaggtgccatcatcatgatcccccacagtgaccatatctgcaggccaaatgcaccaaccttgccagaaaagctgtgatgggaacaaatgcagctgtcttgttatcttgcttcaaacttagaggacacatttcacattccccattaaccaaatgccatccagttttcctgaacaacccattccacagctaaacactaaagagtcacaggtttggctcagaaatgagtcttctagtcgcactttccaggcctgatccttgagaattacccattaattttttaaatccctttagaatgtttgtgcagaagacaccactgaaagtctatgactaaagctcctggatcctttgctagggcctccctccacaatacatctgattgtattgkcgtctcctttccagataaggatttttctgaagatccttctatatgtggttcttctctaccctcttgtcttaggagaactggaaatattgaccagggctgggattagccttctctctgtttcaggcagggacagttctatccatgataagtttcctctccttccaaagtacacagtccatggcatgtttaattaatagagtcctgggtaagattccaactttccaagattaagaatgtgctttgcttcctgaccctgtcaagccccatcccttctcaagaattttccatgtgccacaaatcaactaaataaaggcttttgawcwccacatgcactggccaagaggacaaaacctaaactggctacagtatgaggctcctggacctgggacagcttggcccagtccagtgataatttcaccaaacacacttcctaatcagttttctctgttcttctcttctctctctcagaaactcttgccatttaagggtctggtctacttggcacccttacagttttttgctrctgttctccactcccattgttcatgtcataccgtatcgccagagttgctcactccgcttaaagaatggcattgtttgccactccccaggggcacactggtttagaacgtctgccagttatcttggcagaaggaatcatctgaatgttttggctcaatattatttaatcctaaatagtcagctgctgccttaatcttgaggacaaattagatacagaagacagaggaatccagtaactgaaatgaggaggtcgcttcatctagatgagggctatttaccttcacccagctttctcccaggctgtctcagcactccctgtactatctggaaagcagctgatggacggttgtgttctgtgtcagcataatagcgggggatcaaggcttggttttgcctgtaactctccaagtggcctggatcaaaccatatcaccttcatgggtctcaattctcttttctttcttttttttttttttttttttttgagacggagtcgttctttgtcacccaggctggagtgcaatggtgcgatctcagctcactgcaacctccacctcccaagttcaagtgattttcctcagcctccggagtagctgggattacaggtgcccgccaccatgcctggctaattttcgtttcgttttttgttttattttgttgttttgagacggagtctagctctgtcacccaggctggagtgcaagggagcgatctcggctccctacaacctccgcctcccaggttcaagcgattcttctgcctcagcctcccaagtagctaggattgcaggcacctgccaccaagcctagctaattttttgtatttttagtagagatggggtttcattatgttgaccaggctggtctcgaactcctgacttcgtgatccacccacctcggcctcccaaagtgctgggattacaggcataagccaccatgcctggccaatttttgtattttyagtagagacagggtttcaccatgttggccaggctggtctctaactcctgacctcaggtgatccgcctgcctcagcctcccaaagtgctgggattacaggcgtgaaccaccgtgcccagcctcaatttccttttctataaataaagttgaactggtgtggtaataaggtcctttttagcctgcaaatattgtctgmattttattactcagagcccattgaactaggaccaattgatctggttaatttgcctctgaaactgggcatgaaatattgctgcacatcatcttagcatacatgtccctagatgagggtcggaaaaacaaagagtctgaagaacaagataaagacttcatgaagtcactccrgtgtggcttagccaaggtaggatcactttggtttggcaccatcataagctggcaaaaagaatacaatcttcagtttctaagccttctcattttagaagacatctctgcagtgcatccccactgctcattattttttcaagctgtgtctgcttcacttgcttaagataaaagcctacacagtgtgccatccaaatataggtccacggcagtccagagagaagacagcctgaggtttacggtgacaggacattttgaatacctaacaaatsggctgtatcatatcaaagcccaccagtcaatattagcaatgaagggaaatgaaagtaaggtttgttgagggaacaggaagtttcctgtactgtttctccccttgctggaaagcaattgtgatcaataccaggtgcaaatcattgcttgtaagaaaaaagcattcatgattatatatcacaagcaccacatcacaaatatacttatgtgtattatgacttttaaaagggaatagtgctttataaatcccaccatcttttttttttttttttgagatggagtcttgctgttgcccaggctggagtgcagtggcgcgatcttagcttactgcaccctctgcctcccaggttcaagtgattctccggcctcagcctcccaagtagccaggactacaggcaacctaccgccacacctggctaatttttgtatttttagtagagacagggtttcactatattggccaggctggtctcgaactcctgacctcaggtattccacccgcttcagcctcccaaagtgctagcattacaggcatgagccaccgcacttggccccaccatcttttatatcttccaaaaacaaatgtccacattactatggaaccctcccaaaaactccattgattgaagctgactttccactcaattagtgaccatttaaaataggtttctgctagcactacacctgtcagtcattcataccttacttactgtcaaccagacattccctccgggaatcagtcatgctgactggtagaaaggagataacaggtgtaaattaggaactccagtgccaggtagcccagcgtcagaggatgaacgctttgaatcagaagcattggaaactcactaacctcacagtttctcagtctcagcactgttgacatttggggacagataattctttgtkgtgggggctgtcgtgtgcagtctaagatgttgagcaacatccctggcgtgtacccactagatgccagtaacacacacactccaagttgtgaccaccaaaaaatgtctccagatattgccagctatgccccacagaagcaaaaaaaaaaaacaaacaaataaaccaacctgggtgagatccaccagccggggatctccccagccagggatccaattatttggatcgaacaaataatcttcacatgaagggaacatgcaggtatggaatttttcttccagagcagtttcctcactttggcagtttcctcccaccctccccatcttttcaactttctaggtaaatgtgtcctgagaattgaggcagttgtagatagggcctcccaggaagcaaattgccaattctccttggtgtagtaagcatggaccattttgcagcaccgtcccctgaacttgccacattgtcctaagtgaatataacaatgaaaatatacaagagaaacatgccacatttaggttggagagcattttgacatcaccgttttgttaattctgttctctccacagaagctgtcatctgtagacacgtatcagaacaaacagaataattgttaacagcacaatattttttcttattttggttactatttggtcagaaaatatctcaggccagactttcattactagaaatgtttgtatcttaagctgtgattttttttccaaaaattatgtcatttttttttaatattttaagttctagggtacatgtgcacaatgtgcagtttgttaattwtgtatacatgtgccatcttggtgtgctgcacccattaacacgtcatttacattaggtatatctcctaatgctatccctccccgctccgcccaccctatgacaggccctggtgtgtgatgttcctcttcctgtgtccgagtgtactcattgttcaattcccacctttgagtgagaacatggggtgtttggttttttgtctttgtgatagtttgctgagaatatggtttccagcttcatccatgtccctacaaaggacatgaacttatccttttttatggctgcatagtgtaccatggtgtatatgtgccacattttcttaatccagtctatcattgatggacatttgggttggttccaagtctttgctattgtgaatagtgccacaatgaacatacgtgtgcatgtgtctttatagcagcatgatttataatcctttgggtatatacccagtaatgggatggctgggtcaaatagttctagatccttgaggaatcgccacactgtcttccacaatggttgaactagtttacagtcccaccaacactgtaaaagtgttcctatttctccacatcctctctagcatctgttgtttcctgaccttttaatgatcgccattctaactggtgtgagatggcatctcattgtggttttgatttgcatttctctgatggccagtgattatgagcattttttcatgtgcctgttggctgcaaaaatgtcttcttttgagaagagtctgttcatatccttcaaccactttttgatggggttgtttttttcttgtaagtttgagttctttgtagattctggatattagccctttgtcagatgcgtagattgcaaaaattttctaccattccataggttgcctgttcactctgatggtagtttctttgctgtgcagaagctctttagtttaattagaacccatttgtcaattttggcttttgttgcttttggtgttttagacatgaagtccttgcccatgcctatgtcccgaatggcattgcctaggttttcttctagggtttttatggttttaggtctaacatttacgtctttaatccatcttgaattaatttttgtataaggtgtaaggaagggatccagtttcagctttctacatatggctacccagttttcccagcaccatttattaaatagggaatcctttccccattgcttgtttttgtcaggtttgtcaaagatcggatggttgtagatgtgtggtattatttctgagggctctgttctgttccattggtctatatctctgttttggtaccagtaccatgctgttttggttactgtagccttgtagtatagtttgaagccaggtagcgtgatgcctccagctttgttcttttggcttaggattgtcttggcaatgcgggctcttttttcgttccatatgaactttaaagtagtyttttccaattctgtgaagaaagtcattggkagcttgatggggatgkcattgaatctataaattaccttrggcagtatggccattttcacaatattgattcttcctacccatgagcatggaatgttcttccatttgtttgtgtcctctttttttttttgttgagcaatggtttgtagttctccctgaagaggtccttcacatcccttgtaagttggattcctaggtattttattytcattgaagcaattgtgaattaaggttcactcatgatttggctctctgtttgtctgttattggtgtataggaatgcttgtgatttttgcacattgattttgtgtcctgaggctttgctgaagttgcttatcagcttaaggagattttgggctgagacgatggggttttctaaatatacaatcatgtcatctgcaaacagggacaatttgacttcctcttttcctaattgaataccatatatttctttctcctgcctgattgccctggccagaacttccaacactatgttgaataggagtggtgagagagggcatcgctgtcttgtgccagttttcaaagggaatgcttccagtttttgcccattcagtatgatattcgctgtgggtttgtcatagatagctggcagagtgcagctgtttctgacagtaagagtaggctcttttgctggctttggggtttctgcactatatgattgaggtataggaaggaaaaatggggaggaatggggctgtgcagctgggtaatgtgatgggtttcttggagctcagtctgaaggagacaagatgatgaygtctctcgcccccacctggatgtctgagctcttattattttgagatatgtcccatcagtacctaatttattgagagtttttagcatgaagggctgttgaattttgtcaaaggccttttctgcatctattgagataatcatgtggtttttgtcattggttctgtttatatgctggattatgtttattgatttgcgtaagttgaaccagccttgcatcccagggatgaagcccacttgatcatggtgggtaagctttttgatgcgctgctggattcagtttgcccgtattttattgaggatttttgcatcaatgttcatcagggatattggtctaaaattctctttttttgttgtgtctcggccaggctttggtatcaggatgatgctggcttcataaaataagttagggaggattccctctttttctattgattggaatagtttcagaaggaatggtaccagctcttccttgcacctctggtagaattcggctgtgaatccgtctggtcctggactttttttggttggtaggctattaattattgcctcaatttcagagcctgttattggtctattcagggattcaacttcctggtttagtcttgggagggtgtatgtgtccaggaatttatccatttcttctagattttctagtttatttgtgtagaggtttttatagtattctctgatggtagtttgtatttctgtgggatgggtggtgatatcccctttatcattttttactgcatctatttgattcttctctcttttcttattagtcttgctagaagtctatcaattttgttgatcttttcaaaaaaccagctcctggattcattgattttttgaagggtttttgtatctctatctycttcagttctgctctgatcttagttatttcttgccttctgctagcttttcaatgtgtctgctcttgcttctcctagttcttttaattgtgatgttagggtgtcgattttagatctttcctgctttctcttgtgggcatttagtgctgtaaatttccctctacacactgctttaaatgtgtcccagagattctggtatgttgtgtctttgttctcgttggtttcaaagaacatctttattactgccttcattttgttatgtacccagtagtcattcaggagcaggttgttcagtttccatgtagttgagcggttttgagtgagtttcttaatcctgagttctaatttgattgcactgtggtctgagagacagtttgttgtgatttctgttcttttacatttgctgaggagtgctttacttccaactatgtggtcaattttagaataagtgtgatgtggtgctgagaagaatgtatattctgttgatttggggtggacagttctgtagatgtctattaggtccgcttggtgcagaggtgagttcaattcctggatatccttgttaactttctgtctcgttgatctgtctaatgttgacggtggggtgttaaagtctcccattattattgtgtgggagtctaagtctctttgtaggtcactaaggacttgctttgtgaatctgggtgctcctgtattaggtgcatatatatttaggatagttagctcttcttgttgaattgatccctttaccattatgtaatggccttctttgtctcttttgatctttgttggtttaaagtctgttttattggagactaggattgcaacctctgcctttttttgttttccatttgcttggtagatcttcctccatccctttactttgagcctatgtgtgtctctgcacatgagatgggtttcctgaatacagcacactgatgggtcttgactctttatccaatttgccagtctgtgtcttttaattggagcaatgagcccatttacatttaaggttaatattgttatgtgtgaatttgatcctgtcattatgatgttagctggttattttgctcgttagttgatgcagtttctttctagcatygatggtctttacaatttggcatgtttttgcagtggctgctactggttgttcctttccatgtttagtgcttccttcaggagctcttgtagggcaggcctggtggtgacaaaatctctcagcatttgcttctctgtaaaggattttatttctccttcacttatgaagcttagtttggctggatatgaaattctgggttgaaaagtcttgtctttaagaatgttgaatggcccccactctcttctggcttgtagagtttctgccgagagatctgctattagtctgatgggcttccctttgtgggtaacctgacctttctctctggctgcccttaacattttttccttcatttcaactttggtgaatctgacaattatgtgtcttggagttgctcttctcaaggagtatctttgtggtgttgtctgtctttcctgaatctgaatgttggcctgccttgctaggttggggaagttctcctggataatatgctgcagagtgttttccagcttggttccattctccccatcactttcaggtacaccaatcagatgtagatttggtcttttcatatagtcccatatttcctggaggctttgttcgtttctttttactcttttttctctaaacttctcttcttgcttcatttcattcatttgatcttcaatcactgataccctttcttccagttgatcgaatcggctactgaagcttgtgaattcgtcacgtagttcttgcgccatggttttccgctccatcgggtcatttaaggacttctctacactggtaattgtagttagccattcgtctaatcttttttcaaggtttttagcttctttgtgatgggttcaaatttcctcctttagctcagagaagtttgattgtctgaagccttcttctctcaacttgtcagagtcattctccaaccagctttgttccattgctggtgaggagctgtgttcctttggagggggagaggagctctgatatttagaattttcagcttttctgctctgttttttccccatctttgtggttttatctacctttggtctttgatgatggtgacgtacagatgggcttttggtgtggatgtcctttctgtttgttagttttccttctaccagtcaggaccctcagctgaaggtctgttggagtttgctagaggtccactctagaccctgtttgcctgggtatcagcagtgaaggctgcagaacagcaaatattgctgaacagcaaatgttgctgcctgatcattcctctggaagctttgtcttagagggttacccagccatgtgaggtgtcagtctgcccctactggggggtgcctcgcagtaaggctactcaggggtcggggacccacttgaggaggcagtctgtctgttttcagatatcaaactccatgcttggagaaccactactctcttcaaagctgtcagggacatttaagtctgcagaggtttctgctgccttttgttcagctatgccctgcccccagaggtagagtctacagaggcaggcaggcctccttgagcttgtggtgggctccgcccagttcgagcttcccggctgctttgtttacctactcaagcctcagcaatggcgggtgcccctcccccagccttgctgccaccttgcagtttgatctcagactgctgtgctagcaatgagcaaggctccgtgggcgtgggaccctccaagccaggcgtgggatataatctcctggtgtgccgtttgctaaggccattggaaaagtgcagtattagggtgggagtgatctgattttccaggtgccgtctgtcacagcttcccttggctaagaaacggaattccctgaccccctgtgcttcccgggtgaggtgatgccttgccctgcttcggctcacactcagtgggctgcacccactctcctgcacccactgtccgaaaagccccagtgagatgaacctggtacctcagttggaaatgcagaaatcacccatcttctgcgtcgctcatgctgggagctgtagactggagctgttcctattcagccatctgagaaccgccccaaaacttatgtctctcaacttcccaaacatcagtgttcagacactattgctccatgggtgaaatgagacaaccctattcatttagacataatgtcctttatatgcttttttaaaattttgagacaaggtcccactgtgtcacccaagctggagtgcagtgactcactgcaacctccacctcccaggctcaagcaatcctcccacctcagcctcctaagtggctgggaccacaggtgtgtgccaccacacccagctaattttttgtatttttggtagagatggggttttgccatgttgcccaggttggttttggactcctgagctcaagagagccacccactgcagcctcccaaagtgctgggattccaggcatgagccactgcgcccggctgggcttctaaagaaaaatgccctttcctccattcattttccaggagagattttgcttcttgaagtggtttttgctaaggaaatagatgaacctctctcaaagcaatagtcctgccgaaatggcccatagtaattacaagagttcccatttgccatcaggccagttgacccatcctgaggaagattccaagtgcagcacttccccttaaattacttttgtgactgtgacaaatgctttatctctgtgggctccaattgcctcacctgtagaagatagcaaaggtgttatgaaagtagctacctatttactatctgtaagtttgggtaacatcttttgctctctcagccaaggttttctcatctgtaaaatggggctaatcacagcatctcctccacaatgttgttgtagtgagtaaatgaaacagtaaatgaaatggcacatagtaggccctctataggcattgacgctcagtatcataaactcaaaattatccttttgtcagttctaaatgatttggcagctttttaaccttctagatggcagctaagaaacaaattgattcttcatgaccttggttgctttgtttttgccatctttttaagtttggccgtttggaggcagagccggtcataaatactaacctttttaaaaatcatcatcagcaaccagtatgggaaacagaatgcttccttgcacagctgtctcttgtttggttaatttactagatgaaaaaaaggagtcttaattacaaaaacagctcttagtatttgaggtgtagggttcaaatatcagaatttgaaacagcattgagattgagcaatgaatttttgttgtataccaaaaacgtatgttttcaattaaaagattatgggatgaagaatcacaagactcatcccagctcttcctccatctcagtcactttgagcaagaatgtgacctctctgagccatatttcagcccatggaatttagtttttgtttttgtttgcctgagatgatcatctaagccctccagtgttgacttcccataaagggtgtcgcatgctcagctaatcctacttgggcctggattctgattttgtcatttatccactgtgtgatcttgggcaagttgtttaacctctctgtgctccaggttcctcatacaaaaaatgagaataacagtctacttcatagagttatcatgaaaattaaatgaaaactgatcaaaatgagtgcctaacatatagtaagcataaataaaatgttagctattgcttttattattttgttggctgtctttagaggagaaaccgacaaaaaaaaatggaagtataatctgaaatcttggtgtttggatttttccattttatgaaccaaatttaccaaactaaccacttaggaaataaagacatcaaatacactgtcttttaatttctgcatgtataatttccctaacctacaattcatcaactactactttcccctctgatttctgaataggaaaatcatggctcttatcactatgtggtatatgttaaatcccaccaacatttcacttgggtaaccacatgtttaacaaattctgtctactttatatggagactgtgcccctagaacagaatgtctcaaacattaatgtgcatgtgagtcacatggggatcttgttaaaatgcagattgtgattcacctgttctggaggcagaaatcccacatttctaacaaattcccaggagatgctgatgctgcaggtccttagactgcactttgagtaacagggccgtagatattcacaagccatttgagcatggaggaggcagggggcacacctgacccaagtagagatcaagcagtagagatcaagcaggcctacaggaactcactgccagaccccctctccagccccaacctcgccaactctaatttaagaaattgaaatgtttcaggggaaaaataacaggaagatatggaaaagacagtcaaaaccctacctgcttctcttcattttcctaaacttaaaaaaaaaaaatcatagaatagattacaccaagcaatttgacccatctgcagttctaaattatcttccacaagacaggcacgtagaagacaatttaattctcccctctttactgttgggactgtatcagtgagatacaggtgctaaaatagaccctcctaggggagcattacataccctgcaggtacttaagtcataccactaaggcccatttcataaaatatgtttttggtgtatttaaaagtattctgtggacctgaaaatatcccaaaagcgcctgctctcaaggagatctcaccagtgtaaaaacctcacctgctattataaccaagaagatagctgtgcatgctgtggcagtgcttctattcctgaaccaaagaaaaaaccaaacttttccagattgaaatgtctcttccctaaaaactatctgccatgatcttgatcctatttatttttttacacataaaaattgaaaattagtctcacctgggtaccaaacaaagtgggaaattgtagtgagattctatgaaaacccagaggaggacctatatgttactctgctaacactagcatatatttgtgtggattttgttaatccctgagagtaatctgttgaaagaatatgggtgttttgctgccaagtactgagatttttacagggtgatgtataccattgatctaattacccaagtcatattttgtcttttatttgagaaattataaatcttaagttttgatttttgtccacaaatcataccctagtcctagtttccaaagtcagaaaagattcacgtgtattttctaccctgaaaaggggtatttcatgtttgggagcataaaatggggcgagtctcataaagatatcttgggtttttttgaaaaatgtgggttcagactggcatcaagaataaacattatgctctgaacttttgcacaggataaacctaatcctagcagtaaacatctgttcccttttatgtgcatttgtggctcgttaatatgaatgtttctgcaaccactgtagcttttctaatatcctaaatggaatctctgtggcctttagagtaattacctcaaagtttgagtcatccaacctaaggactctctgattaaatccggtatgaattatggaaaatcaaatgaccattcctgggggaggattccattgtgtcctccggaaagtattttcccagtgctcagggcctctggtcagtgttcagcagtcagcttgttcctatgtggttaaataattgtaagatgttgcctatgaacctggtcaccgccatgttttcatgcagccaaatgacatttacaccatggtctttgaacacacgttgttttgttttgctttttagttttgtttcaggctgcacttcagattaataagcatcctctataaatgttataaacacaaactttaaaattgttttaatggttttcatttatcaaaagattatcaatcattgtactttttagtttcagagtaattatttcaggtttctgcagtcatgatgattgtttttcattaggatagtgattgcctaatggaatatacaggaaaaccagagaagtgggagcagccagataaggaaaagatttgtttatctcctaacagctcccaaatctcacccacttaatggactgataatccccaccaatgaaataggagaagcactctgtgatagcaaacttaaattcacttgcacacggggacagaaaagcccagtctcaacaagagagaaaattaataggcaggtgctcagtaaaagaaagacaaaaccatttagcaatgaaaggcagcgtacttgaacaaagaggctaattttgcaagactttgcctaaaagaagatattctgaaggcatagtttatgtaaccggacaaaagttgaacatgggcctcagcagaccgtattgatcaagtctcaggagtgaagcagcagagttcttcttgagatgagtgcaccctgattagggatatcaaaacacattatctgagttagataaaataatgtatgaaaagtactttcggatgctatctggcatgtagtaggtgttcagttggtagtaattttaatttatggagcctagtctatgtagcctgacttaaataaatgctccataaatctgagctatcactaacattattatgattatgcccttcagctaccttgtacaaaataatgaatatggttccctccctttctcatccactctatcctcaattcccttaggagccagtggccaggaagacacaccctccccagctatgacccatgcctccatgagtctaacaatgaccagaatatttcactccattttgcaggcttaaattgttgagaataccaaagtaggatctgttcacagtctcaagagctatctaagtcttcattttgggaacactaacatacaccaacaagagctcagaaatgatcatgattgcatgagcttagaataaataagaaatgtattttaaaggaaaaagaactcaccacagactggaatagtaagggaaagctgtgtggataggactgaaactgagctgggagagtccagaatgttcgtgtaaattgagagaaaggggaagcatgagaatagatcctacaggctccttcccaccagttgagaattgtggatttggtctctgtaattactagtagttaaaaaaaaaagggggggggggcggggggagacactttgaacacttactgtatttctgcacaaggctagaccttgtccatgtgttggctcatgtattcttcacatcaacattgtgaagtactttcacaccaacactgtgaggtcctataacctataacgcttccatagcaattcttgaatgtagtaatagcagayttcctttagaaacagccaacaatttaacttttcactattttggagatgtctctcctcccttgtccgaatattccaaatttacaagtctcatggcatcagctggggcagagttcctgcagagacctacataaatggaagcgagcaggcactgcagcttcaggctactgttaaaagttcccaggccaggcaaagccacctgggtagattcaaaggcactgggaaacacaagccaggagcctgccctctggtgaccagctcaccccatcccagatgttagtggactaaccgattaagtcagtgtttcagaggtcttagaaagatggccttgagataccagctccggcatccgatacaaatgccaaagtaaaaacacggttggtttacacagcctgaggacaaggaagaataaagccatctagctgccctttctgtcttccctgctcacagagcttgtctaaggctatgctacagtatctgttgatggctgagctgccttttgttgcagaactttgatgctaaccagttatggctgactctgccttgcatagagcacattattgctcagtaaatagaaattcctaaatgaataaaaacctgtatgtgctctgttcagtttcggggtattttgatctgttcttattatgttcaattatttccaaataatatttattgaggtcccatcatgttatagcattgtgcttagacctgtggagattaagagatggatacattgattagagtccaataagagggaaaagggcgcatgtaccatttacatgatacaaggaggacatggtaagttcttgccttatagaagagacatagacaaatattatggataattcaggagagagattcaaagaggtagagcaatttgccccaaaccacagctaatatatggcagagtcagaatttgaaccttggcaagcagagcccatattcttacccactatcttttcctgcctctgaaaagcaaaataggtttcattttcaccagcacttctgggagaacaatcctattggtagtccatattgaattgcttgtaatgatgagtcctcctagcagaccagtggcttttggataagaaactgggcatgaattatgtccctaggaaatagttttgtgtttgcaaagttactggattatgtgcctaggaaatagttttctctttgcaaagttatgagaggacaataaatattacttcagatgttgtgctagccactatgagtgttaagaaaattatatacatgtatgtaaatggatatatcacaaggtagaaggtagcacatggaggagagagatacatggaaagtgggatggaagtttggagggtggatggattgcttcaagaaagcttaaatgatgaactagaccttgaaggttgagtaaggatcaaatgtgtgtcttcattgttatgttatttgagctaccaagctaatcaagccagataaaatgatggtcaggcaaacctaacaggaaatgctcacttcaccaaaattcttctcccatttgccttgcacagaatctaggaatccaattttagagatacattccttgggccatggcccaatgctttccaggcatcctctttaaaacacaacttctgctgtgaggtgactcatcccaggttcttagccattaatatagtggtatggagtcatttatgaaattcttttttttggggtggggggaatgctctttaaaaatcatgtttagaggagaagagtttggagagtaaggcaagggaagagaggtcatgtggatgcataagtgaagaacttacaattagtgcatgcttacaatgtgcaggacactgttcyaagacctttttatatataaacctatttggtcatcaaaacaatagtatattcccattttacagaaaacccacatctctaaagttccagaagcaactttttttatttttatttttatttttttggcctctctaatgaccacctctcacgaggctaccaagaaatataagggatgagccattccttcaaatggcttctggactaggtcaaagtttacagtccttggcaaccagaagcaactttaactgaactatagaaggtcaggtcaggttttagagtcagaagacctgggtttgagtccagttccatcatgtacatccacatcactttctaaattcagtttccacacatgtaaaacagggatgataattctgtccacattccccacccccatacaaattttgccaagcacctgttattcataaggctcttttgcaagtgctagagacacagtaatgaccacaacagtgctcatccctatttctgtcatgcttacatttccagtgaggacagacaaaacagttcccattggtgacaartatgatgaagaacctaaagtaagatgatagagagaaaatggttrgagagctggtcaggaaaggcctccctcaaacctcaatgacagggagctggtgatataaggatttggacaggggcactgcagcataggaaagagcttctgcaagatgctgctgtgggaatgggcttcctatgttagaggcagcccatgtggctggaggatagagagaagggggcagarccatgggtgagsagctcagccagagggaggctcagtggggccttgaggccactgtaaggcctgaagattttattctaatattggtgggaagtcatcagattattttaagaaccagagaaatacactcttatttatacttttaaatgctcactctggctgctctgtggaaaatagattataagtggctgagagcaaaagcaaggagacttgttatgaatataaatgagtaacaggaaaattaaatgaggtagtaagtacaatttctaaagaactttcaaagcacaaataaaacaatagctattaataggtcaattactactcatcaaactaagggcgataaggagaacatatcggttaatagcacaaaaggcaaagaggagcaggtgaagtgcttctcttaattttaggttccttgtcagttaagcagtatatattccctggatgtttgtgaagataaagtgtctagctcagttcctggctcatagtaaatgctcaaccaaacattattctcctgtcctgcacgattctaaaaaaaaatcagttgaggcgtacatagtctgagaattcagcaaggctaaamcttatgggttgaagtaaaaaaattaaaatggaaatttgaggcttcatacctaatagtctgatgctacacaatgataattctacacactctctgggtttacaaagcacgttttatacacacacccctaatgcagaatatggtttgcagtcagtctcagtacctaatattaatggccttttaatgcaagctaaactcttgcaatgagtgccatgaaatcccagcctacgcagcttaccccttctgaccactttgtcataatcctatttcctttgctttagctcttttctaaggtatcagctcgctcttgtgtcctgaaatacttgaatattttaatctaattctcccttctttgatggacagatttattttctatcatctttaatgaaatatccagagataggatgtaagtagttatgttaatgcgatttatgtttgtttctcttttgcaaaagaacactttggatcagtgttgtgtcaatcaaagccatcagaatgatggtcatcgaatgcaaacctaatcattcaagcctaaactcccttgagacacacaagccaatgcagttcacatgtccctatctagttattattttattttgttctacttatttttaattcaccataactaattaaattgattaattgtgttgatgtctagaatgtgaagtattgaaagccagatgttagctgggattcattaaagagtaaacggttcataatttatatgaataacaagatatgatcgtttctagaatgctcgttttttaaaaaaaatattacttctactactgtgtgcattgtgtcccagataatgctcagaacaacaggcttttatttttaattttttatttatttcaataggtttttggggaacatgtggtgtttggtttcatgaataagttcttcagtggtgatttctgagattttggtgcacccaccacctgagcagtgtacactgtacccaatgtgtagtcttttatccctcatcaccctgaccctttctgaagtccccaaagtccaatgtatcattcttatgcctttgcatcctcatagcccagctcccacacatgagtgaaaacgtatgatgtttggttttccattcctgagttacttcacttagaataatagtctccacttgcatccaggttgctatgaatgtcattatttcattcttttttatgtcwgagtagtattccatggtgtatacatatatatcacattttctttatccatgagttgattgatgggcatttgggctggttccatatttttgcaattgcaatttgtgctgttataaacatgtgtgtgcaaatgtctttttcatataatgacttcttttcctctgggtagatacctagtagtaggattggtggatcaaacggtagacccacttttagttctttaaggaatctccacactgttttccaagtgacaacaggctttttgagtaaatacttatttacatccatacctgcaatctgagtaaatacttatttacatccatacctgcaatctacaagataatatctaattaacacctgacttttaaggcgtcactcagtagacctcaaaacaatggatgactttttgaatgataatgaaaatttactctgaggttgtgtaaaatattggagtctgaagaaactacacgcttattcaaaatctgtcactaatttattttcttaccttaaatttaycttaaccctgtggatctcaaactctgttgggtatcagaatcacctggagaacttgatagatctatgcatgcccacaccctatccaaatttcaaaaagcctggtcttcagtgttgtttaatagtgcctcaggtgatactgatacacatcaaactttgagaatcactgacttaaccttttgggatgttaatctccctaaaaagaaatatcccatttgtgtgagctttgaaggaacaaaaggatatgggcattagacataggaaattactgaagaccattattgccaaccacaggtatgtggaggtaacttgcagttctcaccaacaacagtatatccagtaggtagaattcaaggaccccagtgtcatgggagtctcatccttccttgggaatggcataggaattgcatgttgcccctctgttcttgcgaggatcagaatcaagaatcctccttaaataaattcctgttgagttttctcatgacccaaccgggacttctcagtctccaggtttcccagcagtgccccaaccaataaacctgccagttaagcaactgaatatcattattacgaatgtaattacagacagtaattatgagcttgtaattgcctcccatgaatgaagcccttttcccaaaccatctcagctgcttttctttggaaaatgaaagcaatcctatcccttaccwcaccccaagtgtagccttccttgcttagaaaaaaaccccttcttgctggcccaagggacatggtaagcaagctttaataggctgcrctttaaggggcaatgtcctcttggagtggagcccctgttagcatctctcagccaagcattgtttccctagggagtaatgactacccagtttggctgtttttcttaatttctgtggggtcaagggaattaataccaaattttaggaattttctgcagaaaaatcacatcttaaaggcttttcaaaatagtttgagaactttaaccttatttaaattaagctttgcgagatgcaatttgctgaggatttagagtatctgaaaataaagcagacaccataaaaacatgtgtgctgagaagaattttcatgtctgtagaaataaaatcaatctcattaggcccagaattaacccctgcccccagtaactttatatttagctcatgaaaaacctcaagcccttatggataaaggtacttgaatgagttacacatggatatgtttagctcgaaatgcaatacgatctttcaagatctcaatctgttgttgccttttaatggctactgagaataagtgcctgtaattgcaccagtagctagcacagtcgaaagtggtagaagtccacacctttttgatttaccatgcaatgaataatgccatataaactctgaaaaggaagaatctatgtttatataatgtgcctaatacaatgcttagcacagccctttgcatacagtgaattttcagagctcttctctgaataagatcaaatgttacacccaaaagctagcacagtgtacaatttttaaaaggagacttattgcttactggccaaagtaagctatttcaagccacagcatttccatttactatgacaaaggaatcgtgtgttgattgttactttgttactattgttcatggttttctcctggagtagaaatacaatgtgcatgggcattggcattttctcatartaatatgaaaacccggaagggtaaatgcaactttcaaaagtgactgagtaatttacacttttagagaaaccatcctaaccaacattagctgaagacatctggtagctttcgagagggtgcttatgaaaacctaaagcatttttaaccctcatgttaaataatttaaaattcactttaaatgtttgaaagtcagcttaaaattcagtgtgctgtgcacaggtcaggatagacatgtctctctaagccccagggatatgggtatccatggtcttctcgtaatttcactgttaaaaaaaattcacatataaatttgtgaattatgatcactttaaaaagaccatataaactctgaaaaggaggactcacatatttatattatattttttctaattttgacaaacagtagcttaagaatttctgaaaatatggatgaccagatggattgtttttttaatgtgtacaacatgcatacaaatatgtatatatatatatattagcttgctcatttttgctctctatatccatgtgcagtaaagatatttaaggaagtaaaatttgccaccagggaaggttagtgtcagaaatttttcatcatattattacattttttcccattttctgtaggccagaccctcaagtccctataaattgaatagaaaaaatatatataatatacataaataattaaccagctgtactccaaagaatttaagttcatcattctatcattagggctcttaatttgtcccacacctaaagcactatctgctttccttcatcggttcttattgccaacttgggactstactgaagccctttacaaaacttctatttgtaagattcccttctttttttttttttctttttgtaggccatcagaggtagaaggtggtaaaaacagagttgccactctcggtgtggccacgtgagcacgtcccacttaagtaacagggtgtccctcaggtcagcttgtgataaaacccaagtcaaacaaggctgaatcctgggtgttttatgtcctaaggatctgaaaagtgttcacggccagccctgaccctcaagacctcaaatggtcatctaagcagtaacgtaaattggtgtgtaaacttgctcctgggccattgctgtggaagtgggactggcgaaagtacagccttgccatgcaggaactaatgtctttctaggcatttaaaataaggggraatgtgttgattactccgacaggcaacccaactgcagtggctaaatgcccaaggctgacaaattctgcatcttatcactcccgtcaagtggcatgtgaatactgtcagcccaaaagaattgagaaacaacttgccttccaaaactctgcatctcagcaaaatcttgacaatgccaacagctcgtcatctcgtgtttttcaaccctttagaaaatggccttacagcctgggacaaaccgaagcactgtccagaccgagaacacgactggaagctagtaggaatgtctgaagcctgcctacataggaagagccattcagagaggcgcagcacgttgaaaaatgaacagtcgtcgccacatctcatccagaccacttggactagctcaatattccatctggaccatgatgatgtgaacgaccagagtgtctcaagtgcccagaccttccaaacggaggagaagaaatgtaaaggtaaccagatttttattagcccattatcatgtgtttcaacaagaaaaaaaatatccctgttgtagctgtgtacttcatctacatttctcttccaatgtatggtgtcccatgttttctccaactgttcttttactaggcgtccttttcttcaaatattcttttaaacataaataaataagtggaatccaaagaaaggcagcttgtttcggtttcwcgttgtgctgggacacttggggtgaagacatttttacttctctaattagtagaggggttgtaagttttggctttaattccatttttgggtctgagtagaaacaggcatcgctgtatttttatgaagtcttgctttaaagtgtgtctgtgcatgtgtacatttcttttcccaagtgtgccagtagctaatgggatctcaatgcctacctttaacctagacaattcatgctcaaatgagaggttttaagttgttgtcttctactcattaaatccttgtgtcatcatcctgaaaggagagattatggtgttaggaggttgtcasctcataaggcaaaaaaaacattaaactggcctaagttcctgattgcattagatttaactgttctttacctcaggtcgcctccaccctgacagatgtctttgtgctgatcgctttattgtcttagggctccccaaaatctttgcttcttaaatcaatttgtgtctttcaatgtccaagagatcaatttgcatctttaaatgtctaagttcatttaatttcccattctttttcagtttagtggtttttcttttttaaaagaaaagggggggtctatttagtttttctttgaggattgtgactcatggtaaagttttaaattgtgttttgaaaatctcacaatcatataccaaaacataataaagtttgcaaagactcccatttacaaggcatgaaggacttacacagctgctctactttgaacatatacacatgattatatttatccttcatataaaagaactggtcttttaggttttctgaaaatgctttgaaagctcctgggaattaccagtttacctgggaaattgagtgtttcagttggaaatagagttattcaaaagtaatagtgaaatagtgttctgagctctgatttgagtgcagtcaaaactatacatgtccctttggaaaggtttgtatttggactctctttctctcatatatatatatatatatatatatatttgaggagatctgagaaattgaaagggctatatagaaaaaaaagcaaaataaagtttttcaaaggagtcaggatgtaggacgtatgtgtgtgtgtgtgcacgtgtgtgcgtgcgcaaaatacatttgtttgcaatacaattgagatttactyttagcgtatgtggccagattgtatctcaacattgtatgggctggcactaaaaccatgtcagtttacggtgaaacgccaacagaaaactctagcatccttgtgatctaataatgtcataaacccaatttgattcactcacaattgataccaatattcattcatttattcattcatagagtccatctatgtctctatcaatcatttaaaataaatctatgcatcttaaaagcaaaaggaaacagtctctgtttgaatacaagatgcttagtagagtggttaagaccacaaatatttgagactgatctatttgagctagaatcctagcctttctactttctgtccttgagcaaacttataagattgttaatacaattaaataagatgatgtatttaagcatttagcaaagtacctgacttatagtgctctctgaatagcaactgtcattattattgtgatccttattattaggtatgcattattaagtcatataaatactttgaactatgctgtgagcctggtaagaaatgaagcaagaggagaatttcagatagatgtggggtaggacatgaggcttcagggacgttagagttgataatttattttgcattcattcaactctttttcactgaaagtcagagatgtaatgagaaaatataattaaattattaaagtccttcctcaagatcctaatattaacaggaaaacagctaaaataactctcccatgttttccagagtaaccaccagggtccaccttgacataggcatgaggcaatgccttggttcagcataaaaatgccaccaggaaacctrtgtcatcttggtccaagaaacttataaataccattcattcaaaatgggcacatgtgttgagtgaggcagcagtgagtccaggacagcaacaagattatacagtctttccttatagagttggttctccatctgctctgcttgtcagctctatatagttactatgaagagagttatattttgatgttcatccatgttgggcatttatttcctagatggctgtgtatcccacaagaatgcttgacatctcagtcttgggctagtaatctatgcattcactcatcggtgtttattgagtgcctactgtatacaggatattgcccttgatgtccaagcataagaaaatggcagcagggccaaaaggacatccaactagccctattccaaggaccccatgtagaaatgatamgaacaaaatagtcctgaggatacaaaagttaattctgcacaacaggatccaaagaacaaattgacttccttgaagctgtgcagtgagcccatctgccagatcagtcatctagccaggctagaccagtgcacttctaagcgtggtttggggactggcactcttctgcaaagtggttattaccatttctattgatgcaaatacagaaactgagagtaagctttaggaacttttatagcagtttgacattgccactggcatccaaatgcatgatcagtgaattcatttcactgaacaggatatagacagttagttggggattgtcaaacttgcctggtcagtcacatgtggtttgaactatgtaaaagtcctgtgcagtagaaccatgtattgctccataatggaccagatttttaaaatagtctttcacttcaaatagttgatagtactctaaatattgtttctttagggttttgggtagctatctaaggttttgtttttcattttgttctgaatactgcttttttttttttttttttttttgaaatggagtcttgctctgttgcccaggatggagtgcagtggcgcaatctcggctcactgcaacctctacctcccaggttcaagcaattctcctgcctcagcctcctgagtagctgggattacaagcatgcaccacatgcccagctaatttttgtatttttagtagagacaggatttcgccatgttggccaggcaggtctcaaactcctgagctcaggtgatccacccacctcagcctcccaaagtggtgagattacaggcatgagccactgcacccggccttactgcttttattttaacctgcatatacctatgcttctgtctgctgtaagcatcctaagtgaattaattggtaacacatttaattagaatgagagctatggaagagcccttacattctgttgcagatctcacaacagatctctgttgaatctgctggagtatcagaggctattttaaccaggagcaagtgacccattcccttctgcaactcaccccacccacccacacccgctctttccatgccacacttccttggcactttaatcacaatttgaaccaattgctcagccataaggaccacatcctactccttgtcctcctcctcccttcccagtctgagacgatatatccagtgctactgaaagtgtggtagtacmaatcagtggcactaggagaacctggagcttggtagaaataagattctcaggccccacccagactastgaatctctagagaggggcccagccttctatgttcttgccagcccagtgcagattcttaatacctgggtatcatgacgagcttgaaaatactcttcaactcgttgcacaggaaagggtctgccacctggtgggcacttaggaaatgtgcatttttcttcccttccctgactgcacgtggggagccacttgagtccctccattcttggttgggcctgtctttgggcctagcttatctcaattgccagctggaaggtctgcttagtcactgcctaataacagatcaccctggracttgagcccttctgagaaccccacactgtttgactggggccctgatcctcccctgaagtcttacaaggcttcacccctctaccctctcatgccctactgtacttctctctgggaaccacagggtctccccagtcccacaaggatgggctctagacggatgcatggatccctggagctggacctaaccagccctgctgaacccaggcagtcaggcctttacacttttatgtcaatcagggacctycctgaaacagtgaaacccaaggggagaaacaaggcagggactcacccacctccctggtggactcagaaaaaggagagcagccatcagtgatctcacagaaatgtctctgtgcttaatatttttaaaactgattctcagatacccaggaaggcaagagggaatcagttaaaataattttaagaacaagttacttcctctcattataaaagcctatatatgttcatggtagaaaaaaaatttctacaaatttttaaaattgcaaataatgttttaaaatcagttgaagttctattccccaagggtaagcactgcacattcttattacatttcagtcttttctctgtgcatgtgtattttttataaacctgggatcatactaggcataccattttaaccagcttttaatgcctagcaatatatcatgaacattttcccatgtcattaaatattctgagtcctgactttcattggctatagattattcttstttatagatgtatcatamtttattaaaccagtcctcaagatttagacaagttaaagtaattttttaaacaatatcttatgtcagcaaaggggaaaactattaattcatgctcttcataaagacaaaaaaaatgaatcaaatcagtgatgacaatttcaaatgatgtgccattctcatttaccaaaataacaaagtgtcttaaaagttggagacataaatgcaagtcattgtgtgcattataatccttcatgttagacattcacattttcagcagatgattgctatctttgtccttaagtaaaatacaagggcatctccaggtgaatgagtattttaaaaggtggaggattaaaaagcttgtgcccttccgccagtactaccatctgctccatccatctctgctctctactctgccccactcrtcatacaycaggatctgcagtcccaactgagagtgccagtgattcttatacctcaagggcactctgggaaccttagcaatcaacatgagaacgatggctctctccccactgtgggcatatgtcagatagctgtgtgatttgatacttcaaaggcagggacgagtaccccatacgtatactggggcagacagaaatagaaagccaagggggagaaaagctactcacgagattggagggaagaaaaaacaaaaaactggaaacagcaatgtcaaagggaggtagatatcagaaattcaaggccctggttcatctaacttcagttttcgttgagatgcacacagagcagaggatggaccaccccacgctttccaaggccaactgaacagtgtctgtcaygccaaaggatgcagacgtacccaaccatacctctcatcatactctgtcccagggaaatacttacacagggcacaagtctgttcaaacatgttctttgcatctttgttttttgttactgataaactggaagcgatctaaatgtctgtccactggggaatgttccaataaattgtggtacatccaaagcattcaccagaaaaattaaaaacaggcttttttaaaagaagtgattttaggaatmcttattgaaagtaagcatgcattaagaatagtgtaatcccatttataacgttaaaagtctatataattgtgtgtttacaaatgtgcacagaaaaaagttcccagatatacatcaaacttgtttcagtagataccttagaaaagggcggaataagaaggattaactccatatgcaaccacattcaaaaatctttacaagaacgtattaataaatattaatgaatgtattaatgaataatgatgtgcataaatttgtttaatgttattatcatatgctttacagttaggcttcagtttatttcttgctctttaaatcatcagctcagggaaaattttttaacctctgtaaccctcagtccatttagttttaaacagaggaataatatctagctttcagatttgttgtaaagatgaaagatatttcaatgaaggatttaatttaaaaaaaaaaaaaaaaaagatgaaaggccaggcgccgtcgctcacacctgtaatcccaacactttgggaggccgaggcaggtggatcacttgaggtcaggagtttcaagaccagcctggccaacatgatgaaaccctgtctctacaaaaaatacaaaaaaaaattagctggggatggtggcgtgtgcctgtaatcccagctactcaggaggccgaggcaggagaagcgcttggaacccaggaggcagaggttgcagtgagccaagatagcgccattgcactccagcctgggcgacagagtgagactctgtctcaaaaaaaaaaaaaaaagaaaagaaaaaagaaaaagaagaaaagaaaaaagatgaaagataatatgtataaagcccccaacatagtgcctgrcacttaggagagactaaacaatgataactgttcttagaatataaacacacctcttagccttgtgcccacctcctccagtttttgccaccctttctgaccttgaaatacattgaactatataaaaataaatgaagggacgccaaacaaaacatcatgtgcacagctctagtagaggcataaacagttgaaaaaaaagtccatagcaacaaccaaagtattttttttctcagactcttttaaaatttaaaactttaaataagaaatcaaggggaaaatgaagtagctgaactggaattctaactcaggcaatctggccccagggtcagagctctctacagttataatcccctatgactttaaagggtaagaacattccagacccaaaggaaagaatttgaaactgcagaggaaatactgctctactgtcaggtaaagatgcagggtggtcagacttgctgtgatgggagcagtagaggtcagcacgtatctacttatacagtccgaggtcatattctggtgctgccatttaccagccattgaaacttgggcaagtcactttgtttgagcctcagttttctcgtctgtaaaatgtggaccctctttcacagaattgtggaaagaaacaagctcttaaatgatctcatgggacacagtgagtgctcaataratgggagttatttttcttacaatgagccagaaagactatgagaaccacattggacattaggaatgcagaatgcccacgtcagaataatcactatattgtggctggcaggattgaagtttctaaagccaggaatattacggacgcaggcagaacagatgtaatagccaaatcccttgactcttccatcaggtagttttcagacaaaatcagatacaagtggattgctaatgtacctagcactgaagttggaaaggtattattgggagggtcagccttacaaagacatcgtaggtgatcactggaattcagtctttcccttccccaggacatctcctacaagttgccctgaatgcttataattctatcattgcccttccattgtggtctttcttttttttgtttgtttttttgttttgttttgtttttgaaacggagtctcactctgtcgcccaggctggagtgcagtggcgcaatctcggctcactgcaagctccacctcccgggttcacgccattctcctgcctcagcctcccgagtatctgggactacaggcgcccgccaccacgcccggctaactttttgtatttttagtagagatggggtttcactgtgttagccaggatggtctcgatctcctgaactcgtgatccgcccaccttggcctcccaaagtgctgggattacaggcacgagccaccgcacctggccccactgtggtctttcaaaacgcaaacttactggctgaatatcttatcaagtcattagcttctccaaatggatgaattggataagattccttttactcttgrcagggtccaataaagacaatggaaagaatgggactagaaggaggccatgaacagggtaaggatagcaagggataagagagaaggaaaagaataataataaggarcaggactgccaagtaacaagtaatactgtgcagcttgtcaggttgtgagcagcactcacttcattgtcaaggctctaaagacaaatgtcacctatctcaytgtttgtcaagggctgaccctgagcgtaggtttaaactacaaagagtttccagccaaatctagacaaatgtgtgaatgacgtaatgatcataggctatcaagatatccccaaaggcctcaccttacacagctggcctgctgcatcgtatcttagggattttgcccagcacttagtaaacacataggagaatgtttagaacagatgaccattggttcttggctttgacgcttaccagctatttaaccttggctaaatcaataattctctccaacaaagaatgtagtcagagattaactgaccacaaagaaatcaaatagatgaayctacactccatttttaaagtggccctccaatatgataatcatattttcccttgtggggaagacaaggaaaaatatattaaatcattaccagccccctaaaacaagctatgatcatcatgaaaacataagaccagttccaggataagttgggaaatcagttgccttaaaccatctctttcagtgtccttacttcccttgaggatatctttttcccaggaamataggagtcttcaggctatccaaacccattttcagtctctacgaagtctaggcttcttccctcttcacattctgaaaacattctcattttccataaaaaaaacttattcccctgaaggtgttggtgaccagtactgacttacatccttacctctccagggcagggaggctttgagttttgagtactcctggagatgcagcgacctcatgccaaaggtagcctctgatagtggcattgcagtctaggaagcacatacatgggggaaccgtatcacctgtgcttacaacctgccctggcatagggctggtttatctctccagttattctattctgtggctaattctgtgagttgtatttacagattggtctttcaggtcttggccagttcagccttcttgattgaactggaataaatatgagcctctatccacactgcccgggtcccagaaattcagaaacagctgagcttttcaagtaagattagagtcagaaattctccaaggtccagagctattctccatggcactgacctgacataggattattatatattgtgaacctctgtccccatgacatttgtcagtatgggcttatataagggacttgactttattmaactttactgccttttaaaatacagagctgtgctgcatatgtgactgtttaactcaattgtctatatgataaagacacttggcatttgagtmagaatatcatgtgtgggttgatggtttattagtctagactgcaatattctatgacttgcagattgtaccccaaccacccatagttgcctcagacatctagtacagctataaaggccatactattttagttaagcctcaggactaatgaaaagatatgtattcagctctttgtttgcctagttctggaaataacttcttataataagactaagatataaaactaaaggtcaaaactgtgtaagtaaaagaagctactgccctttaagggaaaaataatacatgttaatttttgcagcaatttcaattgaatgggtttccagggaaacaggtatctgyaatgggttcatcccacttaatatttaagacaaaacatagggaatttctttcttgttaycttttccttgttatcttacacacgacatgctcattcttaaatttcctttgaagcgatcattctatgcttgagtcttatttgttctcccaaaaaaagaaatgaatgcccgttctatgatttttttaagactttttgatatcaggaatataagcctggtgatcactactaaaaaataaaattatgcaaatcaatctgacccccttttttaatgaatcaaaagctatttgttattacttgttttattgaaaatctgcttactttctgagttggattctgtttctaagagttgaagtggaaaaataaaattggtggcaaaggaccactaagtcttcaaggttgagtaaattgtacgttttcttggaagagctcctcaggcagacctataaattcctttttatattttgttctaaattaatctcaggtttaccaaaaagttgtaatagtgcaaataattcccatacccctcacctggattcaccaattgttaacattttaccatatttcttttctcattctctgtatgtgtttgtttgcatatatacatattattattatgtcatttgcaaaccatatgagagtaagttataaacatcatgcccttttaactctaaatacctgctaaaactaaggaaattatcttaggacacatcagaattgggaagtttaacattgatgcctactattttctaatctacagactttatttacattttacaaattatccttcctgccacccccttggagggggagttgagrtgaggaccagagctggagagaggacttgtctctaagaggttttcacaggcttcattcctctagatagggctgggagaggccaccaccaattgtcctctataccaatcttattttccggtctgggatccaggccaggatcattcattttatttatttattttttatctctttagtctgcttcttcctcccaccacctgtgcagctttattagagtataatggacaaataaaaattgtatgtatttatcatgtacatgttatgttttgccacattatacagctttaaattattaaatcaagctaattaacatatctatcacctatatccttatcattttttgtggtgagaacattttagcaatatctaactgaaattatgtaccctttgacgaacatctatctgttctacctaccctccccgctgcagaccttagttatcaccattctactctagtctgcttcgatttcagctttttccattccacatatagtggagatcatggagtgtttttctttctgtgcctggcctatttcacttagcataatgtcctccaggttcatgttagtctggaaccgtttcacagtttttctttgtcgttcacaccattgaagaaatatttcttgacaaaatacaggctgattattattttggaatgtcccttaatttaagtttgatggatgtttcctcatgattttttttagacaaggtctcactttgttgcccaagctggagtgcagtggtgagctaatagctcactgcagccctgaactcctggcctaaagtgatttacccaccttggcctcctttgctctgggttacaggcatgagccaccgcacccagcctttcctcatgattagaatcagattatacattttggacagagatactaaaaaattgtatgatacggtgtttgttcctataaaattttgaatttaattatatgatgcagaaatagttttcaatcttccaaaccacttatatcttagtgtgagcaggcctagatctttactggtgagctggctcattatcttactgggttagaagaaagtatattttctaaagtcctctaataagcagctattcaatgctctaaaggtgaatgtcagaagaaaaagttacttgtttctctgtcccctgtgacatttttaaggttggactcataggatgatacttacctagggaacacctttctccataataggggcaaagagcacattgtccacggtctgaagacttttctgaagattaaaaaaaagacacagccactttattctcgtctcatattttaactaaacattcttttctttccacaatccaatcatattacattacaaaacaactaagatcagagtatgtcttgataaccttgatatttattgtgtaactttctagaacattttgacatttgaaataaaatgaagaatttcaatttgccatttctggatttggatctcaagggcaccaacatgaagtagatcctatttttgcaaacttttacaaatcctttttctctactcatccttcaaggcccaattcagacatcgcttcctctgtgcgcccccatgccccatcagaatgaatttggatttttgtttttaatgctgtgatgaaattttgtacaagtattcattgtgttctgccttatttaattgtggcttctgaacatgcctgtttgattcactgcagatggtgaattcgtcataatttatactgacaatgttttaaattgagtgtgttctgtgtgtccaatactgtactatatgctgagaataaaaagttaaatgcacaccccttttttcrtaggatttttcaaacagaaaatgttggcagagcttcgagtctaggcttgcaatgagcagtaactctgttgacaaccaagcgatgatgaaaattctattggctggctggcatttgtcttaggaaagaataatgaagaatgtaacctacgttgtttcaaaaataatgattccattttactccatgttcacttaacacttgaagtattcagtgtgtgggatactgttttctgcttgctgataggtatttttagtttgattgcaaatttcagagtcagggccaggtcttccttctatagtgtatctccattagatctgggagaataacatacatggtattgatacataaatgatgtaaactttattttattttgagaatcagtcttaattaactcaagctgtttgtagccctgcatctatttttgtaaagcttcactgagatataatttacatgccatcaaattcccctgttttaagtgtatagttcaatgattgttagtatatttacagaggcatgcaaccatcatcaggatcttattttrgaacatttccatcatcccaaaagaaactttgagtcgtttacagttactccccattcctgtgcccagcctctggcaaccatttttctttcagtccctgtagatttgccttttctgaagcttaacaaaagtggaatgctacaatacgtggtcttgtatgactggcatctttctcttagtatactgtttttgagattcacccacaatgtagcatgtatcagtactttgaactttttaccttttattatttttataacattttcaagtataatgtaggactggagcctttactgacaaagaataaatcttttgaaactacatcagytgtggcatagtctaaattttgcactagttgttcttaagggtgaaaaagcaaagtaaatgcaggtgattcaattgttcattcattattcctattattagggaaatttgttttaaaattaatctctgacatgctattctgggataaagaaagtatactgtagctgttaaatgtcaaaattattccacttaaacaaccactcaacttttcacatcaagtcgatcattgtgaattacagtgaaataattatcttaacacattaaggggaaacatatctactttatctaatgattaaattaaaaaatacattaaatgagttgctatgtgaaattcaagcaaaacataaatgatatttataaaaacaaaatatcgaagagcatttttttctagagatataaggaaacatattgactataataaatatacaatgtgacattaaattaagcacatctttggaaaaacagataaatcattgaagtgatcttagaatttgtgttgaaacacattattagtcacccagaaattcaaaaacaataaaataattttccacttagaaaagcatagcgtggaagtgggaaaagtgatttctagaatagtaacttgagggcctaaatttcaatactaaccttttccctttgtaattatgtacagtaagaaaagcacccctcagttttccactgtgcaaaatgaatggaaataccttcccaagcaatcttattgtttataaagacaccatgcaatagacctcatcattattatgtagccaattgtctaattaaaggtacaccaaaactgaaatatttttgcatttttttatgccatgatattcaagccacatcagactatattagattcattaaggttggttttgaatcaaatgttcatttataaaaaagagcagacattccactgttggcttagcaaatagaagacttcaatgatgataacagtggtctgaagtatatttcaaatttttcacttttctttcaatctccagccttacgaatactattctgttcacttttgtatatgtgcatttttcttttggtgtggatcctgagctctttttgaatagtatctcattctctcaaagcacaagaagactttatgatttgcctttggtcttcttgggaaatatcagtcagaataaaacccttgatcgttatcccagagttcttatgtgaaagacactatgctaggactccagtctttaatcagcactgttccatccactggaaatactatgcaagaaagggcttggaatagtaaaaacgtgtctgggaattttggaccctacaacccattacttgaaaacttaaatggaacaaatcttgaatttaggctgaaatcagactatatattgtttctcaatatgcagaagaggatttcatggactaaacatccagcaaagattgtttagtaattttctgagtgtataaattcccttgtctgacatgattaagtttctggactcatcaaagaggacagatgacaaaccacgaagaatcactgcatgtcagtcactatagccctacagtttcccagactccagcgtaagctgctaaatggcataagggcagcaaaacagagacataccattttggacataaatatggtatttgcatgcattgagaataccacttatcagtcttatgactgtsggcaagttatggaacctctctgagtctcagtttccttatctctaaaacaggaacagtcatrtctacaagcaggattgctgtgaggcttaaatgatataatctataggaaagtggttagcacagtgcatgggccactgtacgcaggaaactgtgtgtgaccaagccagagagatgctgttcaacaaaactgcaaatggccagcattcaggtcatatgagaaagtggcaagagataagagtagaaagtagtcaggagctacattgcaaaagacttctaagtctttaagctttatcttaaaaactaaagattattgcaagctaggattggggttgtgggaggggtaacaggtgacatgctttagattctcctttaaaatcaattcccctagctgcaacgtggtggatgaatggaaagatcagagtaagatgagaggtatagaaacctcttgggttagccaagttttctcttaaaaatgaaatgattagtttaattaaaatagtaacagcatagaatagttggccctttgtgactagaggctgtggcaaagctacagagagataagcaagctgtaacgaaaagtccaagtatgtaatttctacttgaacagatctggatttgaatcctcactcttcaaattaccattgtgccacttcagacaaatagattttttttcatctattaaaaaaatgtggctacattaggacaaatacctaatgcatgcccggcttaacacgtagatgacaggttgayaggtgcagcaaaccaccatggcacaygtatacctatgtaacctgcacgtyctgcacatgtatcccagaacatgaagtaaaataaaaattttttttaaaatgtggccagtcatagctgctgtaggactattgtgatgtttaaataagatgatgcatataaacacccaacacagaatctgacacactgagtttasaattggtatgtgaggtaccttggcatccacagaaaggggtttggtaggtggctggaatgcaggtctggaaggcacaagagagattaagcaccatctgcacacgggcaatagctgaagctgtagacactgatggcttcacctggaagaatatgtatggttagaagagggctgagaatagaaccaaagttatggccaattgtaaaagacagatgaggagatcatcccttgaagatgactgaaaagaactgtccagggatagaggagacatgtgggaaaaggctgtatgacatggaggtttctggtataccatcaataggtttggctgtggagttgggtggaagcagagagcttgtgctgttgtgatagtattatgtccaaagacccaaaaatgtcagatatcactgctcctgttgacagtctggagtgacagtgataaagtttgttgtgtattatggtactggtagtgcatggtcaccaaaactcaaagtagaggccaggaaaattgagctgcattggccacatggagcacgccgttcttcctagcctaattaggcctaaaacattttagatcaaggacaaagtcaatacacctgccaggaccaggagaaaaccaacagaagaagacagaagttttgagaatccagggctcaaggtaacagccagtgatgctagaaaagttgacacagactagctagagcaacttcagcctttactaagacagtggttctcaaacttcggctagtatcagaatcccctggagggcttgctgtccccaccccccmgagtttacgatccagttggtctggggtgggctgcagaatttgcatttctaagaagttccaggatatgctaatgctgctggttcagaaaccaccatttgagaatcactgacctaagaattttggactcttttataatctttgtggaaccacaaaaggctgttctttttaacttgctcatcctagaaattgacatatttcatctagtaaaaggctgctgtagctaagtttgtggtatcttttgcattaatgtgctgaggcaattattccacctttgtgaaataaaacatgcaactccaaaatttagacccacaaagagggtgtccaggttgaggaagccaccaggactgccttgatgagagtctcttgccctttggaaatctctcagttcaattaytgggcctgcttccatcagcttggtccctgagactgtcttgttcctgcttcaatgttctaatcagagccaatttttttccactgcaccagatcagaatccattcccttttcactagtaaaacactgtcactttttcaagcacatttttgtaaaagcatattctgcttggtgatcgattgtgaacaaaagtctccccttagtgcccttttgtagagctgtaatgggctagaactatcaaaagcttttatgaaatgccaagggaaaaaattagaaacaaattcagttaacaatatgttttaaaagagaagagctttgagtttctattcctactgaaacasacttaattcaagagcccaagaggccctggtcttgtcctgtgcccacctggggatttgcatttccatgtgtccagcctgcctcttctggccggcagctttcctcgttggtaaagaccctaaaaaggacactccccttcagcagatttcttctctctgttcttggtgtgtaatctgagaaatgcactgttatgtatccgtgccttaagctccagcatatatatccaacagagcagatgactaggtttttcaaagtatgtttcatggaacacttgtaacaaatgttacaagatacacacagggttctatgatcagaaatgtttaggaaatgctgttatacaaagtcattcaaagttgtgtgtgtgtgaatctccaagagaggagcattaatgtgtcatttcccaaactcatttgattataaagtttatttttattgttttctctttagatcatctcttgggactgtattatgggaccacttagggaacaccatctgaatattaacccagtagccatggtgttcatttattaagaattacaccattacagtagtggtaggggaggaggagccatgctaattaacactcccaggactgaggaagtaaaagtttctaaaatggttagagttttgcatgatctagtgactcaaggctttatattatttggcagaaatgctgaggagggacagtcaatccccaggcctaagacaagttcctttactccctttcctccacagcacctttttaaccctagaacactaggcccaggtgggaaaataaaggccccacctacaataggagaaatgatacagtcaaagcaggagtgggtcacggcctcaacggctaccacctaccatgtgacaagtcacttcatccccttgggattcagttttctcataatcagataaaatacatgtggaatgcatagctcagaagttcctgctgtaatatcctaggatcctaagaaaacataaaacaggtctcagcctccataagtgttccatatgtgttagcgtctggagggagggctgctttaaagttgggtgctccggaagtcccaggagcttgccctgctcacatctctggagttgaactgatttgaagtccttttcaaaagcaatgagtccgaagattccagacctcaacaatccaagaaagcatggtcaaaaagtttttgtgcacctctttggtttccgccaaaatgtattagatgtgctttcagcacttcagtggtaagatcgagactcatgcttctttacatttttaaaggaaactttcctcawtttgagtagttacttcaaagggcagcaaatgtctcaatccyttttatcatctcttttggggcagagatgattggcactgatgatggttacttgtaattccataacctcaactgaggtaagtttaataaacagctctatctctgttctcttgtgacgaagatataaaagaacaaactggatcgattttagacagacagatatctcccagaaactttcaagcctaagataatccacttattgmaatatgtaacattttatcttttttttttttaaatgcacatggattttggtgcagagagtcctccatcttttttctgagagagcaagtgttgttatgtatatgaagagtgtcagggctttcaggcctctgatggtatcaagaggttcctgacacacaaaatgtcacttaggctccatccaaacaaatgagaagggctctgtcctgtgaagagctaaagggaggaatatatcagacagacagaagaacatgtgcagcgtccttgaattgaggcaggcaaaaacttggagtgctcaaggaataataaggatgctattttggtttatgtcaaggaagcaggagggttgataagtagtggggaaggaccaccttttggtagaggtttggattttgttctaaatacagtacaaagccactgaaggttttaaacaaggaagaaacattatctgatttgcagcctgtaaaacatcactctttggtggctgtgtcaagaaaatattaaagtgggccaaagctaatgagaaagccagaagggagtccagttaggagatgatgatggattggactgcgagatggcagcggagagaaggaagtagttggattaaacatatattttggaggaagaaccaatgaacttgctaatgrattggatttaggtagtgaagggaagaaaagagttgtcttgaaggttatttgcttaagctcccaggtrgatggtggtgccaagatgggactactgtgagaggaacaggttttagaaagaattaagttggagatgccctggttgggcaaatggagatgtcaagttgatggttggatataggatcctggtttcagaggtgacatctgcgatggagatatccacatggatgttgcatataattagtatttaaagctgtgagacaggatgagatcagctagagcagggcttggcaaactttttctccaaaataccaggtggtaaatattttcagcaggctataaggtctctcttgcaactactcaactctgccatggtagcacaaaagcagccacaggcaatatgtaacaaataaaagctgtattccagtaaactttatttacgaaacaggtggtgggtcatgtttggcccacaggctgaagattgctgacctstgacctagagtatagactgagaagtagcccaagacaagacctaagagatatatattataatatatatatataatatatattattataattattatgtatatataattatgtcacttactaggccagtcatcattctaagtgctttacttatataaactcacttaatcttcacaataaccaatgaagtgactaccgttatctgttttacaaataagaaaactgtgacctaaataagtttatttctgtctcgagaaaaaaagaagtccagaagttggcagtccagtgctagtatggcaattctgtgtatttcagcaacctagaattttccagatcattcttccgtaatccctagagtatagtcctcactctcatggaccaaaatgatggctggggctccagtcattgcagggagcagaaagtcaaaacaaagtagaggcaaatggaatgcaccagttgtcttttaatgtgtcttttaagtttcctagaaattgccttgcaacacttcttctattacatctcgttggccagaagttagtcacacagacacatattgacaaaggggaaactgggacgtatagtttttttctcaggggccatgagcccaactaaaatttagcggttcaattactaaaacagaaagtgagaacaatcattagagtggaagttaaaaggctctgaccagttgctttaaagcttatcaattatctttctttatgtgtatttttgcaagtacagttagttgatagcacccttcctaagacatttctgctcagccatttcatatcttaggcctccactgatgatgtcctacatactcttccagctcactggtcacctcttctgtgaakccatccctggcactctaggcagattactcctgtgtccccatgccaagtttattacacttctccttgtatttcgttctttcctagcgtgcctccttttgtgctgcctcctctgcttgactggttaactcaaaggcaggtgaagcctggttgaagtgtggagggtaaattgctaagaactaagggaaatatgtagtgaagctgcaaatgaagaaaaaggagttagtacacaggatttcctgctccttggtgaagggactggggtcagacacctagtagaacaagtggttctcaaatgttgctacttatgtaaataacctcaggaacttcttttaaaaatcttgatgctaaagtttcacccataattattaaagcggactttctataagtcacacctaggcgcatatatatatatatatatattattgattgaaacacttctaatcggaattattaaagtcctcctgagtttatttaaggcagttggatgcactataagtgaaataactcttaagctgctctttaaataattagagcaggcaatcaagaaaataagacaacaacstcactgaagcttaccccatttgtgacacataatatgtttagattgctttactgactttacaaagaagcatgcaagactgaatcacaggtgacagatgtgattgcttctatcaggatgtgaggggccatatttcaaattcaatgtaagtgttgagctccattttcaactaatagtaatgaaagttttgtgcattcgttacaagtaaagagtattcccacttggtatgaggagtgtttcagaatgttttgttctcttttctccaaacaataaacattcgtgaggaagtgagctctcttaaatatgttttgaaactttttttaatttaaagatttctgagggaattcaggattttttaaattcaataaaaatactgttgacctttctgacgtttagtaaaaagagagagaaagtttttcagcagctattctttcctttttcactgcagtatttatatccagttccaggggagaataactctccaatttttcaagcatatttagagatttctgaaaattatttttaagtattcctttggaataaaagttgagtctctgattttcgttgatattgttactgatgaaaagcaagaaattgcttggatttctgcctttaatgagaaagagagggagccaggaaatgcactgggcaaaactgcaaaatcgaatggattcaacacgcagctcttaaccagaaaaagagactttggaacatgtgcatttgccaaaaaagaaaactgctttattgaaaggttaattttcagattaggcttgggaaatttgagataaataaatgacatcagacaaaaaaacataaggcctggatcctttttcctggggttttcagaaaatagttattgcttccaatgraatgttttgacatttccagtagggagaaaatgttaattgtaatattgtgtatgtgttcttagtaacactgaataaatctttcatttgttttaatggtaatcagaaagtaaaaacacgattaaaatgttagctgtgttctttattccttatggtaacttttcatgctttctaggatattgtgattcattttccaggttcaaatatataccaactgacgaacatgcttttgcttgttttatatcagttgcagtttttaaaggagtcttattactatcctccacataggtctgcctgggtctcttttctaattttgtcacatctttagctcattctacaattccccaccttttcccttgagtctatggctcctttactacatttataaaaagtcagcaattaaagacagcacaatggtggtccacttgactgtatatttaatatacatgctattaagctacttattgacagagacggtgattttttttttctgaacagccatctctgtagccaccaactccttgctttgtacttaacagacaccccataatttgttgaatgactgtaataccctccttacttctgccatatgtccctgtcccagaattccacgttgcaattgatgactggagctacatgtccaaagcaaaggtctcactgttgaaaattacagtattacattgttgatggtcctttagagacaaataccaacaaggtcacatgctcatggaccagcaggaagccaaatgtaaacgtaaccacctgaggccgagccctgaaaacaagctgcctaagaaacggaaggaatccctagtgtagaagagcagcatccgcccttcctgatgtcatgatctacaactatgcatatatgtgacatgcacacactggccaccatccacagggagaaaataccattagtaatcatcctagcaagcattcacaatctaatttggtatttgttaactccttagttaaaagatatgatgattcttacagaaaatgctgttccctttttgatcactatctttaagtaagtacatgaataccacttaaatcacattaaatcttgaaaataatctcaaaagcagatttgaatgggaataaagtggtaagtgtttacagttttccacgcactactgatcagagtactgttaagcaccaacagaaaaggaaagctgctatataataggggtattcctcatataggggcattggcatacagtctctcatgcctttataaagaaaacataaattacagaattgaacagttaatgtaagctttaggtctcatgtagattagtgcttatgaagtagaaaataatcatgmgcaaggaacagaataaaactcacttgcagacatcagcagcattttcaaccgtgtacttccttggcatgttttaaaaaccagcgggacctatgtgtcatgggaagatggttggatcctagtatgaaaacccagtcagtaacattcaacaacagattcaaccaccaatatttgcacagctagattaatgttttggagtcagtcagtcatcaggctcattactactggattttctctggttcatgctaataaactagattattgattttaggattttctttgtatccaaggatattctctaagatgtctttataatgtttcatgcttaagctgtcaaccaaaatgacataacaatgagtaatcgttttataatcatgttgaaaggggttaaaaacagcatataaaatgcatcttagcagcttcagagtaacattctcgctgtcacttccctatctgggtggaggtcattcctacctgcctgccatcttccccaggaattaactagctgcatgcacagcttaagacctttgatagtcataaatctgctttccaatatgtttggatggcagaagagctcaaaagacacctcggtctaaataggattttagcacatcaggtgctattacaaagtaaagcaggctgggttgctgtgttggtggtggtgtttattcatcttcccttcgcgtttcatgtgtatgtatgtatgcttctctgcgtatatgcccagctctcagggtgtatggggctggagaatgcatgcgtagactgtgtgtatatgtaaactagaaactgaaccagggaaacaaaatgaactactgtatgcaagaaatatatgaagtgcacccagctgccggcagcaattgctacatgcagtccactgattattacgcgtattttgaagatagtccgggttacagcggttgcgatgctcaggctgtgcccagtaacaacatatatatggaacaggcctgggcagtgaatcagccttatacctgtagttaccctggaaacatgtttaaaagcaaggactctgacttggacatggccctgaatcaatacagccaacctgaatatttcactgaagaaaagcctactttttctcaagtgcagtcgccatcgtattctcaaaaaaaaggtagggaccattttgcttaaatttgttcaaagtttcactgtttgttttcgtttcattttaaagttacagtttacatcagcttcgtcaaatctttgaatttgaacgctaaatatttgaaattaaaaacggcagtaagaggggttgctaggtgattgaaggactctgtgaacatcaagatttccaagcactttttttcttcatctttgaaagctggagtgagttgcctttctgtattttgcatgtgtgtgtatatattgcccaaagtgactattgttggcttctttgcgaaagaaaatatgtgaaaggtttccttytggcgggtaggtgttgtggtgtttgaagtgagataattctctctagttcaggttcagattaaaaactcatttgacttttccttggcacttcattttgaaagtttattttagttgactagttaactagtaaaatatttagtgatttagtgatttctttaacagtactatactaatgttgatttgctaggatctgtaaatgttcattttaatgtatttatttatccatgtaaacagtaaagaatctatttgtaaccatgtcaaactgtaagatgtaaaactcaaaaactgagaaactttactttgctattttgtccctaaagttgaacatgtctgtaatcatatcaagtgaattctctttatgaaagcaagtgaaacacacttcaaaatagccaatattaaaaccagtacgatatccatttatcttaatagacactgtggctttataatgctatttaaatttctgtcaatagaacatttcttgtattactgaaaaataagatactgaaaaataaaataagggaggcaaacaggtagaacattaagtagcaactgccagataggaatgcttttgaagatagtgtaaatgctagtgcagatatgccagaatctcatgcttttgtatataatctataggatattgcatagagaaccaaatttacgagtttctataatttacaaaaacatgatgccctttgatcctcaaaggtaaatttctctgttaaattaatcttaaaacataatgtggtttatttagttgtggtttctataaaatttatcatttgcttttcttaatgtgactttataattgaaagtagtctgttatgaaaacaaatgaacaaaattttataaaaacaaaaactagaatctgtaatttttactatatataatgttattctataacttccaatcatgaaatattaaggggattacagcatgaaatatatttagagttkctcatcttgatttttatttataaatatagagttttgcatccttttgaaggtcatcagaatctcatttattacaagggatacacagggtaagtcccctaatggaaacatttgaggtacattgaacatgtgctatttcatttaatagtataagtaatttaactttgaaaagaagaaattaacattgcctcattaaacatacttggatatgccttttgtagtgttgtaagaaaatattggtacctgtcaatctatgtgctcattctgctrttcttaaaaattcctgcagaacgtttcaggctcttttctcttttatcttttcactgtattttcttcaaccaacactggggaatatttgcttrtaaaatgttaaaccaggggttctttattaattaatttgatgcatgaactaaaggaaaagacacattgtatgcatatattgatgtaatttcaaagccatatgtcattgaaaggccaccgccacctgccaaactcactaaatcaaaacaggcaaatattcttaaatgcaccattatttacttttacaagtcttcgagtaaatcccagtaaaactaaacccagctgttaactgtctcttaggacaaaaggttgtacccaacatgtttatccatattgatccactattgatttttgttgtgttgaatgacatcagtagtgtctcgttaaggcaaaattaagaccataaacaggtgttcagtggggtaggcctcattttccaattggatttttatctattcacaatagataaaagttcataattgcttcatctgtgttcatggctgtcattacagctttataaactccaatactgcagctgtgttaactttttctttatttttttaaggatggcttatttcctagcctttattttctaatatacagagaatcttgtaaaaaaaaattacaatcttataaaaaaattataggtacaaactggtgaaataaaggaaggctacactacccaatgttaagaatggttatcttaattggtagactttagaataacttttagtttcccttggattgtttttctacaaagtttttttttttyttttgcattcatagccgacagaataagttatcaagttctggaagcattaagaacacgaactaaggaagagtcagatgtcagttcattgaatcacatttaaaataaagcttcaagaattgaggaggggaaaaccgatgtaattttcacattgaggaggcctaaaatgcagaatgtaatgtctgtcttatttttcatatggattatgaaaaaacaaatttttaattttcaaaagttagggacaaatgaaaagaaccctatcattcactcagaagatatgatatttactgtaattctagtgacatagctgtgaaatgctatgctaagtcctcacggggccagtgctggctgcacacttctggcccctgcaaattcaggagaagaaggcagtaagtttggaatcagatggaggagaattggcagacaggttatttgttgtgctttctgctctgtggctgaggttgcagcaaagtaaaaagttgacttttttttctcttttctttctttaaaaaaaaaaaaaaatccttttgtgggtggaagtgctagctgtttccatcacaaatactaatcacattccgaagttcccgaacagcctgcatctgcatctggctgctctgaaggcagctttgcaggtcaacctctcgatttagtctggaccagccgggtctgttgaaacagaaaccttcctaggagtctgccctgggcgactctcctccacgggattctttgcttgaccttctacatgccatcttacttgataggaattgcatgtttgaaaagttgtcagagatgcttatcatgtccaagagaataagaatttcctgtttttaagccaggatcgaggagatgggggtgggggtgggggtgggggagggttgtcctattcagttttggttctgattgtatatgttgttgctctacaaccacatttttaattgtgcaggaataaaaattaataactgaagcagaaactccacacaggactgtgctttctgaatctgctttcattgttcctctgacttggagatagaattctgtctgtgtgtgtgtgtgtgtgtgtgtgtgtgtgtgtgtgtgtgttctgtagctctgttgactccaggtgaacaattacataggcatttgaaatgaaaattaagtagcaaattggggaatgtttctttctcaagctttcctttcctttccttcttcctctccctctgtctctctctcctactttccctccatctctttcttcctctatcttctctttctctccctctctctcccatccttattcttcccctatacttgaattttttaatttaaacacagatgtgatcagtccacccagtgaactgttgagtactaaataaataatctcttttaaatgtaatagttaagtggttaatgcaatcatagatttttcaacaatgcgtatgtaacttaaggacgctgatggaaagttaggattttaaattaggtactgccacacacatgctgttcagagaaaacaccactccagaaaacaataccacaacttttaaaaatacagaacatattcactgtacaaaaggttaaatgaaagtgcctcttggcacccagaaatgaaagcaaagtaaggagcaataatcgtttccaaaccaagtccaagtgcagacaaaagcgtgagctctttccttttctttcctgagaattaactgtctcgtcaaagacatgtccttcagagatttcactgaatgccctaacctcatccagagcatgcactgcccttactcacaatgaaagctaacagtaggagtccaaagcattatgagcaaatggattcagacgcctggcaggcttacagaggaatggtgagactgctgactttctgcatatggagttcatatccaccacctcacatgcctccatggatactttttcatagtcaagcacaacacttttttctcagcactcaagtgcattcagcctgaagtcaagccgcttcccgccctaccacccactctggtccagcttttatgatcccatcatcttatgggtccttggcttcaccggtgcccacttggttatctgtattcttcctgtttccagagcattgggaatgctgaccttcccgtgcgctgtccttggtacttccctctcatcagctccctcggtaccagctgttgtagagaatttcctcagctctcttggagactcccagaatgtgcttttgagcagtcaccccacacacctgctttccttatccgcagatacctcccgccatgttttcctgcctttcttccctccaggttcaccctctcttgcttaaagccttctgcttccagccactcaggggcagttcttccccatcctctgcaccaccacagggctccgtctcaaggtttggggcccttttccattaccacaaattccaccaactcttccctgccctcaagagttcaattttgattctggctttgtgcttttacccacaccctctgttccagaaaccttggccagtctccccatgggttcctctctctgtcaccctagtctccatccctgaaccagtatgctttcttccagctgtcacccactgccagccacaccctggtgggccaccttgccactgtcagcctgcatcactttatgtcaccaactcagctcacagcccaccagcctcttctattacccagcaacacattctctcatcacccccrctcccaaccagccctgccttcaaaggcagatatcctttgttttatacaatagctctgaatcatttgtgtaaaccacctttgaaaagtaatatattatatataaagtatattagactagggtttcttaaccttggcactattgacattggggccatataattctttgttgtgatggttgtcctgtgcattgtaggacgtttagcatcattcctggtccctcttcccactggacaccagtagcaaacacacacacacacacacacacacacacacacagcagttgtggcaaccaaaaatgtctccagacttcgccaaatgtcccctgggaggcaaaatcatccccactcgaggaccactgcattaatggtgaagaacttactacttggagaatatctgaagtaaaggatctttcataaaggatttcttataatgttaaaatccctcctccatttccaaatatcatatttaagtgttcatatattgacgtctgtcaaaatggagtacacctgaacctacataaccatatatacgtgcaacataacacatacatatgtgtcatagctcatttccattgttgggatttgggttcccctcatcatgtttgcttatttatatcaaatctatctagatcataagcactacgaaagcatcaatctcttttattttgcactccctaaagcgcacatccatgtgactgcaggatacacctgcagggagagcagtatagctcataacgacagtgacggtgttctgatgacaaatgcaacagctccttcccttttatgtatgtttatgtaacataaggctgaagggctgctagcccacatttttagagctataaccttgaatcccattctgaatggattttcaggtaaagaaatgacacttgtttttctcaaggattcaggatatgacataactgtgggtgcctctgcatgagcccaaagctataaattgcttctcacagcaaaatcagaggcaactatcacccttctctagtgactgtttctgctccctcccctaatcttctgatgactttgccttcctgctttctaattcatgccgtcttttaaaacaggaaatgatctcatcaataccagggttctacaactccaatgcccccaagtatgcgagagagagagagagagagagagagagagaggaagagctgtcttacaatggctgcttaatttaaatttttcaacaaagacacataatgcttacataatatatgataagaatacttctcacttccatgaagaaatatgttctcaggccgggagcagtggctcacgcctataatcccagcaccttgggaggccgaggcaggtagactacctgagatcaggatttcgagaccagcctggccaacatgacaaaaccccgtctctactaaaaataacaaataatagctgggcgtggtggcaggcacctgtaatcccagtgactcaggaggctgaggcaggagaatcacttgaacccaggaggtggaagctgcagcgagccgagatcgtgccattgcactccagcctggtcaacaagagtgaaactcgtcccccacccccccccaaaaaaaaaaaaagttatcatttttctcaaactacttttgtttttccactcttgataaagataaagaattatgtgaaatatttctttatttatgaaaaggcataatgcaagaacaaaaataaatagcaactgatgcacacaatcaggagaggttctgactgtggagcctaaaaaggatgtccgtttcttgggaggtagggctacctttctagttcagttgatcgttacactgtgagaatttgggttcagtattgccagttcctcctgtttttcacatgaagcaagaattctgtatgttttatgaaatttcctagttttaaaaatttgctacgatttttaaaaacactctgcaagccaaatgttgtagactgccagaatgtgtgcccttttgattaacattccaactcaaacgcattatatcaacgtattccctttcttagtggtttgcatcttcaagtgttttccctctaattgtagattgaaaggttatgtcagctattaaggatctgaatgtacagggacggcaaaaggaacatttcactaggtacttcttatacattaaactatactatgcccaaacctggccctaaaaattaaaaaataggctgagcactgtggctcatgcctgtagtcccaacactctgggaggccaagacgggaggctggtttgaaccaggagctcaagaccagcctgggaaacatagcaagaccccatctctacgaaacaacttcaaaattagccaggtgtggtgaccatgcacctgtagtcccagctactcaggaagctgagctgggaggactgcttgggcccaggagttcaaggctccagtgagccatggtcatgccactgcactccagtccgggtgacagaagtgagtccctgtctcaaaaaataaaagttaaaaaaaattgtaatttaaaaatatgtcttagtttcaggaattcttgaatcagaagaaatgatccaaaactcatgttgtccctttttctgcactaaagcctccgatgagaatccagggtcctttggcctcatatcctcatccccttttctagattgacacctctacttggtcctcctgctcgcccctcctccgcccaccagtgcttcagtgttcaaagcctggcgagccattgtctgctgtcccccaacaccagggcccagccagccagagggcaaagtgtaaagaaagagactccaagactccaagcaggggtaggcagggtgggaaaacagtggatgttctgaggaaagattgtgaattgtgtgaagtgggagcccctggggcagctctgctaataatttgcagagggcaatggatgaaggcctccaaagttaatgctgtttcaagtttgtaccaagtgtcttccacacagtacacccatacatgctgttaaataaacaaatggatgaatgcatggtttaatttaatatagtgtctatcacagggttaaagattaacatgatataaagcttggtacctaatgccaagaattaaatataaaaggaatcaggattcgtatgttggggaaaggctaaaggataaccctttcaaggtttttaagtttgtcaagaaatgacatagggaaggtgctggtggggaaaacaagcttaaatcatcaggtctgagctgcaggatgaactgaggaggttcagtataaaatcagaagagtgactaagcatgctagtgacttagcttcctgaagggtgacaaaatacagtctcatcctctatcccgtcccaagatcagatacctactggctctgagttgatagctctacaagatgaatcagcaacatggaacttcttcacttctctgagctacccaaagtatttcccactaccgcaaaccacagcccctcccttaagatgccaggactggttctgctaggcaagtggtcttatacagatgataagatttgccagtttggaaaagatctctgaactcagctcttctcacatgctgctacttctgctctcctaggcagcaccttatattttagatctactttcaagattaatctgctttatattctattccctaagggccatgtatctgccaaggtgacaagaggaaccagtgtttctcctcctaggacctgagatgctgttataattcactcaaaagaattaaactagccagccttctgatcttgcccatagggaagaaagcattgaatctgttttcaaccaagaaggcaagcttactacctgttgcatcctttgtagtgcaaatgtacaaaactttccccttctacatgacaagtcgctcagagaatattttttaaatagcattaactgtaagatattcaagataatacttagcaattaaccagacattgccaaatgtcaactgaaaaaatctcaagtcctttgttgaacagatggagtttgcttttataaaaatatgcttgataaagtggcagcataatgtattaatctgaaaaataatacatctragcagacaagagctgagggaaatatatcatttttgaactatcatatattgtcatggaccttaattttttctggagggttattgaccaggcttctttagcagtcacctgggacaactagcagatgcagttcctgacatgaacagtcgtagcttccaggattgtgtctgtagtatttgtttctaggcagaatccaaygctgacattatgacactcatcagtgtccactcttggcaacaaaactaatgatacatgtgcattttccttagtttggcatactgaccattgtgtaactcatttggtgagtatgacaaaggaaaatgatggagacactaaaatacaacaggaaatacaacagcaagaaatggttaagttctctaggagaattggttagtatgtaatgttgtcaatcatgttcagtaaccttaagagaatcctcacctacctagtcactatgtgtgggacattattccctgatggaagttatttaatgaagaataatggacttaggcataatgattgatgtatcattgcctgtggtgactgttttggataaataagatggttcagagttaatatgttacagaaaagaaagcaaggggtggggtgcactagtatgatcatgtaagtagctgccaccaacttaagtagatgtttctgtagaagttttgatgatttaactaaagtcatttaatcacctccacccatgaagaagatagtctaggagaaataagagagtaaagcacaccacctctcagcctagcagtcagtaaatgaaaggagtccattccagtcactgattgaattattgttggattccacaagaaccttaaacaccatctacataaattgttgaactacaggtaggaataaatcttcagtgtctggctgccaatgccaaaagataaagccagcaggtctcatgagacaggctggggtagtatgaggtgagagggaactacctgcatcttcccaactctggttaatgttcttggacaccttgttttgacccctcccaagtcatgtcccacaagtacagcagtgttcaagtgtatcacaattggttctcatacctgagattagacagaaatgacttgtacctctttttcccttatctctgcattccatacttgatactaagaacttgaaagtcttcattctgttggattaattgtgtataacctcgaggtataagaggttcagatgtagcttttttgacagtatgggtctgtatattccatctgcctttaccaggaaggtgcctgttttcctaattgagttactttgtggtttaaaagttactttgtgttttataagtaggtctttatatgcacacaaaagcacatgagcacacctccttaccaacacttgtgactgtgtcatttttgttaaaaccatactagtgagtgtaaagtggtatctcattgtggttttgatttgcatttccctgcaatgatgttgagcatcttttcatgttcttcccttcattttcacctctctttttctcattgaagaatgaccaaggctacagaaacagaactcagcttatgagtttacaaaggaagaaaccatgtcttactcatttttgtattttcagcacctagaacaatgctaagcacatgtagatgctaaataaatgttttctgaattcatagataaatgactgaatgaacgcgcaaagcattctagttcccttttttctctgcccagatccttcccagaattccctttttaaaaatgactgacaagagttttgaaacccttgcagtgaactcaacagatgaatcatggtttgcatgatgcaaaagtaaactaagaaaagctgtgatatttaaaaatataatcctgtacattactaaacctcactttcaagtcaattatctgcctcccaagaaggaacatttttctaaattaaagttggagcaacataatttctaagaaattatgaaaaggatttatttcattctgtttccttaatggctttttttctgaaaagcaagacttcagtgacctagtttaataaaaggtctatgaaatgtcacggtaagatacacagtaaggcatcagtcatttcaacctagctaatctttattggaacaaagaagactttgctgaactgagtcaaaaaacttcataaggaccatgatagggagaaaggattgtttctcagcctcttccttcttcacatcccaaccaatcctgcctcattttgattgtttggtcttatgtgaagctgtgtgattctatatatcacataatttatcaatggtaaaccattgatagaggggagaatgaacctgccctcctgaatcagcatcttgtgtctgggcatcctctccacaggaagctgaaggagcaaagacaggagggaaacaggaggcttctgcttttgtgctttttagcttcctgagtcaaggaatttaaactaataaactcattgtccactaaaaaagagagttatcatagttggattttccttttttcttaataaacaaaacctctgtcatttcacactatccagtgttgttggattgcatatcataatatcacaagtttacctaacttttttaggtggcaaaattcattctacttaaagtcaactctccatttttagaaaaagaccagcatattacactggagggctagaaattaagagactggggttttagtcctgcctgtaatttccagtgagaccctgaggaaggccaaacctctgcaggcctgtttcttcaccttacaaggacttcgtcatctcccgggacctttccagctataaagttttctgaattcattgcatggtactgtgattccaaagtggatcaaatcttgtgaaaacaggttttgaaataagccttgttaaatagattgtgttatctagaactcacagtgctcaaatcctggcctctctgcttgagtcactggctctacagccttcctgccattcccacctgcacagcaagtgatcacagctrtctttctttctttctttctttctttctttttttttttttggcagaatttcgctcttgtcgcccaggctggagtgcagtggcacaatctcagctcactgcaacctctgcctcctgggttcaagtgattatcttgcctcagcctcctgagtagctgggattacaggtgcctgtcaccatgcccggctaattatttgtatttttagtagagagagggttttgccatgttggccaggctggtcttgaactcctgaccccaggtgatccacctgcctgggcctcccaaagtgctgggattataggtgtgagctatttctaaggcattctgaaatcctgggcctatgttaactctatgagtataaaattcttaccgtttggtttcactaagtctttactgttgttacctcttcctggcaagccaattttgtctctggcctagcaaccttagctatagtgtctctttgacgttaacatattattttttaatattccttcttttatttccttcacagggtacatccccagttacttagacaaggacgagctctgtgtagtgtgtggtgacaaagccaccgggtatcactaccgctgtatcacgtgtgaaggctgcaaggtaattgccctgggtccacaagcacagagcttagcccagctccagtcccctcccagtcctcttccagaatgcaatgttaagtttaaattcaaattaaaatcaaattctaacatccatggtctgtgatcatccaggtgtctggttgtgctcttcatttttgacatgttcaagaactgaatttttttcccaaatcataaataactaaatgagtgtaatgtctggtttctttacttctgcaagtgtttttaaaacaggaagagaatcaataaaataaaaagaaattaataaaactcttactttgggtttaaaaagcataggtcctttttaacatgttgtcatcccgagaaatgactgtttctcttcttgttttatctacagtgttggaggagacagagtttactctaccacaggctgttttctgctgttagtctgagtgaatatgctcattttcaagggttccaatagggaatatctttgaggctacttagattcagttatgttctgaaattatccaagttggcttttcgcacagcctgcagtgactaagtagattctggtcatccatcggctaattttgtgctgwacagtcctatctgcaggaaatacttgacaagaatataccagtgatcagtccattcacttcctgaaactgaacctaaattggcctacttacaagacttcatcaacaaaattcagataaggtttctggaaaatatcttttggtccaacaatctagccttgaaaatgaaatctaccataaaggaaaaagcttgacccagtgctgtatttcgtgtctgttcagctaatgtttcataaataaagaagtatttaaagtcagggaaggacttttaaaattgtttacttgttaaataccttgtcttttttacctcttatatttaaaactaaattatcaagatgtaaaccctaaagcaaaaattgtattaaatgtataaaacatttcaccttccctcctctctcatccaccttacctctttttctcttcttccgcttctccaactgccccgctttgttcatacccttgctcgtaaagcccccaaatcaacatgttagctcagtttcaaattaaggtgttttccttttccctagtggaagattttccatgcaaattccctatgtttttgtacgtgacattaggaaacatttaggagaaggctgctaaaaatgttgagataatacatccattggaaaggggtaatttctaaggttgcaagacttgctttttggaatgtggtgtaacatgttcttatttatccasacccctttgatctggaattcrtagtcctttaacaaagactgggctaaaggttgccattacatctatgaaaataatgtcttagggaatttaatgaatctaattacaagtaagttctggctatttattaattagagacttgcagacagtctcttgaaagtagttttattggcttgatttgaaagtaataaaactacataactttaggtacctactctcattccaaaagttcgataattcaaactagacttttctctaaattagtcccaattcataaggctttccctaccttagttgcagcactgagattcttctaaatcggcacataatgggaaatttcgaattctgggagagagatcctgattccatttaatatggaattcaatttaatacttaattccccaaaatgactctaaagagtgaatgtgccttacagaggacaatacrttattagtgactgacttaaacaaagagagaattgagcctattaacctatatccctgcctcacatatgtcttcaggatgatcaagaaatcaactagcctgttttccctagatcacaggatgtttggagcctggatcagctgaggttttcttaaaagaagaaatcgtgtagcaaaatctagattttttttcagattctgtgmctttgtctcaggtcagaatcctgtttctagggttgccttcattgtaaaatcagagaagagccttcccagggtacttgtgcggatcacttaatataatgacaaagcatcttggaaaaagacaaacgagtttttcaagtgaaacacggtttttaagagtggtgaaagatgaaagggttaattgtttcctatatcgtttattcaaacctgtaatttaaaaatatttctaccccatacttgcaatgtgtatggagagaatcctttttgccagttttcaccctgagaagagtgaaatcttttggagatgtcatgtctgttgtgatatccaagtttttacacatcttttgtagaaaggatattgatactgtcccacagcaaactatttttagagaaagaatcaaagcttttcaacagctgcctgaatagtgaactagaagagtgagttatctccttttcacattgatcagtgaatcatctcaaagtactaaaaaatggatacagttcttctcagaatacaaagaaacatgtctgatattgatttataaaagcaagacctcttcttaccaacaaatcatcaatgaaatatatgtccttatttattgcccagggcatctcttttgtcagctcatctctaaaaggatttttttaaaataagtagactgttttaaatgtcttcaagtccacttccaagagttaatttctgttactttttaaaatgaagtggttccttatcatacatcaaaatatgctttaattatagcttawgaaaggccaacattttaagaagaaaatcaagaaaaaacaaaaaaaagaaaggccaacatctttaaaaggatttggtccatgaagtgcccaagacaagtcatcagagataggccacagaaaagatggcatagtgtatagtagagctagctatctcaactcttttgtggaaataagcaaagtataaattatttcattcatcccaataaaaagtgaacagagtgactttttggagtgtctggtgtgtcacacctcattctctgcttagcgtggtcttactggtcaatgtactccttgccctaaacccacccctgaacatgagtcagcatcagagtatgagggagacaagggtctccccaacttcagatagactaacaatcttcctatcctagtaagccgtcagcattcttactggatgtcttggactttggtatttctacctctaggaaattattgtttcctccagaaggaggcgtgctaccctacccctcccctccctgtctgtgacatacatcttcttgccaggaatctctgggtttctttagttctcctttgccctccttggtcagagggtagcagagagaaaagctaggtttgcagggaaacttgtttttcactctcatggcatgctctgacattcatgctttggcaagatttgcccaccctgcacacccaggaaatcattgccaacatctccaacaactgccctgcgtgtgaatgagtgaatcttgtaacagtgtatgaacatcactgaaattaatggactcaagtgcttaggaacacagaacccaaatataatattgacagttttctgttagaacttgaacaatggaaatgataagggatttgcatataygccccaaaatcaagtctgttagtctcagttattcctgatgtttttctattttattctgctttgcccaatataaaatcctacctcgggcattttcataataagaaagagcttttgtgtctgaaggaggaatatgcaatagggtatacgtatataatcaaagccaaagaacattaaccgggatcataaaaatttgggctgaatctagatcaactgatatttcccaccatttatctagcaaagttagaggacccctttaggccttagcagaagacatccatcaaaacttgttttgccaccaggaacagtggctcatgcctgtaatcccagcactttgggaggcggaggcagacggatcacttgaggccaggtgttggagaccagcctggccaatatggcaaaaacgcatctctactaaaaatacaaaaattagccaggcgtggtggctcacgcctataatcccagcactttgggaggccaaggaggacggatcactgaaggccaggagttcgagaccagcctggccaacatggcaaaaccccgtctctactaaaaatacaaaaattagccaggtgtggtagcacacgcctgtaatcccagctactctggatgctaagatatgagaatcacttgcaccctggaggtggaggttgtagtgagccaagatcgcaccactgcaccccagcctaggtgacagagcgagactctgtctcaaaaaaaattttttttaatttyttacattttaaaacactcattttgccttgttatcctaccaacagttaaaatgaactttttaagtggctggggcaggactgtttataatctgttgatctaaaacattcaagtaatacagtaaaatttacttcattatacatcatataagcagttaagcaagtaagatgtggagtgccgctcctgggttgcaagggaggtgggggtcattgctgggtggtttccatcctacctgaagttcccacatgtacttaccatgtgatttgggcaagcgatttaacctgtctgaggtttacttttttaatccctaccatggaaatatttagagcacctcctttacatgattgtagggaagatagaaggatattgaatgtttctacagcacttagcaatgtgccctcacaataagtgctcactgctgttattaacttctacaatacagatgacagttgcctcaacttgaggatcacgtccagaaaaattctagtattgcacattcttgagaatattacctaagtcacccaaacctagaactaaacagtgtccccagatgctacagaggtgctctctcatgccttaagaaaggaagaatcattgaacctgtaggtgtatgtctacagataccaaagaaagagtgttataaaaggaaaacctcaatgcaatgagctatggggaaaaacttggtagaaaacctggagcgttctactccctgagtcctattgtttgaaaggctaagtgagctgatcatggctgtctcaagattcaaaaacaagtattaaactaaatccaggaagccagctagtacatctgtttaattactaaattattagatttttaattaataaagtattgcaagtatccatgtcttttcatttttttcactttcttcttggtcttggagctctcttatyactcagtataaagtagcaaaactcctcatagcttaatttagcaacacaattatgtcagtatatgaaatagaacagtataatttacttatatattcaatatttagaaaaaataaaaacaagcgctagatgttcctactagcctcttttccttgaataaagaccaaaaaaaaaggtgttgactctgtagtcctatggcatcatcagctcagatttagaactctctagatccttctgggccaactgtcttatatttgaatatgtggagctagaggcctagaaacaggttaaggtccaaaacgattcatctcatagttatatggacacaaaattccagaatcactgatttcaagaaaataygaaactgttgtcttgggtctttgtttttcatatagggtttctttagaagaaccattcagaaaaatctccatccatcctattcctgtaaatatgaaggaaaatgtgtcatagacaaagtcacgcgaaatcagtgccaggaatgtcgctttaagaaatgcatctatgttggcatggcaacagattgtaagtagatcttcacttgcttcatattcaaggaatgttgattaggaaacagtttggttcaaggagatcgactgggcagaaaagaaggcaggaacccaagaagacagagaagggaataccttactttcgcatacacccctcactccccacatccaggcttgccctgaaagggaggtgggagccattgctgggtgggttccatcctaccctgtcataccacctcctaactgtcaaagtatggatgatggaggaggaaatgcagttaaattatccctatcacatttgcaggcctagttgttagcaacactctgtttgagacagagattacaaatgagaggtctggtccatttaccttgataaggtatcattctatacacagtgttcacatggggtagagcctcagggactagtcctaatattttttcaagagcaaagacaggaatttattttatggacatttttggagatggggcgctggcagaaaacatcgtgttcagaaatttctgaagaatgcaaagttgagtgctattgcatgagtcatcctgcagttggttgtttgttatatttttagcaataaagacattccgagctgaagtcgtcctacccagttttcaaagtgctacagcatatggtggcgagattagcccttggggtctcttctccccrcactgtgcgagggatttacaccagtcactttaattaatctaatcataaaaataagaatcatgtcattcagaatgtgtggcctcccttttgccaggcatcagtattaatgattctactggcataaattttttgcacatcagtgagagattccaactattagttaaaaattaaaaagaaaaagaaagataaaaaatgaagaaagaaaaaagaaaatacagtgaggatttttcctgatgaaagaagtaatcatgactcacattttatgtgagaaatagagttctttcactgagaaaaaaaaatctgtgaaatgttctggtttgcccattaaagaagaaggaatggagaatctttaaaaaggaagagggttatgttagagtgttaggctggaaatcctgggttaatccccacctctggcygagtattttctttatctttatctcttaaaggcctttagcccttgccaacaatatgcctgatagggatatgtgaatatgattgacttacagccaaatacttagatatgccactatgacaaacttattattgattatctatttcagtgttctattgagaagtttaagatactagtgtctatgaggtttaaaaactcagtgttaatctagactgtatggaaataaattttgagtgccctttacttgcttgtgagggattctaagagctcaggctttctaatcagaaaaacttctgttcgagtcccagatctgtcacttactagctgtgtgacctttggaattaagctgagattttccttctgtgaaatcattgcctaccttgtagagttgttttcaagattaaattagataatgttcatcaaatacaacagtccctggcacaccggaagcatttgggaaggggttgagggtattattaccattcctcctttccctttagtaactgaaccaaaatgacttaacagggctcattcatattttcctcatttgtaagcgctcacatgactttgacaatccaatcaaatctaaatggtctggaatttaatattctctttaaattagaatatttaaatgggagactagctaggcaccttggttctccttctcttgctatgtctgctttttttcttttcctaccaggtcacaccttcatcaagaaatggccctaggacagtgatgtcgtagaactggagtcaggagtcctgggtcttgccttggctctgccattaacttgctctgtgactttaggcaagtcacgacctctctggatcaatttcttcttctttctgtgaaaagacagagtaggactagatgacgtctaagttcccttccagttctaaaatactatgactctgcaatgtaaaacctgagcctttccattccattgatagttaccaagtctagtgaaacggttttggttttggaaattgaccacagaaatataggtttcttgttacctgcccttctgattttcctttcacccaaatgatagaagtcaggactgcatttactgagcacttataatgcattatcacattgaatactctgtgaagtgggtattattgagcccattttgtataggaagaaatgaaagctcagagaacctaaggaacttgccagaggtcacacagctagaatgtaataatatcagaattcaaacccaagtctttctagattccaaagcctggactctttaaccacccttgagggtggaccaggtagagaataatgtacagtgagtaccttgaggcccaggtgaggcccagccacattccaattagcccttaagggagccatgaagagttggggtcctttttcctcttaaaaaaagggatcacgagcctcccacttactgctccataacgtttctttttttaattccataacgtttctttaacctgaagttctctttactaagagccgttttaggggaagcggggaggacagaaacccagagagtgaattcggatgactggctggacagatttctctgtgatcttgtgggtagtatggattttacctctctgcttcactctgttttagaaccaccttctgtggagttggagtgcgcagtgtctaggttctctggggactttgttttgaaaagctggccggtcatggggagtttggctctagagaccatgttggacaagactagtcaatggcagtttgctggtgaggagagaaactgtcccagtgtgacccaccccgaaggacccartaagccatctgtgcatcagtggtcccactcctgaggctccaggaagtgcagcttgctgtgtatcttgggagcatctgtgtgccttgtctcatctttctccccctcccagtggtgctggatgacagcaagaggctggccaagaggaagctgatagaggagaaccgggagaaaagacggcgggaagagctgcagaagtccatcgggcacaagccagagcccacagacgaggaatgggagctcatcaaaactgtcaccgaagcccatgtggcgaccaacgcccaaggcagccactggaagcaaaaacggaaattyctggtaaggcttccttgcacagatcagtttcacttatatgccagtgttttctacctcaatttattcagtcctcatcaccttgggatactggtgttattgcctcattttactgatagggaaaccgtagctctgagaggctgagtaacttgcaaagctaggatttgagtctaggtctgtgtgagaataaaggccactcctaccatctactttgtgatttgctgaattctaaaacagtttcttaggccacattatatcagtttgcttttactgttagaaagaccactcccagaccaactaattagtaaaatgttttgtctgccatcttttactttctatacccatttctttccttagatgcccagtatatacatatttagtccctgaactcaatcccaaatattccctttataatagcctctaggcctcaagtatatttttatgtcaacagaagtcaaaattttttagcttaaattaaatgagcttgactcaagaagggcaatgggaatgagggagtagggatagggttggtgggcacgagtgtgtagagaaaaaagaccttccagacccttgcaatattgatgtttaatattcttataaaaattaccagttgtgaaaattcttcccattcattttttattcagacttcatagtgttttgaggtaagctggaattactatccccattttacagacatgcaaaccaagcccaaggccttaagccgcttgcccaggatcgcactgctaaaagccaggcaccaaaaccaactcggtcttctggttccaagtccaggctctccacccacctcattagaaagactacgtgccctactagtgctggaccatctcagagactgactctgctcttagtttatgatataaaacccttttcaagtacctacctgacaacagatattctgtggtttcatttgtatccctaggacacattagagtacttccccatctgaacaagaagatatagtggtataattatccttgtacctcaacattaacattacaatgagatagtggatctttttcttaaaacaacataacaacaaccttaaaggaagttttggaaagaaaaggcttatacataattcacctgtactgacacaattactttcgttgtaatgaaacaatagtgccagcactttgttgatggctttcactaacagcaatgtcagcaaatacctagatggcctttaccatatgccaggtactattctaagtgcttttcattcattaacttcctataccaatcctgtaggtagatgtggttaatatctccattttacagaagagagaagtaagacacagaagttgaggaaacttgcctgagctcccacaactggtaaacagtggtgatggatgcagccagctccgggatttatgtctctatccactaccctatgcaatcttggcacctgcacaaacccaaaaagcctctgaaagatcccagctctttggaggagcagcctctcagtgccttgatcttgcatcttcaccccaccctggtatatctgccagaaaattcaaaagcactaattctggattgatagacaaattctaacacagtacacttggggcatagcaagacagagtcctacctaattgcaaacttaaatccatcctttccccaaatgtgtcacccataaatggacattgtagaaaccacttccaggcctggcactgtctcctgatttcaagtcgtgaccaagctgaattccaagtaaggtagaagatttgaagttcatcctggacttctcccgggaattttatacttttattgtctttactccccatagagaagggatactagtccaactaaacttgtttaagtagtcataaggtgcttctttccagactttaaagatttgttcytttatttaagaaacatttattgagtggatactatgtgccagaaagtaaataagtcaggcacattcctctagtgggaggcagataataagagataaacaaacaaaataaatgcaggtagtggtaagtgcaatgaaggcaataaacagtgtgatgggatgaagagtttgtgaactggaagtggggagagacttcatttctgtgaacatggtggtcagaagaagcatctctgaggagatgacrttgtgctatgtctggaagcagagaaaccacctctataaagcaaaatataatcaaatatcttcrtgctgtgtggtcacaatatctagtcattagaaccagtcttgaggtctgcactgttcacttaaaggctcctaacagttcaccagcctgaccatctatggaaagaatctatggcacagaatgatttgccattaggcttctgtcagaaccatgagattacccatgcacaagagagttttattctccttgtagggctgacatgaaatgtatcttttgtagatctttaatctgctcaagaaattgtccatcttgattcaaatgtaaataactgcttctccgagccatttttccctagagggttattgggaaggatcaggactcttccactgtcctgtctgtctctacaatgaacttcatttctgtcagccaatccccttctgtgcctgggataacccctgcatctcttcacaggagaacaatgttccattcagcctccacacttgagtatctatgctatgtgtgatggaaacttgtggcagcttttctccaagatggctgccatcaaattatttctcatcyctgtatacacagcccgttctctctctgggagaggtagagtctgttcccctctccccttgaatctaggctggtatctgatgcctttaaacagtgcattttggcagaagtgatatttaagttacttctaaggttgggtcataagaagccttgcagcttccacttgggtaccttgggggagggaagccacctggtctctcayagcagttgactatatattaaaaaataagaataataaaaaataataataaaggtccaactactctgagaccaccaggcagtgaggaatcccaagctagccatgtaaaaaggccacacagaaagagagattcccaagcagcccagggaccagaaatatgagtaaaaaagcctttacatgacaccagcctctactgccatttgatggcagctgtatgagggccccctagctgtgccaatcaatccccagaactcagaaagaaaattaaaaattgttgttttaaaccacaaagtttggggttagtttgttatacagcaataaataaccagaacagaactcgataaatatttgttgaactgaacatacagttccactcacccatccttggagatagtacagttaagccctgtgtcttagccagtttacatatttacatatactccttgcagaaacgtgactccaactgagtatttatgctcaggatgaaaatttcactcttttgagtagtgaattagtcctgcaaggacattaagaatctttacttaaagacagctttgctaagtggtattcatgtactgaaaggtatcatgtaccaaacaggcttttttgcacattagaatttgcctctcctgtgtgctaacaccccttttcctgtgcttgcaacactgccacgtgttatttattttttatgtgttgatgtcccattttgttccaaaaaagaatttgaggaggcctatcatgttaacaatagtataaaaatatgtcatatgggattacatgttgtcattaaagctgaaagtattcatttatctggaatgggtaagtgcattattccctaaaaggagctactgacatagttttcagtctaagaccaggacccattttcactttaagaccagcactcaagtcagaaatagagacagggctggscacagtggctcatgcctgcagtttcagcactttgggaggccaaggtgggtggattgcttgagcccagaagtgtgagaccagcctggtaaacatagcgagactccatctctacaaaaaataaacaaatttagccaggcttggtgatactcacctgtggttccccactactcaggaggctgaggtagatggatcacttaagcccaggaggtcaaggctacagtgagctgtgattatgccactccactccagactggacaacagagtaaaaccatgtctcaaaaaaaaaaaaagaaagaaaagaaaaagaaagaaagaaagaaaaagaaacagagacagtgatttgatctggattttaaatctatatttgggtctgagaaaattagagtctttggcaaatgaggaacttttgcaaaagccattaagattttcataataaatctaaagccactctttaaagcttctcccaaaagcatttaaatcatataattttctagttttctccaatctactcaaatctctgaggctacagaaatgcctaatttcaccaccaacaattcatgtgtgatgacagtaaggatgaaaagcagaagcaggctgagaagagaacaagcagcatctgatgccaaacaagggaaagcaggtcactccaccaagggtagctcgcttctagacctccagtagcagcccctgacagcaacaatcttgtctattgayatcatttattattgtctgctgacattgtgtcattattctgctcccttaattttcatgcaaagttgtagctttgggtgaatgtctacccaagtataaaatgtgacctttaggatcagaggagacctttcctactttttccctggcagagatactgtctgatttcacacactcaattggggcagcttcagacaaggggcataagcagaagggtcagacagggtgagtgatgaggccatatttggtctgtgtgcatagctcatagtacaagtgcaatcacgtcaggaaggcatctatcaccccaagttattagaataacatcagaagaaggcaggataatctagtagttacatgaatggagattggaaccagacagccaaggttccatgcttgcctttgttgcttttttaagtgtgacttctttgggcaagttatttcaggctcagttgccttatgcccttgctgaatggcataaagcaatagatacaagtgggttaacactgcctggcatattgttagcaaccacgtaagtggttactacatgcactatccttaccacccccacaccccgcactgccaccatcttattcctgctcatcccaggaaaagggtgaggctgtagtcatatcccatggcccaaggaccttgaattattatctgcccaggtcttcctgtctagcctggcaaaggtacaagaagacatcctatgaacaagtgaagaagtgagagtcccatctggccccactccattctgcatgtgtcagagagttaccttttcaagccaagaagtccttggctctgagccaaggactcagcagaggtcagctggcagcgtttcctactcaccttgaacaatactaatgaaatagtcaaagcagaaagccagttggccacgatttgcataagaccagcctcacccgtgctgagcaggggctgaggtcacccctgaacacacacctgaatctctccttttgcaccctccacccccactaccccaagaagtcattctggattccttaccccacagccagtccatttttggcccttgttttcagctgccaatatacaactgtaattctctaggcctctccatctctactgccatccccatagtgcacttcagcctgcccaaaccacagctgtttcctgcctgttttttcctttgactccccgcatatcttctccatgcagtaaccatcgtgtcatgtctatgccctgtttacagcccttcagtagatgccccattgcatttagaataagcccatctcctttctatggtctacaatgcctagcatcacggatccccctgcctacctctgcttcctcatttcatgccatcactgggctctaaccacacgggcctcctttctggctttgggactttgcactggctttcctctctgccttgagtgttcttcctctggccctaaggaaagctacttccttgacattcctcaagtcaaagtccacacattgcttctcaaaggggccttggctgaccttcctwtctcctgcctccccatgtattatcatgtcacctccagacttatcacaaattcttccacgaatacatgtttcttatttattgtctatctcccctcactacaatgcaaggtccttgaggatacactgttcattgctgtaacctcagcatctaaaactaggcctggcccacagtacctgctcaataaatattggtataagtatacattcattcactcactcaaccaataagcattctgtcctccacaacttggcccaatgccttgtacacagtaggcaaagacaagtaagacttattctctacccccttaagttcatatctttggtgtgtacttacataactataataaaaagtgatagtaataaatgcctaaataccatatgactcatagtcatgggccaccatgtgtgtttgaatgaggtaaatgtcatttcaaactgaggtcacctgggaaaacatctaggagaagatagaacttgagttgggtcttgaagagaaaataggatttggaaaagacagagatgagagacagaagtgggggctttggagaaagcaaaagtctggagagaaggcagcagtgaaatgggaaratgtaaggcaagctgtaggggagacatagagcagacagctgggctagctcaggaagtccatttagggcaaagagaggatatcagaatgagagttgaaaataccaccatgagctagctcaggcagttggatccacagaggcaaaaagcaggctttccccacaggtctacagtggtgaatctacaagcaagctagagacttatcatcagtattggagcttgatcttgggcacataaatacatatgtgtatatgagcaaatgtatttcatatagtagtttacgaggctattagctataataagatatctaatgggttcaactaatgtgaaatatttatactctatttttaacatcttccaaatattttagaaaattatgtatttttgttataggtgaaaaatcttcagggaagtaacaaacagggtttcactgctcaaccttgattaacctgataataactcgggtcaattcatggatatagacaaacagatagatagattcttttttgttgttctggtatctaagatccattatggaaaaaaatcttaatgataaaatcaaagggttttactttgttcatagttttacttctagcaattttgtagtccattaaatagccagaggcttaaaagtgaattttttattctaccttgatatatatttccatcagaaaacttgtgagcttgttacatttgggggtttagttttacttaaaattgccatatttccttgcatactttctctccttttttcaaatctttacacatgtcacaagtggaattcaaataatctacacacccacaaattgaatgaaaaaattaacatcagtattaacccaccaacatttcaaaggacactcagtgccatttaaatatatcagatcagctctatcagtattcawtgagagatgtttagattcagccaggccaaaacaatgttattacacttcttaattttatttttattttaaaaagttcatcctacatatatataattatatagatatgtaattaatatatatttatgtatwttwtwtatatatatatatatatatatatgactctctgcctttttgaatgtgtgcccacattccttttatcagttgatcttcataaaagacttgtcaagtagacaaggtcagtgagatgagcctcagtttcaggaatgagaagaaattataaagaagagcagggatatctgaaggctgcagggagcagcattaccaaaggaggaacasaggtaccttttactttagcacaatctaggtgagaaagagggawgtagaaggaggctgtacatgtgattatttcatcaattctgcctgctcccagagagccagccgaacagtggccttccctgggcttgctatgccaacagttgccccaaaacattstcaatcattgtgaaacacgacagaaaccaggtttcatccactcactgccagcaacacacacaaaaaaataaagtaaaaaataaacagaagacaatgctggatggtcaaaaaaagttaaatgctgccagcatttgttatgtattaataatatgtttttaaaaccttcccctgaggctgtaagcatgactcctgggctgctcctgttgaccctggtgctctggcaccaagaagagtaaaagaatcatcttttgctttttcttctgctaaaaatgtgatgtgagcagtaacaggagatatgcgggaggaggcaagggaactggattactctaagctggacttggttactgctaactcagtggttctcaaagagtgggcccagagcagcttcatcagcacaccctgggaacttgttagaaatgcagattcccaagctccatccctgaccygctgaatcaaatacactggggatggggcccagaaatcaagtgatactgacgcacagtgaagtttgggggccactatgttaggctagtctcaccactggcagtgtcctcactgctctgcaagtgaggaattctattttgctcatctcactcacagtgtcagttcctcattcccatccccctttcctacccccatctccaagcccctgggtgcggaaaagagaactggtcttgttcttgtctattcactgtggctctaggcaaaggtggccaccactgggtagggcttgagtctgtgatctccttggtcacattcacatctttctgggagacagctggagaggctggctaggagggtgttcagaggagtagagatactgttcattagtgtcaaaaggtccacagggagtaaaagccttgaagtaggggtgaggaggtgtggagctccggggagactgctgtgtggagtcagggccacccagatcgcaggcctggcctcagcagcttgctcttaacctttctgatccctagtttgctcacctgcgaatcaggatttgaatgaggactacttgagacagggtagtgtgcaaagtggctggctcacttgtaggccacaaataaatggtggttatgatcatcacaaagacaaggaggagaagtggagcagactcttcctgaaggaagcactgggtgacagcaggagacacatggacacagatcacatcagggaggtcactgaatgagaaactcaggagtcagatggctactgtggacgttgggaagcatataagtcacctggaggtcttgctaaaatgctgattctgtaccacctggtctggagaggggcctgagaagaagtcccctggtgacacccaggctgctgcactacgctttgagcaacaaggccatggattgttcttgagcaagtaaacagcagagaactgccctagggacattaaatactagtaaattcaccactctgccctaaagtttgccaagtttcctgtagacagcctagcaatcttccccctcaaccctcagctgagaccacctcaaactggagtctgtagggcagaggggagcttcaagccccagctgggtcagaagcaagaatccacagggcgctgtttgctagggcccacccatcgctctgctctatcactgcccacggtgtgcccacctcccacacacagacacacaccagcatgtgcagtgctctgaaaatgccatcccagagcccctggaatttatgtcaccttacctaagtatacaccctttgtgcattcagaagcaggacccaaattcctgtcctttctctgatctctctctctctctctctctctctctttctgcagcaacagtcctgtaaacattgtcactgagggcctattaaagcaatggccaaaacatatatctttactcaaagatgtgtaaactgtacagtttgttaacaaatgatgtgaaaactggaaactgtacaggatatcagttcagaagagattttctgccacataagaactatgataaataaagctcccttcaacttcttcatttaaatctttcttttttctcctccttagccagaagacattggacaagcaccaatagtcaatgccccagaaggtggaaaggwtgacttggaagvcttcagccattttacaaaaatcatcrcaccagyaattaccagmgtggtggattttgccaaaaagttgcctatgttttgtgaggtgaggatgttgtttttccttctgcattattcttaattatagtttcatcagtttccaggaatactgggtattatttacaatttaatgttaattagtagggacttaatcatatgaaagcaacgtcagtacaaaacgaaaatgcattctatttcatttggatttcccactttctgtatttagtcatcattcattagcttgtccgtgtaaggcccatcaagatcctattcatccccctgattccaggcattgagaaataatgatagcaatagattccatttattctgcacctatgctgtcctagttaccacactcaggtgctcrggtttgcccacattcaatctaatccttctaaccgatttgcagggttgcttgtattaaccccattttcagacggggacaatcaagatcaaagagwttaagttatccaaatgtgacatcatggttagagcctaggtctgtattcttctcagtgcatatcccagtgagatgactgtgtggtcgtttcttaatcctcaagaataagttaaatgcccctcatagaaccaggctcttaayatccccacaaatctttcgtcttttcctataagctcactcttgcttgtcccatcttcagggcaccctgtagagctgtcccaccggagttcttcractttccctttgggacacttgaactttatcaggcctgccctgtggtggctgatgccacagtctctacagtcagctacatgggcaagaatcctaaacaagttacccaatgtcttcaaacttcacttatctcatctttaaaatggggattacaataatgtctacctcttagagctgttgaaaggttttttaagtgggataatatatttgtaaagtgattagacagtgcctgggttataataagtattccatagtttaactgctaatactgcttttattttatctgttacatttccatcctgcctctaaccttcttcttttttaatcaaatggggttatgttttctggaaaactttaaaaaaatttcgtaagattcttgtctcttgctctgtataccttcaagaggacccagaaagayaccaaatagagagggtcacggacagctgtgagcctcttaggtaagcaggctgagtgataagtgatcctggtctcacctaaaaagaagctaagtttcctcacctggaatgactcctgctgccttggcttccagctctcttctgtctttgagtttgcaataatgggagcctagctggaatcagagggacacagagacctcagacattatggggacacttctcattgccaatttctgagcctccacagaagccatacccagaaggacaggaaagtgggcttcgggaaacagatatcttgcccctagacctacctgagagagcacgtttgcctccctcttagccccagcttcactgtggtgggggccaggtgtcttagttcaggccactgcaacagaataccatagactgagtggcttaaaaacaatagaagtttatgtcttacagttctggaggctgggacgttcacgatcaagttaccagcagattcactgtctggtgagggcctgcttcctgattcatagacagctgtcttctcattgtgtcccttcatgatggacaggacaagggagatctttgggatgtcttttacaagggcacaaatcccattcattagggccccactctcatgacctcatcacctcccaaaggccccgccttcaataccatcacactggggattaggttgcaacatatggattttgaagggatacagacattcagtctatagcaccagggtacctgatatgctagtacccacagccttgcagtagcaatgactcataccccacccctaaagaagtcagtagatactgaggaagggactttgacttatatctctgtgttggccatggagcttcccatgcctttgacgccttttttagaagtagacatctattaacattttagaggatattacaaaaattatacgtattcattgaaggtttatttatacaacataataaaggtaakgatttatggtaacactaccacaagattttggcacctattttagtcttttttcaaatatttgtgtgtgtgcacacacacatatacacatacatacatatatatgaagtataaaacatatttaatataatgcataccacaatgtactgtgtatgaaattatttttaactttttattaaagaatgtggatatgtcataagagtgcagctcaataaatttttacaaactgaacccacccacatgatcggcaccaaaagaagcagatcgttaccagcacctgtcactgtaccaactttttaccttcaatgggaggacatagcgtttacatattttttcacaaaatgatttccaatgaccacatagtattccaaagaatacatctaccataaattctgttatctgtttttactggatctatagttcatttccaatttttcactaataaaaatatgctcctgtgaatgttctggcaactatatcctgcccgcatcactgactatgtctgaagggtaaagcctggacatggaatttaaggaccgagatatacaggcttttgatatgtgttgccagagtgccctcgagaaagtatgtgcactctcacatctgcaccgaagggcttgtttcccctcactcttgccagttctggctgtcatcgttctcttttgtctgaggggatggttttgttttcctggacctctcttggtcctctctctggctgtgtccctttgcccccagttcttgggtctgaggaggaactctactgagtctgtcacccctacaactctagccagcctgccagtcatatggtaccctttgaatgccaccgcccccccagcccctgagatggtttttttccagtgtaaaactcatgtaaaccactgaagagatatttcagttgaaggaagaaaacagaagcagcagccatctccgccaccaggagcaaacacactgcgcactttcatccacggcaagggcgaggggtcaacgtggaacttttcaagcatgggttgtggcaagcttatctatccaagtttccctaaaagtccaagctgtttcatttttgattccatctctccttctaccctgatatcgtgtggtctgccaattacaaaagacaatggtggcgggatggtgggagcacctttacagcaaagcacctttgcatgtactttctgtctttgaggcctcctgatgacctttagccttttatattctctctcaaacccaaaagaggtgaattaactgtataggttcgtgagctacccatggagtgggctggagatctcaggtggtcttgagagccaggggtctcttgccagaggcagtttatcacatctgctattcaaactgtgttcatgataattgttctaagatccacgccaacccaccaaacaagactggcatgacaccaggggcttcacaagatctaaaatcatcgccggcagagctgccaaaacaacatgcaaaaccactcctagagtgcagggccctgtcgtctttgccagtcaacctgagtgatgctctcctaaggaagcaggaagaacctgtgggagtatccctgcatctctgcctgtcaggcccttgttgagtgttctcacaatgaaagcattttggcaggtgtctaagagattatttgcccacgtgttgaaacaaatctcaccaggatcctacaaatccctcttaaaggaaaaggcatctggcctagtttttaaaccattggtgatcctttgcaaatacttattcagcttttatttaaatttgaactaatcttcaacagttggtatttaaactagaaatttggaaaagaaaatttctacttcatctataatcagaattggtttcaaaagtggggcctgccccagtttgcatactttgtgacacattttaaaaataaatggtttgatctgattagtaacttcttgttgctgttctatgctagtggttctcaagagtgggatctgtgaaccagcaacataagcattacctgggaacttgggggaaatgcagaaactcagaggttggggtcagcaatctgtgtttaacaatcagaacctagacaaaagcaaatcacagtgctttttaaaaaatgagcggaaggagagaattcatatgtatggattccagaatcaaatatgcaatgacttttattctgaagaaaaagccaagcagtttgaaattaaatggtaaagtgactaggctgagctagtaaaaaacataaaatgcccagtattttagatgtaattcagttgtattacttttatataataacctaaattggactggttgagtattgccaagagcgtttcccaaaaggaatttgtaactgctctaatgaagagacagatattaggtgtaactcacatatttgttgtttatggaaacttagtcatatccatggtaaaaaaaaaaaaaaaaaaaaaaaaaagagttatgtttccttcttctcttggcattggattctgacagatccagtttcaaatcctagcctcacccatgaaacattcatttgaccacccccgcccccacccagcttgttaccctctcagtgcctggatttccacatctgtaagtaatatggaattagaatatttacttcattgtactgctgtgaagattaaatgaggtgatgcatggaaatctgggcatgatgcccaattcatcaaacacacccatttactaatagctttccaaactcctttgataatggcatttaattaaatagtctccccttccagaaaataaaattcttattttgcctataagcaaaggtattttttattattaacgttgccacattctcacaaatcttaactaacagggtaaccaaatgagcttaaaaggagattgcaacactggcagaaagacccagtgtgttgagtaatcctgtgtctaaggtgctgagaagaacacaaccttgggagtcaggaggtctgaattctgctctcccctctgccttcaagtccctgggtgactttagatgaagcttatatctctgggcctcatgggcaacatgtatctctgccaacaaccctctagctttgtgccaagaggctmcaagagcaaacgtgcttcaaaaaccaaaaggaagcccagttgccagctaaacagtagggtaagctgttacctattcaagctacaagacaaaaaaccaaacaaacaaaaatggagagtttaacataaaccctgctctcaagcagttatyagttgaagttataatacaaacccccaaactgaggggttattagcacagtttcacacacgactgtaatagcagttggagaactgtrtctgtcataaaagcaatgcaaactcctgaggttaaagttggtgaagattacagtcaactttgagtatgaaaaatggttgtcgaaagtctgcagccaagtagggaagggaaaaccatgggctcaaagaatgcrggacaaatgttaatcacagaaggttattcctattgcttttaagatacwgtatgttgttcctgactggcatttttgcatttgttctttgctgacatgaactggttcttttcagctgccatgtgaagaccagatcatcctcctcaaaggctgctgcwyrgagatcaygtnccttcrcrctgctgtgydctrtsacccagaaagtgagacttyaamctygaatrrggaaatggcartgayaykgggccasctgawaaakgrgvdtsttrrggwgrtgtcagacgccatctttgacctgggcatgtctctgtcttctttcaacctggatgacactgaagtagccctccttcaggccgtcctgctgatgtcttcaggtgagtacrcctagactcgttagtgggcatccaaagagcttttgcttgtctagcgctaattccaatcacttgagtyttcagtccccctttagcttcagaaacatagctcactcttcttcagtaagaaattgcaggtttgccagtggactgggaacttaaagggggggcgtcagatgtctgatgctttttgcagtgtcccaggatagaaagaagccaaaggagccatcttaaagactctacgaagtgatccgcctttggtggatactgtgcagccctcttcgtagtctttggccaaacctgcctccttctggtttggggtatgccagatatggatgtgagtgaccacacgattgtgtgttaagttctgtgtgtggaaaccgcggatgcaggctagaatttgttcatggcttagctacaactgaagttttagttatctgttgctaaatagcacaccgacccaaaacttagtggcttaaacatccaagatggctggagttcagctgggacatcaaacactggttcaggcctccctctatgcggcctttcctccggcagggtrgacttcttacttggctgttgatttccaagagaaagagtcccaagcacacgaaaacagaagttgcagatcccatgaggcccagtctcaaatcacacaggatcmcttcatccacactggattggcccaaacaagtctgagtgccagccaggactcaackgtccccctgtagatgggaggatagcacagaatgggcagccgtctgtaagccactacacatcaaaccctttcagggaagataattttaaatagaagtggtttcagagtcctctgcattttcagggcacccaagtgtagatgtgctttgtttggcacttgtcactctgcactgtaactacctgcttcacttgtccacgtaagtccctstggacttcttttttttgaggacatagrtgtgtctaactgtacatccagcacctaggccagtgtgcaatagaattcaagaaatgcttattggataaatggctgaatatgtggataaaatatcggtcacaagtacatcgagaattctttgtagagttgctgcttcctggttaactcagtaggaaattttttttttttaacctgagacacggtcttgctctgttgcccaggctggagtgcagtggtgtaaagacagctcatcgcaggcttgacctgctgggcttaggagattctcctgcctcagcctctccaagcacacgccaccacccctggctaattttttattgttttgtagagagaaacaggtctcactatgttgcccagtctggtcttgaactcctgggctcaagtgatcttctcacctcagcctcctaaagtgctgggattataggcatgagccaccacgcctggcctagaattctttttttaaagctaatctagaaatgtatttactataggaaatttagatatggcagacttttaaaaaaagaaagaaakaattctttttattatggaaaatttcaagggtaagcagatagaatagcataatgaactcccatgtacactgtggcacccagactccagaccggcctcctacactccccaccacctcctaatgttcacaccttggataatctcctgtccttcagtgtgtgcaggacctgtaccttgcttctagccaagagaatatggcaaatttgatgtcaccccttgtgattacattacataatctaagattccctcttgctggcagacttgctctagggactctccgtgccagcttcatgaagtaaaccgccatgtggggaaagttcccatgacaggagctatagatgacctctagggctgagggtggtctccagtgacagccagcaagaaatggggcccacagtcgttcaggagaattagtctcaaagaaataaaatttatagcttatccaaggactccttgtgtgactttgggtgacccctagcttctctggacttcagtgacctttaaaatgaagaaattaagctacatacacgggaattatatttctggagggactcatggtaatttttttagctgagattttagaggtacaaagacagttttaaataatgttgaatcacaccacgagaaagctgtttctctgacggttttcttcctggttatatctccttccaaataaggcaaggagagagattcggtgtggtgctagtctgcctttaacacctctcttgacacttaccttcttttttaacaaagagagagtggatctcaggagcaatgttcagccagaaccttcagctccaaagtaacaaaggcttttgccatgcatctatttttgtggttatcttctgatttatgtcaaatggatttttattactgaataataagatgtttcctctgtagtgggtcagtttaacagattattaagcaaataatctaagtaaggtagataaaaggaaaagtaggtggagatgacaaaaactgtgaatgtgatgccaaacactatcaaacaccaaactgaatgattcttcccagttctctcatgttgtgaggctgacactgcctgacagctacaggacaacttaataacttttcacaatccaccctccccagtgatgtggaccctcttcattaatactgccaggaccagaaaaatattacaagacattgtgcatttggcaaatgatagctgcgtgtcagggccccaagtctccagttctatcatggggcctgatgttctaagccccatgttttgtgtgccatttcggttacacaatatcttagactttttcttcaaagacttttccaagagccactacttctaagttccttggtcccacagtgcaaagagaaaaaatraaaatgatctgaaagacatttctttaagaacttttgtcttaaggagttaaaatggtcttcagtctttaaaatgtttctctcttcataaacctgttcagtgtgattcaagcatcatcaaaatgtcaatttgtactcgctatgtcatttacgtggccatctcgtctttatctctttgatgccacaaaacccacattatatttttccctttgaaagaacacatccaaagcaataatatgttgatcttctatttgggtcaaaaattaaaggatcctgtggaaaattcttgcacactcaaagaaagagagaagataggggaaagggagagagggagaaccagcaaatctgcagagcagcttcatcaaatatgaaggaaaacacaagataaaaatgcacgaattgccatttgtgctaaataggggattccaaaagcccatatggtttgttagtttgtttagactcagaagggtgaattgagacattagccctgatccttcctttccaatgaagcagaaccctgtttcgattcctattgatacagacacctcaataattggacctttgaagtgtgaattcatttgatcagagccacaaagaacaaactgaagagaacttagcaggggcacgttgggcctcctggagctatttgaggaattcatccgggtttatagattatttttgtcagccaagtgtctgcagcccaactattccccagttgcccagcctccttgtgtcacccctttgtttgccacttttggaaactgacttgagcctctcccacatactatgggaagcccagtagtctgcacaggacttgggaagatttgctgggctttccagggtcccggtgtcttctcactccagctcccactatagctgttctcttctctgcatggggtgactctggcacagctcccctccccttttcatttcaattccaaaatcatgactaatacaaggctgctactggtagcaattttactaaaggcataagggaagggaaaggccagttcattgcagcctggaagacaacacaaaattaaacatggtgtttcttggtcctcaaggaaatgtcttactattccgcgttcctcctttggcctcaggcctgctgcaatgtccccagtcccttcatatatctcccccttctatgcatgtccacgctcatcctctcctctctgccaggcagccagtgaaaattcaaaattgttcccctcatcttgcagaatatttcagctatgtcaggcttctccttctgtaccctaggagggaggcatcacctttcacactcaagaaggtaattcacactcaagctaaactgtctaaacagagatatttatctgaacaaagtactgcctctcttcatataaatgatgccactcccctggtacctggtccctggagcaccagagttcacgctgcatccatgctcatggctaagagggaagaccctagatctgcccgccccccaataaaggcctggaattggacaaagcaagccttcccccttccatctctgaatcaatgtccatcttctctcttccccgcagatcrcccggggcttgcctgtgttgagagaatagaaaagtaccaagatagtttcctgctggcctttgaacactatatcaattaccgaaaacaccacgtgacacacttytggccaaaactcctgatgaaggtgayagatctgcrgatgayaggagcctgccwwgccagcyrcttcctgcacrtgraggtggaaygccccacakaacwcwtcccchmtkygttcttggaagygtkcgaggattagactgactggattcattctcataattcctacagcactactgggtgtcatttcattccattgcctagctcttttttgtttgtttctttgtgttgggagggattatttgggagggaaaagggaagtagtccttggcatagacatggatgaaattgccccttgaatgcgggtacttgaaactattgcatttcgttctccggtcctgtgatgtgaatgctctgaaggttttatggttgtggaggtggggtgggggacaatcattaactcaccagcaccaagcatcaccagctcccacccgtccctggtccaagacttgagtcagcaaaatggcgccacaggacactaaagaagccttaaaaccaagataatacgaccacctccacccaatcctgatgttcgcagggctgaagttarcagagcacagaccacctttagttagatgtggctttcagccttktagggaaagactcgaacaaattttcatctattcaagagcatgctgtttgcagcactctttatggtctcctaggagcataacttggaatgtacaggaatatttgtgtcctaaaaaaatcagctgcccttccaatatcatttttataacsttatggtttaattcaagttatacaaaggtgtgactcaaggatgtgcaggtattgactgatggaggccracaaggaaaatattttttttcagtgagcccagagaaattagaaatcttcaccaatgtcastgactgcatggtttccaaaaattcacatagtattacctcacagtaggaaggcttctttcccatttaggctcagagaacacttttacagaaatcaaacctatttacagggtggcaccccttttctgtggcatctgatctgtcatctcccaagctcctgaagttctttatccaggttgtatctttgctgagctgacaacagatttctctatggatcaaatattctaatcaaggaaagatacggtgaaacttcagtcttcttctggagaaatgctgaggcgagattagtgcagctacattctgagttgaaggaaatgcagtgttctgagggcccctttgtgtcctgatggctggaggacgcttcctcctggttagatcctcaagctccttgcctcattgacaaatgtctcctagtcccctttttccctctgactctgaggaactaaatagcttgactatctctaaacagagactggccctgccactgaccctcctgtccctctcatagcataccctgacagatactcaatagaaaacacctgcagaccatgtgcacacttaactttcctgcccaacctgcctccccaacggcccatgctagaatagcttgtgcccagaaaacaaacrgtgacacttcatctcttcagcgtcagaaaatgggcatagaatgtacccatgcaattgaatgtatctcattctccactggcatagtagatataaactattcctttgcctaccttttactgccttatcctggaaatattggggaaaataagccatatcagtgagatttacctaaaaacaaaggaaggaaagtcactatggaaaccaagtagatgctttttgtaagtttggtggagcataactggcccagaagtctgggtgcctgagttctagttcgtgctctgtcaactggtagatttgtaattctaggtcttggttttcttacctggtgaataagtcatgatctctaaaacccttcctgcccttaatattgtctgaatttcaaggggaaaaaaaaaatctggttcctttaattatttttttttaacacttaaattcctaactttattagacaagaagtatggcccacttaacagttaaggaacgtaaatttgttattggctcgaaataataatttgacacaatactagtcaaccatttagaggccttggaaaaagaagaggaacagcactgaaaattccaagtatgattggaaattatctgggagcggggaattaaatattcaatgcatgaaagcaattgtactggcttctgggaaaaaggaaacaagaacattgctatggaacttgttacccagagaaaggaagtgaaaagatttacaattataagcacgaaattcattggcagattacctgctttatctacagacagattgttttggggtttggttttgtctaggcagcctctggccaggctccttaattgcttgctctgctaatatttcagcttcctctcttgactccttgaggaaccaaccgctctttggaagacaaacacttagccacctctgtgctccagggtaaccctgagaagctctgctgtctggggcaagctttctttccaaagggaatgagaggaaggcaagcaggcagggtcctgcagcgtcaggccttctggggaaagtttcctcattttgtttgacagggtcctcagtacatcagacacccagatttgaatataagttcagagcctgatctcaagctaaatcagaatgctttggggactaaccatgatcgagaattggccaaatagtatggcatataaacagccatccagccagccgcaagtaaaggaacgtttgatccttggcaccttaaatgattgattgccttcaataggcaaactgctggtctggaaatctcgttgaaggctgaatacttcatgcggagtaggacaagccttagcccaccttcaggttgaaaggaaaggccataggactcaaaagataatgactctgaaactaaactccttccttctgaagctgacagaggtacttagtgcatctcaagactccatctcataaaactcatttgtgagggatttgctctagatttttctaaacattttttcatctattgtccagacttgcaaatccagtgtggacctgatggagatacccttcacacctgcgctcccaccccctcggcagggagacgtctcagtagaggagaacacacccattatgctgggatttgtatttataaatcacttcccttttagggatgagcggtgtggggcgtgtgtgcgtgtgagtgtatgcgcgtgcgtgtgtgaccctcaagtgtactttgctcaatttagacgtgcagtatttccagaaacaatgaaaaaagtaagatgttttcttctttatgattctgctcaaaacaccacgtgccgcctcagagctttttctagagcctcggtcctcaatgacgcgcttgacctgttgatgcctcagcccagcgaagcccctcacctgtgccccgggcgacrgctcttcagtgtgcagtgcaggcctggggtggactgccaggccttcgctctgtgccagcaacgccgttcttgttgctcctccatgaacaggggtacaagccctggcccctcctcgacactaagccccccacagactcagcctccaaggaaccgctgagcacccttgaagcatgtcattgtcagtgatacctttttattctatggaactctaacctattcgtgtcatattgaccttttgctgcatgagtcataaattatgaaatcagtcttacagtttttgaaatgtagccagcatttgtaaggctaaacctttttcatgaactgaatttaagtgaataaccaagccacagttcctcctcaaatggagagtgatgatcgacatttgaatctctttgccctttccaacggctatggcatcaggttctaaaataagctcgtaatttttcctgttattttaataatatggaaatattagcatagtgyttcttttgatagtgatagactataatccatatttaaattttatagagaagaaattttattgtactgtgatgtagatatttattatccaggtaaggatttgcccggtgtgtattttttacaattgagacattttactttaatctttaaaaaaaatgcattaaaaacacactcaaaaaaaaaaaaaaaaaaaaaaaaaaaaaaccagactgggggaaaaaaggtttggccttatcacagaatttttactgtgctgtataaatgtttgcaaatgcgaaaagtgtgcatttatagtgtgtttccacattaattaatgccgccttcaagagcaatattgtgcaggtaaaacgctgtttgtggctttctgttgcacagttaaagctgacccaccctatgcacaagacaatcaaatataaatctgtcctcctcaggatgcagataatactcatgtaaattatggagcacaatgtaagacaaaaggagacactttacatatgtattgttgatacagaaattatcagggcatgaatgagctgatgtgacattatgccacttctttcttttggttctcccttattaacttggcatttttaatttgaccatagagccaaattagttctccatgctttcttcgtagaaaatccttttttttcccataatgttttcatgccctgagaatcagaaaaatactacagaatagaaaaagatttacagtcattggaagatttgtgttttgcaaacagtgttaagtgatattgctagatggtgatatttttttcagcctaaaactctgttgaaatctgtgatcaaaatgttttaaactatccaaaaaaaatttgtatatttgggaaaaatggatttttacatagcttttgtatgcagatataaaactgtaattatgaatatagtgggcgtagataaactcataagcttaaattctaaaaaagaaaaagcttataacagatatattttcctgtctctttctttaaatattattattttctacataggcaaagagttgcctgctcttctcacttcagctgctgccaaaagacggaaccacggatgtaaggacatttatttcataaataaacatctactagaataagcaaatttacttgagaagaaactatggagggagagaagaaactaagtaaaatgctgatggggggttacctctttggaaggggccacaaagatgaagggaggagagaggtgaagttttgcagctcaaggacaacattcatcttctcatctcaaattattcaggaatattactaatggaattatgttaacatcagctgccaacatatatctcaatctctgttgccctgaacacatgttaattgagattctttctatgacaagtaacaaaaagctaactcaaactggcttaagcagaaagctaattattgactttaatatctgggatctagggtattgcataccaaagcttcaggcatggctggatctgggtgcacttactcagtattctcaggaagctcctttttttgtcattcatgtagacttaacattcacatggcctttcaccttacggtggcctccaatagctccaggatgagctttacagctccaaatatagtgaaaggagaatttcttttctccaacaattctaatgaaaattctggcctaattctcactggcccaagttcagtcatgtgcccattcctgagccaatcactgtggtgaggaaaacagatgcataaccaaccttatcctcaggaatcctggaactgggtgaggggaaagagggacagtcagcttcatctaaactatggactgagagttgaggcaagatgattcctgaaagaaaattctaagtcttgctgctataagtggaagagaatggtgggcaagcaaaagcaaccagtgcccacaccaaaggtaaatctaaaacaacatcccatttcagtacagcaagcggttctccttcacacagaggaagctcatctccaagtttttatttggccaggacatgaaccaaataaacaccttccaaagaaagtgtttgatcgcattcttcctggttcgtgaaaacaccagttcaggtaagatggggcaagcatcattatttccctaggctagatcagttcagagtactattttctgagtttttccactctatattcaaatgactaagattaacctttatatatttatctcttgtctacattatgtacctcccaacttcctcctaatgaacatatttccctcctccaagaaattactggattcatttattgtggagagctggaacatatatattccagctaggtacaattcttaacccctttacacaggcaaagccagaagctgttgtcatgtcacaaacctggaaaagtctaataatctatgaagagaagccagaggacaaagttggtttgcttctccaccctcaagatgacagctcactctggtttttatgtttagacactcagggcaccatagctttgtaaataaggggaattgtcatcaggtttatgtacacaaattctgacacattaaatggtgtctaaaccaaagcaaaacttagtagaactactgaaatgcagaatgttacagataccatttgagcatgtatctcaagagaattcactgactacttgatgaaaagtgccatgttatactctttaaagacaatctacctacaccatacactgatgaaatcataaatgaagtctgtatctatacagtgatattgcctggaggctatattaaaatgagaagagaattgccttagcctaggttccccagaaagcaaagttcatgctgcaattttattaggcattatagcacccaaggaaggagtggaggcaaaagtgaatgaggcatagaagaaaagagaataaatataaagtgctttgctaagttggccacacttagtaccaaacaaacacaactgagtactcaattgtgtaagaccatcttctaaggggccatatgaactaaagtgatctggtgcagtggctcacgcttgtaaccccagcactttgggaggccaaggcgggtggatcacaaggtcaagagttcgagaccagcctgaccaatatggtgaaaccctgtctctactaaaaatacaagaaaaaattagccaggcatggtggtgcgcacctgtaatcccagccacacgggaggctgaggcaggagaatagcttgaacccaggaggtggaggttgcagtgagccgagatcatgccactgcactccagcctgggcgacagagcaagactccatctccaaaaaaaaaaaataaagaaagaaagaaagaatttatctactggctctcacattatcaaaaatagggctaacttccctccatgtctaggttatatgtacctggccaaagagcaggtcccgtggtgcttcacacttcaggagctaaagcaatcccgcacatggggaaacttggtctctacttccacagatgggcataccccacctttactggttggcagatcaggtggcaagtggggtgaaacaagtggccctgggccctgaggagataagtagaacttagaggctctgcaattttctgatacaagggctccttcagccaacaagttcttccaattatctgtacatgggccgtcaggttccaaagagaatcatgaagctcaatagacaatcaaacttaaatttcactgtaccatggacctgcctgtataggggcttttaatgtaatataaactggttatgtaaattaattgtcctcttaattgcattttcttgcagtaaaaaattaaatacatgtaaactaatcttttaattacactaccttagtttttcttgtagctgtttcattacaagggcaattttttctatatgaatatctatctgaaagttttatagaagccaataaaatttttttatttttccatataaaacttcacttggcatagacatttttggaaacaatgcgtataaagagtaaagtcagaagaagctgaaataaacactccttttctttcaggacagactgataatgtcctgtatattttgttttaactttcttgtacataacaccaatagcaatgaggaagatgcatatagagtataacatcttcaagttacaaatcagaaaattcttatgcccacaaatcccaatggatacagagatatgaaaaacactcctcagtttgaccctaagtcctagaaagaggctgtagccttatctgttgcagatattcaggtgggtttgcattccaaggattttatgatttctccaatgggagtttttagctctaaagagatcttttaggatatctttccactacataaagtcaaggccaagtagattctgtgtaataagttacatcaaaagatgaataacctgccaggtgcaatggctcatgtaaccccaacactttgggaagctgagatgggaacgtcgcttgagaccaggaatttgagaccagcctggacaacataccaagacccctgtctctacaaaacgttctaagaaaaaaattcaccgggcatggtagcatgcatccgtagttagctacttagaaggctgagtcaagagaatcctttgtgcccagttcggggctttagggacctgggatcataccactgcactccagcctgtgtgacagaatgagactctgtctcttaataaataaaaaataaataataaaataagatgaagaatttgagatcaccaaagatttttcattggtaagtgaactactttgtgagaatccagttgaacatttcagaaaattcacctctgtttcccccagcactttgacaaaagttccattcattgttactttccactcaagagtcccagcaaccaccccaaaggatgcgctaggtgtttgtgctgcctcccagagttcttcactatcttgttggagtatgtaacaattgcccagcatgtaatgaacacctaacacctactctatgccagaaatcatactagaccctttatattacctctaatcctccaaacaaatatggaagtaggtgttagtattctcatttggcaacagggacatgggactcagtgtgaataggcaacttatctaagatgacacttttgccaattgtcagagatcttggggttctaagacccatgttctttttacaacctgcactgagaccagggtaaagccttagccccttacaaaaacaaaaaagcaagtctgctctggaaatatttgtcatttcccttcctaaaaggttcacctactctaatgcaaaaaaaaaaaaaaaaaagtacattataaaggaaggttacctgacctctcattagattgtgtccatgcaaaaccactcattggtgttgcaacataaaatgtaatttctctttgtaggacctatgtataacccagctggctactagatatgtcagtctgacaagaggacatttagtttgctaagcatttgagggtctgatcaagttttgggagagccaaattgctctgcataattgaaaaagaatttacagtaatggaggctggaagtggggagggaaagcaaacaagatgacaggaacacttatgtttcaagatgtgacaccatactgtagctctctcaactttagataatcatcttattagcaaatgcatgatgcagatgaatttcttgtggaaacgaacgaaaagagacattcaggtatcatgtttatatagaactggtgagcgccaaaacaaaggggatcttaataatgtaattatcccagaatgcataggattctgggggttattttgtctaatttaaagaattgagagaagagtttttcaaagcagtttcatgtagctctagctacatgaagagagggctctagctgacatctggtagatacgtttacttaagactgtacttagacgtgggaataaattagtaaattgaaggttcttgtggaattttccacaggaaagcaataataaaagcccaactttcactcacacctgcaattaaaggaaaacaacaagtcttaaacaaaacatagcaaaacaaattcagatccattaaaaagagaattttttatgataagatatttgcaatatctgaaatgtcacagaattaacgtcaggaatatgcaggtagattttgcaaatcaacaagaaaaatacataaaatgccatagtaaaatagaatattcatagaaggagaggcccaaatggctaacaagtatatcaagagatcccccacctcacgagtaatcagaaatatgaaaactgacatcgctctatacccgcagattaggtagacagaaaataccaagcattaacaggaatataaaaagataaggaccccatctcccgctagtgagagagggttcagcccatttttcctagagccaggattcccattctgggaaaatacctcaagctcttacagagacctataggcataggaatcctagcatcacatactttgcaatattaaggagctgagttcagagaaggcaagaggagataaatactgggtggagggatacctaccatggaaatcactgca

SEQ ID NO: 96194 - DNA, 236561 bp, Homo sapiens
cattttaatagctaatcaactcttaagtatacatttgatggtaaatagatgctagctaatctagaatcatttgaaatattgattatctgatttatagtttggttgcaaggaaatctactgtaagcaaatcataatagatagcaaatcttagaacatgtagaaaaaaagaaattaaaaaaagcaaatcttagaacatgtagaaaaaggaaattaaaaaatagatagcaaataacacaaattatgcatactatatatggttattttcatacaactttgataacggtgaagaatcatacttattgaattttaaaatgatgatgtttaaaatcactctatgactaaagcacatgagaataaatgttaaaggcacagccttataatccacaacttcagaacaatggaatttttttttttttttttttttttttttgagacggagtcttgctctgtcgcccaggctggagtgcagtggtgcgatcttggctcactgcaagctccacctcccaggttcacggcattctcctgcctctgtctcctgagtagctgggactacaggcgcccgccaccacgtccggctcattttttgtatttttagtagagacaaggtttcaccgtgttagccaggatggtttcaatctcctgacattgtgatctgcccacctcggcctcccaaagtgctgggattacaggcgtgagccactgcacccggccaaacattggaaatttttaatgatggatttcagttcttctcacctctgggtatttgtaatatttggtaaatcaggagtcctgagagtcttagaattttcatgcattttaaatatatgtcttcaaagcacctaggaatatgtaaatagttacccaaatgtgagaacagaattgaactaaaagcttcgtttataatttttttttttttttgagacagagtctcactctgttgcccaggctggagcgcagttgcgtgatttcagctcgctgcaacctgggactgcaggcgtgcttcaccatgccccgctaatttttgtttttttagtagagatggggtttcgccatgttggccaggctggtctcgaacttctgaccgcaggtgatccatccgcctcggcctcccaaagtgctgggattacaagcatgagccaccatgcccagccggttaataattcttaatcagtaaatcattattcaaagacatagttaatatcttcatgacttcttaaggatgctcaaaagctggtcttcagaatacctacatttctttatctacatattctgtcatttggagttatacaagtagtaatgacacaccaaaatgtaaataattattgttagcttttaagttggcttccaaattcaaaaaagaaaaaaatcctgaattctctaaaggaacatatgatagagtccatatgttaattcataggaagtgtttaaggtactatggtctattttggtctaatctttgttttactatgtaatatatatttatgatttacaagtttgttattcagtgggataataaatgaacacaaaatttatgttctcaaccaatgtttactttttttcaaacatacgttaaaaatttatttaaagttacattagcaattttattagtttaggaaatccattgtatctttatacttcttaaaaagcctatggatatgagatagaagccaaacatatctggaacctggtaaccacttttcagagttcttcgtaaagtctgtgttatgttcctgtcaacgaaaagagtcaaacacagtaaagtatttgaagagccaaatatgagtgaccatggcccatgacacagcccttaggagaccctgagaacatgtgcccaaggtagtcagggtacagcttggttttatacattttagggagacatgagacttcagtcaaatacatttataagatacactggctcagtccagaaagctgggataattcaaagtgttgggtgggaggtttccagattataggtagttttaaaatttttctaattggcaattcatagaaaggaatgtctgggttgctgtatgagtttgtggagaccagagttttatcatgcagatgaagcctccagatggcaggcttccaagagaacagactgtcaatttttcttatcagacttaaggtctgtgttgatgttaatgctggagaggtataaggaggcatgtgcgtgaccccacttccagtcatggcctgaatcagtgtttcgggttacattttagagtgccctggcctagaagaaagtccattcagatggttggggggggccttagaattttatttttggtttacactcctcatctgtaaaatgaactaagtctactacactagattattggagaagttatgctgcaagaggactttgtaaaaaaaaaaaactcattttccacatgtaaagaattactaatacaatcactctcttaacagatattcccccttagcttctagatgattttatcttccacaagagggtattaatttttgcttctagtaggcagtatataatggcatggtaaagtctgagtccaattagggattgagccaaagagaagttgagcttcagtctttgtgagggctggtctatttccagttcaccttgacttttagggtgtagccctttagggatctcaagagaaaactatgagtgtgtaccagggcttctccttgggggctctggactactacttttgtcccctccttcatgtccaccattccctcctcccatccctaccctatgagattgctaaaggtactgctcagcttcttagttgttgatttcagcccagtttcttagcctccaagacattgcttagtaattagcaagtgcttcaagcagaaaagtagtgccaaatataatctctcagcttccagatcttggcccttcaagttcttcctgctttgatagctctccaataacttgaaatatattttaaaaatattttgtcaaattttctagttgtttttttatgagagaataggtatgcagctagctaatcttcctttatcaaaagtagaaaactgaccttgaagtaaataactactttgagcctcagttttctcatctataaaacaatgatcctggccaggcaaggtggctcacacctgtagccctagctacttgggaggctgaggcaggaggatcacttgagcccaggaggtagaggctgcagtgagccattatcatgccacctgcactccagcctgggcaacagagggagaccctgcctcaaaaaaacaaaataagataaaataataatcctaacagcacttatcatactagtattattgggatgatcacaaaaaataatccaacgggaaaaaatttcctaaccttcatggtacagagatgcaatctgtatgttctcaaatactttatactttcctcttttggggagataagccatctgaaagtgaagccattagatggtttaaatctagtcccattcaagaactgcaattcagccaggctgctcatgggaagaactaggcagtggcgagtacatagttgaaatagttgcaacatctcaacacttccaataaattgtattaagggatatgacatgataatataactgtaggttagttaaaatattgatgcttgtacattcaaggggtggagtcagaaaacaactatattctcccagaccttctctctattaaaactggctctgtaggtagttcttccttgcccttctggatgaaatctcaggttgctgcctgactttctgcttgctcacaggtaataaaaagtccttagctcctaatttccatttctctctctctctctctctctctctctctctctctctctcacacacacacacacacacacacactctctctctctctctctctttctcatttcaatatttaaaaaggctagtcctgtggaaaaactttgataaaacaaactttaaggttgaagcttttttcctcctccagaactgagaaaggagtgggtgtgcttagtttcttaatttccttgtctcttgttactcagtggatgcctgggactcctccagggttggggagatgtagaggggaggagaggtaaggaggagaaaagttctttttggtctgatactgttgtgaattgtcatcagtgctttctgtactttgtaaatattacatgctgacattttcttgtgggcattttggaagaccttcccaccttcttatttcttgggatttcttgatgtaggtaaatgtatctctctgggctgttaaattcatttccctcaccctcaaggaatctagtgatcgactgtcctgtgggtgtcacttcacccttccagaaattctcttggacaaggtctaagaccatcccccagccagtttgctcaggtatgggaaatactcacatgggaaatggacagtttttattttgaaaaactgtgggtgtgaaagacctccccaaagcatcagtttgtctttgctcagctattagagcagatatccagccacaagcccttgtatttctcagaacggattggacagaagcctgtctgggtcctaaatctagagggatgcataccaagctctctcagggacccaggtaaagtaactttccttagacctgagatgggttgagacccacaccacattgataattgtggccacatatcctactagaattctctctggcctctcaacctttttcgtagactgaaagtcatacactggtttctagacagttgctttgcaagacctgctttggtggtcttgaaccttactttatgatataggagtaactggcacttgttgctcagccaaaactgagcggtgaaggatcccatttttacatcctgttacacatgcttcaaagaaatggtcagcacaaaaaagcccactcataagacagtcagtaagcatggtatagctcctgcacattcagatccctagagaatgaagagctgttttatctctccaaagtttgcttttttcttggtatggtcatcgacgttctccagatgccacaggttggagagataaaggtgaggggctgccctcaagtggtcttacaggcagaaactcctaaaagtggatggagtgaaagaacaggaaaggacagtgtaagagctcattggagacacttcccagaagcccaggggtgaagggcagtgagtgctggaggcccgtgtcagcagaggggccaagtgctaccgaatgtgaatgtggatgatcatctttaatgtgaccctatgtgttctgtattcccggtacgcggtgccatattttccttcagataaattgaacttaattaactcccatcagcaacacgacgctgtctgagaaaagccattttatatggaaatgttcgttgggtgacgattatccagtattattaatagaatgagctcagggccgtgcccggagcgccgaggctgccccggcaggagtcgacgctaaccagcctcccccattcagcgtcgcgaggcgcgggttcccgctccgtgccaggtgcagagggcgacaccggcgacgtgccactccactcgcctcccaaggcgccccctcagatgtttgcgaacgcacaccaaagcgggctcaagacaattgcgcctgagacgccgggcaggaccctgccctacccctcaggctccatttcctgttcccgcaaatggtgatgccatcgctgccctgtcagcccctctgggctgtcgtgggcctccaaggagacaaaaacgcgaaggagctttgtgaactgtggcgcgcagtgcacctgcatgaaacatgaaattatgactaaaaataaagagtacgagggggtaggagcgagaggctgagaggcccagcgagacaggaggctgcgggcggagacgctgcgagcgccgccggggcgggctgactgggaggcggctccggggctgtcgtccggccccgcccaccactgatccccagtggcccgagggcccggccgcaccctctctcccggcctgcgggccgcttcccaccacagaccccgccccgcgccctacccatcacgcgtccccggtccggctccggcgctcacctacccccggcaggcsccgcccccgtgcsgtccctcccggaagcgccggcggagcgtcctcgcatggagcgcgagcccagcgcctcggaggccgcccccgcggcggccgcgctcttcgcctgggtacgtgactccgcccccgggccggtgcaggccctgaggggcgccgagatgtgggagctgctggccgcggcgtgggcagttcaggggctgggcggctgaggtccgagccgggctctgggttgaaggatcctgggctgggagcggagggggagcggaggaggagcgggcgggcggggaaggaagggtcttcgcggtcgacttaggggcctgccggctggcggggtcagggccggaggggctgtggcgccgcgggaagaacctgcctcggggcagagcgtctggttccgcgagagccctccrgcccgaatagcgcctggaagacagcgcggagggctcggtggagaggatcgcccggtcccagagctccgtggggccacctgtgccccccacactcctgatgcctggaggagggagaccctgtcccagcctggcgaaagcatcctttagatgtgaggcctgcggtgtttggccgcgcacaaggcacagaccctgcctatttgctgacactctgctgtgaccggttcttgcatgtgttgggggagttgggctgctgttggtttgacgggagcattgggagagacagggtcatcttgatgtgtgtctgggagagaggagggttcatgcacaggagcgtggcaggtggccgaccagcatgcacgggaacaagcagtcgctgcgtcttgtgcttcttcatagcacgtatcacaattgtaatgatgtgtataatttattattaacgtcagtctctctggctggaaagtaagtgtggtaagagtgggtgctgtgcctgtcttgttcacggtgcctctcttggtgtctggcacattgtaggtccccagtaaatactcgttgacgaatgaatgaacgagcatctgtgtgcctacccatgtgctggtgttggggaaatacacatgagtgaaatacacgagtgaaggacttccagctcttgtgttgggggagagcaaaattataacctgtattgctgttaaaatcagtattagttgtccaatttttaaagaagtaatgatcagtacaaggcggcaattgttgaatgtggggctgcaatttggcaggagggagagcatggcgtgacctgcggtagtctggctggctgggcgtctttgaggtggcccgggagctgggggtggagttggggattgaatgtgtgctgtctctggctttttccaggcaggagactggcgtctgtgtggacagaggaaacagaaatattgtttcagtacagacaaagccgaatattaaaggttgtaaaatatgtttaataggttgttgacacccttctgctgtgtttggaggactggtagtgtgtttttcctgctgtataatctgaaactgtgggggtgtgttggtcggctagggctaccataacaaaataccacacaacagaggcttaaacaacagaaatttattttctcacagttccagaggctagaaggccaagatcaaggtgtgagtaggtttggtttctcccgaggcctctctctggcttgcagatggccgccttctcactgtgtcctcacatggcttttttcactgtgtcctcacatggccttttctgtgtgcgtgagcatccgtggtgtctcttcttttaaggacaccagtcatattggattagggccccacccttatgacctcatttaaccttaattgcccctttaaaggccttctttccaaatacagtaaggtactaaaggttagggcttcaacacgtgaattttgggggaataaagttcggttcacaggaaggggatttaccttgttaggggkgtgtgtgtgtgtgtgtgtgtgtgtgtgtatgtgtgcatgtgcacgtgtgatatgtctggagtgtttgtgaggaagaaaggcaaacaacagttgtaataggttgtgttaaatttcccttcgtcttgctttatcctggatttagggcctctcacagtgttacaaaaattggtacsgyaatttgaacctcagagtgcccatgtgtcatgttacttttctcccaggtgttcagcagccttgcacccctggtaatgggacagccacggagatctcagggctgaccaagaaatcctgtgcatatatgctctatattccccttcatgctgagcaagtctttcatagggtcttacattcattcgccatataaatatatgtacatcttctttgggccagcacagtttcagatgcaggggaaacagcagtgagcaaagcagagttcctgccctcctggagtttagtttctggcaggggtggtgtacagtaaacaagtagtcatatataatgtaacatcaagaagtggcatgaagaaaaataaagcagaaaatgagtgatatggggatgctcttttagataaagtcatacagttaaccacctgtcaggtaagctctgggctgcttcactgtatgtcctttttttattttttctaagagacacagtaaggtatagtaaaaggtgcagggcatcagactttttgcctacccagatataactatggaaagttacttaacctctctgagccttagtttcttcctctgtgaaatgggagtaataatgtccttcttagttgttgtgaggattaaaggtgaatgcacagtatggagagaagcactcagtaattggtagctaatattgccccctgtgggcttctgggacttatgcccctgctatggcttactcttccatctttgagtccttgcagcccaggatggctgtgaaatagactacaaggggaaggattatgtatgtatgtatgtaagtatgtatatatgtatttgttgtaattattttacatcacctttcctcattcaggtgtcttcaaaaacaaacatatttaaaagattttacttctcatctccaggaagaaccagctaggagtaggtacttgaataaattataaagatttctgaaatcttagtaagattctctctgcaggtccacaatcccttgtcttcaattctgaatacaaaaagctctgaaaacccaaaacttactggacataaggccatttatagtctttggccacttcttatgaatatttgtactttgtaatgcagaaatattattgttttgcttatgggctgctgtccctggaccttgcatcagtatatatgacatatgtactgtattacttttctaaaagctgtaaaattctgaatctgaaatacatctgactgtaagcatttcagattagggattatggaccytttttgtataataataataataatagacatattgcctgtcaaggggaaatctgtccccttactggaatctcaccatgtgaatcttggagtcacatagcactgtacttggaaagggctttagagatcattgccagcctctttcactgtacaaatgaaataatgacgtgccttgctttaaggcamgaaatccttagccagctttgattccagagtcattgttggttttcccatcatgggtgtggggaggagaaacaagaactaattccaggatgttgccctcccattttgatgccatttctctctcatttttttctttccttagcttccctaggtagttagcttttatcagaaggaacccctgtgctgtctccaaaaggcagtacctgggggctggagcataagaagggaaagatgaggaatattactggctgagttgtggatgcctaggactcttctcatatcgaaatcatggtgttctgaggatggggcctccatctaaatatgggagcatataacagccgttaagaatgagcctaacaggtcatttcctctttggtcagtttcccacttgacaaaggaagggtaagatttacattcccaaatgctccagagtccttctggtgagcgaattattattatttttcttttcagattttggggaagggatttgaggagggaagaaaggagatggggtaagagtgtttctaagtctgaaactctctctgtcctgagctgttcccgtggttactcaaggacaaggggagacagttttgcccacagctccagagacacagataacaaaggaatgaccttcatttttcttcaggttggaccctgtaggggtctgtgagcagcttctcctggaactttgtttggattctgtgtccatatttataatttatttgaaacacgctggatagtgttctcatttgggggctgaagttcagctagggaaagcagtgaggtggcatgggtgcaggaggagggggtaaggagagatacgagatacacctgccaacgactcgtagcccagaactctctctagagaagagaagcccctcctcctcaagaggctgtcttgttctcagtcagaagaaccttgatttaggagatggcctctcttttcctggccattctaagaggaaaggccattttaccccattacctccagagggttgggctaggccaaggacctcataggactcatgtccccttcagccatggctagcattgctgctttgccttctggggcctgaggtagaaaaaagtgtggtttcttcagctgctgcaggaggccaagcagggcatttgtcctttgccccagtaaattaagcctgccagggtgcctacctaggaactttcctggacatgaatttcctccactgttatggtcatgagtctctttctaatgggattacagatcaggggtggggagacagtgttacctgttgttttctggtgcttgttattatatatttgaataaacagtgctgtgagtatttgccgtgaaggagctaaaaatttttttttaaaaaagaatgagcctaataaatctcatctgttacagggtctgagagatacgtcagggtgagagagacagagacaggtaaatagacattgacagttgtggttcccacaytttttcatccttggcttattcatccctagggtgcaaatagctatgggcaacttggcctcggccataaggaagatgtgctgttgccccagcaactgaatgacttctgtaaacccaggagtgtcaggaggatcacaggaggagggggccactctgcagttgtcacagstaatttccttcaaaagtagatagtcactcattttcttatttagacgttttcccctggatatgatattgccatctttcagccttttgtattttgcagaggaaaataatgtatttttgtgaaacatttttgtgaaagagccaaattaccatcagaagatcctagattttcagggctagaaggacttcagagatcttctaggccacccctttcccccaccccctccattatacaaatgaaactcagaaaggaacactgattgcttaacatcacaaggcaaagtagtggcagagttacaatgtatattttacaccataggaattagaagtctttgtaattagattggatattccttgagagcaaaaactgtgtgttccccttaatcttcccttactgtatctaggatagcacttaacaagtagtacaagtgctacaatgttgtaaaggggggcatattgcatctggttgagaacatgagctctggaatcaaatctctgggttcagatcctggttctgtgacttattatctatgtggccttgggcaaatagccacagtttctgaatctgttacatgaggataataatggtgggtgaagagaaccagtgagttagcagggctccattccgactgtcatgggtcgttggtgcttttccctttatggacctcttcctttgtaaagaaaaaaattatattttacaactgtgttggtataaagatggatattaatagaatccactccagatttagtgttatrtatgcattgttactatattatctttttctcatttaaaaataactaaaaattaagccactctgtgggcctctgaaagcattgtgggccctagacactgtgcctaaaggataagtccgctctgcacaaaaagctcttaaaacagtacctggcacgttctcaatgttgaataaatgttgttggctttttgttccagtagatgctcagtttggtgattgattgaccactgcgccaagacttgaagtttctctgtaggtattagtttgaggcccttggccttgtgttgtttggctccagaatacatgaacatacacagcttattaacttggatggcaaaaaaagttattggtctgagagtccaaataattagtgaaatctttttgttcattttgcagttgtgttttttcctgtgcacgctatcactgatgcctttatattttgcagatggaggagacctctttgtttgtggcctgaacaaagatgggcaactggggcttggtcacacagaggatatcccatattttaccccctgcaaatccctctttggctgtcccatccaacrggtggcctgtggctgggattttacgattatgctcacaggtgagttcactcctaggtagatttttgtcaccacaaaggctttgggtgagaacagtatgatgatggtgactgcagattaaatgaaagcctctttgtgtttaaaaagcacacataaggcctggtgcggtggctcacaattgtaattccagcactttgggaggccaaggcaggtgtatcacttgaggtcaggagttcgagaccaccctggccaacatggtaaaaccccgtctctactaaaaatacaaaaattagccaggcgtggtaccccaygcctatagtcccagctactctgtagtcccagctatttgggaggccgaggcaggcgaatcacttgatcctgggaggtggaggttgcagtgaactgagattgcgccactgcaccccagcctgagcaacagagcaataatccatctcagaataaataaaaataaataaaaagcacacacaaattttccctctggttgtcaaggaaagttgtggactaccttttctaaggagagtttaacggtaaaggagactgggattggggtggaaaacttttgtcagagagtagggaatagactagatcacctttggtggccacttcctgtcccaaaagttcatgatagctgtgtgcttggggtagctggccagtggccagcagtggcagcagagggttacttacagggaatgtggtaggagaatatgaggcaatagtggttgccaaagcagtgatggcagctttttcacactgtgggatttttttttttytaaatgtgttaggcagatctgtttggtctttgtgaagccaggtagcaggataggatatggccagagggttattagagtaatgcacttgggaacagccagcagtagttaccttgtcagctgacgtctgttcccttgaagcagttttgacctctctgttcagctttgctctgtctagctggccattctggatttaaaggaccatctgtggtttctgaccaggctccctctttgccacggtcctttggcaagggcatcttctgtcactctcctgtcataaacccttgtggattctcccagacatagctcagattcctagctttttagcgttggccttctgtaactgttccctagctatctttgtgctgtgtctcttattctccacactcctcatacttttctttctggtcataccaagcagtatatgttcttctgtctgtctggaccagcccctcttgtctatctgatggactcgaatcccagctttaaaaccctgctcaagtgtcaccatcctcctctgtggaggggttctgtaatatgtgttgaatttgatggtgattattagaatctaaacaataactatcatttataaggtgtttattgtgagcctatgttttggattgtaaggagtcagtagataatgctctttcctgctcacatttggagccagttgtgagaaaagcacagagaagtcagtattggagattaaaaactattggcttttcactggtaaaggctaaattggaggacagtattaattatgaggccagtggtcctaatattcttctggtccaaacttacccccaaatctctaggctttccccacagggaaatgcttcctatgtgtcagcctagaatgactgasagggaggtgccaagccacacatgtcctgtcccatctcctaaactcaccagttggttacatgaccrctgtcccctagaaagcagtgaggatggggaagggcagggagaaaagctggagtgttgttttactaatggaaattttgtcacatggaaacatgaaaaatgaaaaattactatcctcccatcccaatacgaggcactgagttaagtgttctacacagataatctgttattaatgagagaatagaatagacaatctgtgtagagtgcttaacctggtgcccagtgttttcattcctagaggaataaaagcagggaatatggtctgaatgcactgaagcacttcccctcatcccctttgcatctctcaccctgcagcatttacccattggtcacagacatcttacttcatagatttgcaatttaagtatttgtattttgcagaaaatggtcaagttctatcatgtggatccaactcctttggccagttaggagttcctcatggacctcgaagatgtgtggttccccaggccattgaggtgaggacagttaatatttagcttgcccatgacctgttaaagtgtttccaaggtattaacctatctctccccagaataaaaggctgtcaggatccctgagaacccatggagtaggagaatttgagttgaaaaataggtccttctgggaaaaattaagttgggaggtaaacgttgtgaatgaaaacctctgttagttttcatacacttcatatgaagttttgtgaaataaaacaataagagtaatacatctcataaggatattgatgacattttacagttctaaaattagtaataatggaaattatgttagaaataggtccagatagaagtgatttgtcgaaagacactaagctaggcaaatggtataggccagtgctagccagtagaaatataatgtgagccatatgtaatttaaaattttctagtagccctatttaaaaaagaaacaggtgaaagtaatttttaaaataacagcattattgagctgtaattcacataccataaaattaacccctttaaaatgtatatccacagagatgagcaaccaatatcattatcttattttagaacattttcattaccaccaaaagaaactatgtacttaatagcagtcaattcctattctcccttcccctcagcccctggtgagtactaatctactttttgtctctatagatttgcctgttatttcagcatgtcatcagtataaagttattttttgtttttatttttatttttgagatggagtctcactctgttgcccaggctggagtgcagtggcgcgatcccggctcactgcaacctccgcctcccaggttcaagcagttccctgcctcggcctcccgagtagctgggattacaggtgcctggcaccattcccagctaattcagtataaaaattaytaacaaggtattttatactgattttgtactaagtctttgaactctggtatgcattttttacttacaatatgtctcagtttagtgtaatcacatttcaagttttcaagagctatgtgtwggtagtggctaccatattggacaaaacaagtgttaaacaggactcttggctctagttcagagctctttacttcagtgcatcatacttaaaatcacccctttttgtgaagtttatattgtaagtgatcataataggaatatagaatttttaaagaaatatgcttgaatcaaaaatgagttttaccacctaagctgtcccactccgatctaatttccctaaactctgattaatagtgggagatgttttttccctagagaaagcttgggtctgcccctgccagcttgctgaactcagttgttggtctgtggactgttatttcgggtcatggttcccatggtatgcacaaagtckaggctctgtagtccctgaaggaagtattatagctcccaattgcaaatagatggccttgtaagcacctacatataagttataattaatttagcttaattatactttatataattaaggaatagaggaacaatggttaaaatatgttggttgacagaatcagagagtaaaaacattttgacaggtgacattctatgcaacaataggagcaatgtgccaaagagaaatttaatagaaattcattcatttatttaatgacaaccattatgtgtaggtactatgtttaggcagtgggagcaaagttgaataagacctgtcctagcagttgagagttttatagtttggtaggacatgataggcacataaatacttaaaygtaataccatgtcagaactatgacagatgcatgtatatccccaaaggagggagttttgagcatctgggggaaggtggggtgagaagaggcttaagctaggtctcaaaagttaaatagaggtttmcccgtcttgggataggaggatgctcagagtgggtgcaaaagaagaacattctaggcagaaggaaccatgtaagcaaaggtgcaacggaatgaaacaggagagtttgggatatcgtaagtagtttagtatggttggaatataaggaagaggtkgaagttccagggtagagtgggtgggaatggggcaatcagggtggttgtatgtgacacatggtaagaacaacatggtagggaggtcagataggaagatggattgaaggaaggttactgaggaaactcttgctaacaatccaaatgaaacaattgtggctcaaactaaagcagcaacagttgggatggagagtaagaggtggaggtgagtggtgttaaagagactgaagtcacatgtaaagcccttcagttagttttttggggaaaaacaaaagaaaaatataaaggacaatatgttcaaattgtattaacgctaagatttgatcttctcgtaagctaatgtgattgtggactccattgacagaagtatagtttccagaagaaggaaggccaaagctcagccctttctgctgttcagcctgcatctgggatgttgtgttttgttgtggatttggtgcttaggccctgggcataaaggtatataagactcaggtcctgcccttgagggtcctaaagtttagaaagacactgtggacctgtaaataaacaaatgtgrtaagccttaatggggttatgattatgctatagagttcctttaaaagagaaagattgaacaactagagcatatttagagaagtgaagaccaggaggggaagggaatttgaaatccagtgatggctgatgaatgggggatatttgctttgaagaaaagatcttcattagttatctattgctgtgtaacaaattactgcaaaccttagcagcttaaaacagcaaacatttattatgtcacagtttcggagagtcaggaatttaggaacagcttagctggtctctcatgaagttacagttgagatgttagctgggtctgcttgcaatctccgtggacctgtaaataaacaaatgtggtaaagccctaatggtttcatgttccttgccatgtggacctttctattggacttttcagacatagcatctggtttcccccaggagtgatgagagagagagggagagatgctmagcaggaagccttagtgccttttttcgcctagactctgagtcactcattgctgctttattctctttattaaaagcatgtcactaagtccagcccacacaaggggaggggtattaagctccacatcttgaagggaggagtagcaagaatttgaggacctatttttaaaaccactacaagatgtcttagagaggacatgacaactgtcttcaaatatttggaaagcattgtcagaagctgcaggcagataggtttggttccacctaaagagataaatggaactgtgcaaaaatggaacaggcacctggggaaatggcgatccctatgtcactgggggtaggtgtttggcaggagttggatgaccacttggtggggtgttgttggatggagattggactagatcatgttgggaaactttgagcccttggtaaataaagtcttactggcacacagtcatgctcattcatttatgtatagtctagagctgcttttatgttacaatggcacagctgagtagtgtgacagaaactgtggcctgtaaaacatttactaactgtccctttacagaaaacatttactaactcttggactagatgaccttagaagtgcctcccagccctgagagttgttgtcatatggtattgtgatatggtattttaaaagatatatttttttcttttagggataaatgtagaggtattaatgggtggaaatattggggggagtggttgctttaaaccagtcagacccataatgaggaccgtactgcattgtatttggtataaattacataaaattttgtagatggatggttctgagatctaaatccttttctttattttgacagctccataaagagaaggttgtttgtattgctgctggactgaggcatgcagtagctgctacaggtgatcatcttatctttatttttttatttttatttttaatactttttagagatggggtctcactctgttgcccaggctggagtgcagtggctcgatcatagcttgctgtagccttgaactcctgagcccaagctgtctaactgcctcagcctcctgagtagctagaactataggtgcatgccaccatgccctgctaatttttaagattttttgtagagacagggtctcgctatgttgcccaggctggtcttraatttctggcctcaagcaatcctcccgccttggccttccaaagtactgggattacaagtgtgagccactgtgcccagcctgccctccgccttttaaaataggtctgtaataagaggaaacttaactttaggagaaaaaccatttaggaaatatttcaaagggtcctgctgcattgtggttctgatgaaaaggagagaacataaggcagaagtcatgtaggaaagacattagcaggtagagaggaaggaaatgaagttttctagctctttgtgttctaggtatgatgctaggtgctatttatttgattactttatttaatcctcacaaccaggaagtgatgcgagttacattttacatgtgaagaaactgaggcacagagttaaagtgcttgtgtaagcttatacagggagtaacgtagagcttggatcagagcctgggatggtttggatcctaaggctcatattttttgcagggarctgcacagccttcctaatggattttattgtttattaatttaaaagctttaagtgagcttgtctcctgtactgtgagtgggtgatgggactgacagtctgtgtgtgagggggacagggaggtggcgtgtgggagaatggtgacccttttatctctccccttttcattttttctgctcttactccttttgaactgaaggacagcactaattggctgtggcagctgaggctcaggtgcttcgtgagtccacttgtggagtggaggaaggagagaggaggtgaggaagagctcaatgcaggactgtgctgatagtcctgggcttagcattgattatacttcaaaaaaaattcaactttttattttgagataattgcagatgcacatgcagctgcaaaaataaaacagaccctgtgtgttctctcccggtttcccctaatggtatcttgcaaaactatagtacaataacataatgaggatattaacattgatacagtcaagatatagaacagttccattaccacaggaatcctycctgttgcctttctatagccacacccatttctacctgcctataaccacttcttagccctaggctaagcactcttctgttctccatctctatgatgttgtcatttcaaaaatgttctataaatggtatcatacagtatataaccttttgaggttggcttttttcattcaacataattccgtagacattcatccaagttgtgtatatcagtaattcattccttttcattgctgagtagtatttgatggtatggatgtaccacagtactaatctgttagggctgccgtaacaaaataccacaaactaggaggctgaaagaacagacatttattttctcaccattctggaggctaaaagtattaagattattgtgttgtcaggattggtttctcgtgagttttttttttttttcctggcctgtaggtgaccaccttcttgctcggttcttgcatggccttttttgggtgtgcctgtggagagggagagatttctgatgtctcttcctttttataaggacaccagtcctattagattaagaccctacacatatgaccccctttaacttttattgcattccatagcccctatctgcaaatctagttacagtgggcattagggtttcaacaatttcaacatctgaattttagggggatacagttcttcccatgactgtatataaatacacacatacacatacacacacacacacacacacatataaacatatatatatataacacacacactcacacatgcatatatatatatatatatatatatatatatatatatatatgtatgtatgtatgtatttttaagatagggtccccccctgttgtccaggctggggtacagtggtgtgttcatggttcactgcgacctcaaacttctgggctcaagcgatcctctaggttctgccttccaagtagctgggactacagatatgtgccaccacactcagctaattttwaaatttttattcttgtagagatggggtcttggtatgttgcccaggcttgtcttgaactctcagcctctgacagtcttcctgccttctcctcccaaagtgttgggattacaggtgtgagcctctgtgcccagcctgartgaggtctacatattgtaattagttgatatgtatcacaagtctttctttctttttttaaaaaattatttttttcttaattttatcatggtaaaatatacgtagtttacagtttattatcttaaccatttttaagtgtataagtacattcatatcattatgcaatcaccaccaccatccatctccagaacattttgtcttgcaaaattgaaactctatacccattaaacaataactccccattccccattccactggcccatggcaatcactattctactttctgtatctatacttttgactactgtaagtctctcatctaagtggaatcatacagtatttgtcttttttgtgactggcgtatatttcacttagcatgatgtcctcaaggttcatccatggagtaggatatatcggcgtttagatactttttaaagtggataatatccattgtatggatatatcacgttttgcttaccattcatctgtcaatggacatttgagttgcttccatgttttagctattgtgaataatgctgctatgaacatgggtgtacaaatatctcttcaagatcctgctttcaattcttttggatgtgtacccagaagtgaaattattagttcatatggtaattctatttttaattttctgaggaactaccatactatttgccacagaggttgtaccattttgtttccaccaggagtgcacgaggttccaatttttccaaaaactcaccaacacttgttattttctggtttttaaaaatagtagcatcaaaatgtgtatgaggtgatayctgttttcatttccctgatggttagcaatgttagcatcttttcatgtttttactggacacttgtatatcttcttggagaaatgtctattcaaatcctttgcactgcaccctcctccctcgctttttttgttgagacagtgtctcattctgttgcccaggctagagtgcagtggcgtgatcttggctcactgcagcctccaccacccaggcgcaagtgatcttcccacctcaggcagctgggactgcaggtgtacaccaccatgcttggctaatttttaaattttttgtagaaatgagatctcactatattgcccaggcttttctcaaactctgggctcaagcaatcctcccatgtcagcctcccaaaatgctgggattacatctttgcccattttttaactgagttgtttcttttggttgttgagtttttggagttctttatatattctggatattcatctcctgtcagctatctgaagtctcttataaagtttttcctctttttttttttcctctcgaagtcaatttgttgaagagattgtaagtttttatttcaacactgtgctttgctcacattgtgctcagtggtcatagcttatttttcacaaaacaggcttgtctgtttatagccttaaaaaggactgctgtttataggatactcccaaaggagcagaaccttaatgttgctgttgggtgatggatcctagtttcacacacctgagtgtagatcaaatatctagaatttcatatttgcatttgtatgaggttcagaacataggtacatgaattagattcagtgggcatgaaagtaaaaggccattccgctgaaatcatggctattaagaagctatcttgcagtcataaatatgtatttacttggcaattaggaatctttgaattcatcttggtgtcgtggaaagggcactacattaggtgttaggaaagctgagtcctggcattttctctgctgttaccttcctgcctgaggagacaaatcgcatcctctcttcagggcctcagttttctcatctactgaatgtgaggaatggatttgatgatcttcaaggttcttttctgctttgtctgggatctgagttgtcttttcaggttaatcatgaataaggtgtcattccactgatttgactctgaaggagtgtcctggaactttttgtaggaagttatgtgatattggaatttgctttgatggtcttagtctgtcctgaagactggatttgtgattggcktggtggtaatccctgggccagttacaggacctcttraagcaattgagcttctccataacactcatattaactgagaaagaattgggaatttctcatagcagtgaggttcaaagrgcaatctagtcttatcctgatgtgcatcttctctgctttctcttccattctgttgggaagcgagtggcatcgtgttccagtgggggactggtttggcatcatgtggacgacggttgtgccctgggcagactcttccattgtttttcacagcaaaggaaccaagcagagtgacaggtaagatgcttctttctttagtyctatatttgttctttgtcaggaagtagagacataaacatgcagaagaggattaaatggatttttgattttgctatttcttggtctctctaactttctctattagttggtctgttagtcttgctggcattgtttgttggcccagtagaagcaaccctctttgctgccagagtttggaaccgattgaggcatagatgcaagtcaggtaggtggagattgaaatggtaactctagaactgttaaaagctaggttggaaracatgattagaggctcactatgactatatattgtcttcaaacccctaattctgaaactcagattgaatttacccaccaagcaccggggtacttgtatagagttggccctactaaacttaacgcctgaccaagaggacatgaggatgtaccctctcttcaggcaggcacaccccaaagagggaacccaggargaccatgccttgcatggccagttccttctcccaaaaaggaagcaggagtgagtgaggatgtagacagaggggccaggagtgttcccacagggaaatctctctacgcgaaaatacgaggagtaggtaatatgtgttctgcccaaaggtctgttggtcatttggtctgtattttctccttccttttcttccccccacccttcttcccctgtctctctctctctttctttctctctctctgctctccttgtgggcctttctccctctgtatacagcaccatgtctccatttcctcctcttctcccttttctgctttctcactcttctactttgtgaccgagtttacccaggcttggctgtaggaaaaacttgtataggagacttgtaactacttcttctgttgcctggaayaaatcagggatttttgaggatggtgggaaggggtgggggaagaataggaaagggtgggttgcagtgggagtgatgtaattgggtgttgagatcattctaatttttctaagtcctggaggtgttctctttcagctaggggtgggcttagcttccctgaaacccatgggttgagctggggaaggtcctcttagaaaggagaaggagcattggatgtgggacaggtagtccacttcacatgacattagaaacatgtataatgtaaacttggacttctcaaacatttttgtcttcttcatcaaggtattcacttctccccaggcatatcctgccttytcatttctctgtgcttatgggaaaactgttacctctgcccgaaatgccttttcctttgtgttccctctgggaaaaattctaagaattttttttttttttttttttttttttgagacagagtctcactctgtcgcccaggctggagtgcagtggcgcgatctcagctcactgctaggtccgcctcccgggttcacgccatcctcctgcctcagcctcccgagtagctgggactactggcgcctgccaccacgcctggctaatttttttgtatttttagtagagacagggttttcaccgtgttaaccaggatggtctcgatctcctgacctcgtcatccacccgtctcggcctcccaaagtgctagacctagctcaratacacctttctcagtaaagaccttttcttttctagtgttcactgcattaacttcacatgcatggatagcacagtatactgttattatgaattgtctgtatgttttctcatatgctgaagattatgaacttttaaagggtggaagcggtgtgtcattttgctctatattttagcacaggacctgttattagagggaaaaaatgttttttattttatttcatttaaacaacctgtttggcatctgtttgggtggggcacagcttacattcagagttggttttgggggagttccctgatgagacattagaatggatcatcagcttccagtcctcaaagtctttcacttttcgtcctcccgttctcacctcattgccaaaagttctggagctggaacccgggctgtyccctcctcacctggccattaggggcccagtacttcctctctggtgaacatgggtgaaaacatctgctttgtcctgttatcattccagaggacacttgaaggtgtgagggccattttattacaacagttattaattaaaaagaagtgtcagaaaaaaaagttacagaataagtctgcgtctatctgcatgctagactgcatgtcatcacaggctagctccacttttagcagtgtaattaaggaaggaaaagtgctgaatttggagaaagaagcccagttcagaatctggttctgattgtgtattcttaggaggcttggggttatttaagtgcctgcgtttgataacagctgagtgtatgagatgtcattgctctagacccactcaactgctggagttaggaaatagacacacagacacacacacatgcacacacatttttacatacacacacctatgtctatttatctgtctctactagaaatcatgaatttacactgatttttccaattactatccaatattacacggttgattatagcctttccccttttcatatctatacctttcctcccctctttgatagtgatgaatctggctcctttatcctgaatgtatttacttgattgttcaatctcctggcatgttaccaggctccctacaatgccagccatcttcttggccagtgctgctgactcaggcctgcctgcactggctgagtctctcccacgcccaggtggtactggctgagtgccccctctctgcccagtttgttctgttataaatgtaattcasaaraacattttttcttttgtaggtctagagaattctaaagcaatgtgtgttcttgctggctcagaccactcagcttcattaacaggtaggtaccagctctttcayggtttaacatgccattcaggattctgtatgtgactgcctgaagtggtgatattgaaatacagagggaatgtcatagactttggagctagaattctgatgctaccactggtatgctcttaggcaaattacttttcctttctgagaccatcttcttgtctgtaaaagactttgtgggcagttacgagaattaaatataatacatataaatcatgaatagcagacataggctcacttccatttcgtctgagtttgctttcttaactatacaataaggataataatgtcttcctctcagggtaatggtggttgtcaaatcatgtaatcaacagtaaatttatatataacatatatggataacacagtgtaatataattatgaattctttgtagttttctgatatacctacgattatgagggtagaagctgctctcttatccatctaatctattttggtgtgtattgtaactgtctaagctctctacctgtgtatactctctagttgtctaatctcaaagtaacctgttttatccatctatatctttctaatccatttatcagtctccatttrtgtatctatctactctgtttacctawgtatctatttatctttaatctttgtaatatctaatctgtgtgtctatatatctaactctagatatrtagttttgtaaatattttatattgttatatgtttctctaatttatctacttcatctctttgatctatctgtttttctgtcttaactgtttttttatcctacactatatctctctctttggctgcgcattcatccttccatttgaaacaccgagccaatacagtataaactgtctagtgacttttccttccaaggcaatgcagcattttcttgaaagtgacagtaatcccttctctttggcccacattgccctgacccctgctggtagactggagactatacatctgagagatttataatattttgtttggtaagacctctcacagagttgaatgtattctattttttaagcaaagaggagggacttccgtacttagtgttttatgtggaaattcaggtgtgcccataatatatgtaaattaatggtggtatgcattcttcgacatcaaatttgcaatgcagcccagctgagaagttgttatttcaagagcacgggagccataatatgaaagtttaaatgctttgcaaattctgagctgcagataatttgtcatttaatgaatttaaaacaaacatctaataaaaaagcacctacttttaacttgtgtctcacattaggtagatttatatattaatatttgttaaaagtgttgagttgaaatgaatgccaactataagggactccagtgggtatccagttcctcccttccttttacagaagaaggactagagaccttagggtgagaagtgatgtgttcgtgccccacagtcaatgagggatggagaaggcattcttttctgagaataaaagtagactacgaggtgtttctgttttgttctaattaatttgaaatgactgatggtatgtaaacctagagcttgtctaattgtttgccaacttcaacttcttaaaaattcttgttggtagtaaatttgttatttcatatgtagggcacttttattatggtgttatttatatataaatgttgaatattttaattaagatgtattttaaatataagaaattaaatttcttttaaagtatacaaagaayttaagtttcatttaaagtatacaatttagtaatttttaatatattcacaaagtgaaatggtttttgatattttgaaaatgagctaaagattatggagattaatagccctgctggacactgtggctcacacctgtaatcccagcactttggaggctgaggcagatggaatacttgaggtcaggagttcaagaccagcctggccactggtctactaaaaaatggagtttttttgtagaaaccccatttctaccaaaaaattcaaaattagctgggtgtggtggcacgtgcctgtaatcccagctacttgggaggctgaggcaggagaattgcatgaacccgggtgacggaggttgcagtgagccgagatcacaccactgtactccagcctgggtgacagagcaagactcygtctcaaaaaaaaaaaagattaatagccctctctttcttcatctagttcaagctgttacacattggattttgttcaatgctctttagacactttctctggagtggttgtagattatataactatttggcattgcagcagaatttaattttacctgctgaggcaacagcataatgatcctcatctggaagacagtttgactttcaaaaagatggtttagagctactaagataagtgaagttgtttacacaggcttcatcgtcagtggcatctttgtagctcagcagtccacttaatggattgatactttgctgagggggcttctttgctatcttgtaagagatcttcatactttgcacaccctgatgaagtccaggaggttgacctctctctgggaatggaatacaccaaattcacttcatagaactgcagaatgtcaatgttgcagggtcaccccagtgacaaaaaggtttcactgatttatactccctcattttggagttgaggaaacagacctagaatgtgaagtgatgtgcccagtgtcaaacagtgatcgggtaacagatggaacttgaactggagacttctgaaccttagtctgaagccccttaatgatactgtttgactttctgtcagttttttggaatatactagactgccctagggcaagcaatactatcaagttttattgggaagctacaaaatgcagtgaaagcagaagacctggcttctagtccctatttgactccttattagccatgtgatcctgaaaagkaatttaatatcttccagccttgattaatttatcttctagaacagtgctaatagaaatataatatgagccatagttcaaaaagtaaaaagaaacaggtgggattaattttaataatayatctacttaacccagtatatccaaaatattatttcaacatgtaacccatatcaaattataaggagccacactcttttttgcactaagtctttgcagtccattgtgtgagagagtagcatttcacttacaatgtatctcagtttgggctagccacatttcaagtgtttaatagccacatgtaggtggtgaactactgtattgggtagtacagctgtagatccttagattataagggttggaaaagctgaggagtcacaaattgacaagccataggctaaattattgcccatggcctcattttgtatggctttcatttacaaaatatttttgaatgtgaatgccttttagataggcacgtactctctggcttgccacagtcacctgccagtcattcttgttaccagtgtcatcagtcatattgtctgcccttctagaccaacagccttcccttccaattttcagctggtgaaactaagtcttagagaggaagtgatttgtccaaggtcaatagctagttagcagatccaggaatagaagccagagtcacttgactctgaatttgttctctttctgttaaatcacaatgtcagtcagtcactttcctgcttatatcacaggattattgtgaggttaaaacaaactgaagtgctatccagatgcgattctatagcattatattttctgctggacagggcatgcagtgaaataatcttatgtttaaaaaatttaagcttaaataatgtatcttttaacctgttattttgaaaatttaaagcatttttttcatacaaaaggtataggcatatattttaaaaacgtagaaaatagagaaatgtgtctcatacacatggtagatgttgcataaatatttgttgaatgaaaaagtgaagagaaaaccacacatttttatttcttaagctactaagaacatttggccttgttttttatgtatagaatttttgaaaatcttgtaataagttattatggtgtacacaaattttgtaacctgcttggctccactcaaccttgtagtctaagtataaaacaacttcttttaaccacttattttttagacttctgttattttccatcattttggactaatgttccctcacctcttttgttacccttctgtttgtttaagatgcaggagaggtgtatgtttggggaagcaacaagcatgggcaactggctaatgaggctgctttccttcctgtgccccagaaaatagaagcacattgtttccagaatgaaaaggtcactgccatctggagtggatggacacacctggttgctcagacaggtgagayagtagcagagaacttacggttggtaagagcagctgggggacagctgtctaagcagccatgagtgcttggggttaagcctttttactgatgaaagcttaaagatcagagatggggatactgggatctagttctgccaccagccagatatgtggcttttcctctcagagtcacaggtttgtacccaaaarggcaagcctgggttaagttaactccttccggtcctaagagcccatgaggttttgagaagggatccattgcagcaagcrtcatccagaaatttgtccagcttgttgggaagttcttactttgtcatagctatttgcatgtctaagtctaaattaaaagcatcagaaaatgttaagtgaaagataaatatctaaagattgaggtaggaacattattttgattcatagctrgcatggaattctgatttaaacttttgttgacctaataaactatgtgtattggttcagacatctcatatattccctcagatgttaccacatcatgccatacagcttttggcatcttcatcttttcttgaatcttcgtttatttctcatctttcccttagggcagttctactttcctggccttcatattgttractttgtcctcagattttgttttttcatggcctctattcatccctgccttcctgcctgttgatttcacagagttccccagccaatttgaaattcccaagatctgttatcatgtcaaagtattctgagcttcaggggttctcaggagttcccttgcctactcctgtcctgcttgctagctacacacacatctctagactcccaaatatctagtgactcttatttcagaagtttctggcttttgcaggttttcaggtcagcttcagctatccttggtaagwcacatatactacgcatttctatacacaaatgtagacttatgagcagtcatacctatgatgcttttaattggtcttttaaaacatttcatgatcattttgcaatagaggcctgtataacaaaggtgtataataaactttccatattaccgctttagaggatgctctaagcaaagtgtgtcattcattaggaggaaggtcgtcactttcctcaaagagattcagattgcttgaagattgggcttatctacagaaccttttcctaaagagactcactgagcatagtagctgggttttgtatgtttgtaattgttgatatctctcttttgtttcagataatgagctctgtgaaggaagccaccagattagtcttgctcacttctgtatctccaatgcctatcaaagaatttactcattttcctgcatcaaactctttatagttaaaagagactacacatacacaaatgcatacaaggcagggtagatagctaggatttctgacctctttcctgggacttagatgttcatgaacagaaagcttctttgtctctttggattctggtgtccaaccaaataggttaatgtttattaggcacctattgagcaatgtgttaagccttggggaaatggaggagaaaagacataggccatatcttcccactagaatatgtagataggtgtaagcctaagaatatagagatggaaaactttatcatccatgcatcatacaaatagtgagggtctttttatgtaccatgccttgtactagatgtaaatcttgcccttaaggagtccactgtccactaggggtgatagacctgtgataaaattttactacattccagtatgagatgtgcaacaatacagctaagtacaargggcaaaagtcgcatagaaattagcagtagtcttgagtgattgggtgttcacaggtaggcatttcatggttagtcagtcttccaagaattgcagtacattaaaatacacttactaccaaatggtggtgaatttggttgtctgtcagtaaaccctttaactagtcaggtagttgactaatgaaagacataaagatgttgcttctttgattttagctttgaagcattctagctgatgcgattcccacatctgggccagcagcccagcccttggggtgggaggttggaacccatgtctctgacactgtctgagtcaccccagctgctctggagctcagcgtcaggtttctgcctcctttcaagagcatgattttttggtaacgtttcagctatttacttagcttgttaattcagattgcttgtttttgtacattgccactttctcctttatcctaaggccagaatggttaaacctgggatgtttgaatgtcctggtttttgtactgaattttgggtaaatgggagtttcckgttayatgattcaccaattttgtgttccttctagcagcagtggaggcccgtgctctggcccagtgtcgttgagaagaaacacccagggcttctatttaatcagactcagcactcacattaatgggaataagatttcctcacagggtcaggagcagctcattagtggaacaaggagttatttgactgtagttgttttcacaagctccggtggtgaattgttcctggaatgaacttgcaggccacatcagcacagaggctgctctcagtstcattctgggaggcattagttgtgtgatattgattaaaaaagagtttatgcacagacactattggcgtctaatgggtagaggccagggatgctgctgaacatcctacaatgcaagggcmgtctcctataacaaagaagtatctagcttcaaatgttaatagtgtcaagattgagaaacactgctcaatactggacatccccagtggtaggtgcttagctaaggcagttcacatggtatcagaataactttatagattgtctgtatgggaatctgggatgtgttctctgccctcccctctcaggagtctgtctgatgcctgcctgcagtgtttgtgatggaaaaatacttttctctgttagtcagaggcacttggaaagagtccaagagaacctgttctaatctgggagagttggcaagggtacctgtgtctcaggctcatggtgctgcattctagaaacctttcccaagctgcttaatgttcccgatcattgttctcaggaacttcatgggactcctgggtgactttatccaggctcagtgacctgcaggtgtctcatctgagattcatggtttcctggctggaggtgcttttaatgagagttggatggcagatctgggtgccttcctagtttgttgaccttgattaagtcactttacctgtttaggcctcagtttcctcaactctgaagtctggtattaaaacctgcctgcattctacatagggctgctatgatgttcaartgaacgaatctgtgaaagatcccaactattgtaaaatgcatacataagtgatggctgcctggggtatgtaagtaaattaaagacttagtagttgcttttagaaagacttctgtttccacagggataatgccaccttgagactactagcctgaaagctcatgagctggccagggatgccatactcaatatcaaactctgacagcaaagttttctaaagtcttttacttgcatgcagtaggcaagtggctctttcatattatcaacaacttggaagattttcgtggcctaatttgtaatattacctattaaaattcaggatactcatcccaatttgtaattgtgtacatctctttgtattcttatttgtttaatgtctagactgtaaattacatgagagcagtgtctgttttgttcatggccatatccccagcatctggcacaggcctgatacataacagatgatcagtaactaagtgctgaatgaataagtaaatggcaaggtagagaaaaacctgggctttgaagtcagatagaccaaggcttgaatcttagctctcttaacctactgattgtgtgactgtgggcagctccacctctctctgtctccattgtcaccaccctagttcagcccactgtcacctcttaactaaatcctgcagtagcctttaactggtgttctggtcttcccatatttactccttgatatagtttggatgtgtgtccccacccaaatctcatgttgaaatgtaatccccagtgttggaggtggggcctgatgggaggtgattggatcattggggtacatttctcatgaatggtttagtaccattcttcttggtactgtccttgccattgtgagtgagttctcatgagatctggttgtttaaaagtgtgtaccatttccctcttgctgccttgcgcctgctcttgtcagatgatgtccaagctcccgcttcctcttccaccatgattgtacgcttccagaggcctccccagaagctaatgctcgaactatgcttcctgtacagcctacagaaccataagccaattaaacctcttctctttatcaattacctagtcttaagtattctttataggagtgtgagaatgactaatatcctccctctcccctccaacccattcttcatacctcagttgaaagatctcttcaaacccattgtgttacattcatatggcttcccattgctcttatgatgaaaatataatccttagtggttctacaggtcctatgtaatctgatgtctgctgacctttccagtcccatttctcaccatgctagttcttgatccctatccaatctgcactctggcctttgcttggtcccttgaaagcatcattcatttcccaccatagtgcctttgcacctgatattccctctatttggccacttatccatgcacctcttcttcagtttgacttagctaaatcctttttttttttttttaaagtcttaacccttaacttaggtatctgggagaacttctcttgacattgctgactagtcatttctcctttttttttttttctgttctcatagcaccgtaaacctctcttttgtgctcttttttggtagcattctttgactaatttcctttcccactagactgtaagccccatgaaggcaggagccatgcttgcttttgcctacttaagacatgttggacaaatgaaaaaacccaacttctttgaacttatttccttattaggaaagtggggaaataactgctgacctgatatgaggattaaaasagatgatgtattaaagcatccagcacaggactggctcatatgtcttttaaagacacattagctcccactactcttttggaaactcttgagctctctagagatcacatgctccatttcttctctttatatctctgtggggctggatgtgaatgtctctggatgggtgacaagttgattcagaactctcctgaagagtgcagaaagatcagtgcttacaaatgctggttacaagtgctggttgctgacggtgtgttagaatttcaaagggaattatttacacaagatctaaaccttaatgtggagttkgtcagaatgtctagaatccagttgcttttggggtgctggaagctttccctgaatcatgcagtatcccaaagtagccttgtggtcttacaaggaatatggattgaaaaagtgagaacaaatacagggagttctttgacattctttactttcttcagtgttaccttaaagagccaaagagtcttagaagttttagagaatcaatgatggaagaagcaacttcctcactttgcaaatgaaaaaactgaaaccaagcagagagaaagtgactttatggcaactttaagctagaaatctagttctactttccagtgaaattttctcccttccatcggtgtcctcttgatttgtggttatatccttttgattgaggttttttattatttgttttcctaaagaggggaattgtatggtacatatgaaagggactggctgttagctactctttcaagtgtcacagcccaagaaatattttattgcatttgatgtctaagcattagtgaaattcaagcccagccattgattcacactaaactgagtttataaatatacctaatgctgatttttctgttttggggccaagatccttttcagaatagggtgacagtatacattactccatcttctttgggaccatatatcatgaaacttcaaccaagcctggggagattctgacctcatgggctctatttaaagcaggtgctttggaattaatgatgcttgtgctttagaattttgaaaaccccatgagtgaaagtcaaactgagcccaaaggcttgttttgaaatggatactttttkattcttattaaagtcatgagtttttatcctagaatccttagaatgtcagtaatggatggaaacttagagatcatctggccttaattcctcagtttagagatgtgaaaactgaggactaaataggggaggcacagtgagtgaatgaaggagctaggaccagaactcaatcaagtctcatgactctcagtacagtgttctttctgccttgttacattctttccagagatgatgaggaagtgtggacgacttaactagtcaaatccagggacctgaaccaggaatgacagttccttctgtataagaagttctgctttggccaggcatggtggctcacgtctgtaattccaacactttgggaggctgaggcaggtggatctcttgagcccaggagtttgagatcagcctgggcagtatggcaaaactctgtctctacaacaaaatataaaaaaaattatctgggtgtggtggtgcgtgcctgtggtcccagctacttgggaggctggggcaggaggatggcttgagcccaggaggtggaggttgcagtaagctaaggttgcgccactgcagtccagcctgggtgacagagtgaggccctgtctcaaagagaaaaaaaaagaagttctgcttcaagaaaacacttattcttacctgaagagtgcagccatagatttctttaaggatatgtgtgtggagtagaaactgggaaatggttcctgagaagcgagggtcaggaggccattctgggattcacagaagcagctacatgagaatacaacagcaatcataactctcacggaccacctttatyactataaagtactttcacatccatgttctcatatgaagttggcaagatgagtattattatccttacttcacacaagagtccctaattcgttaatggcattgccctgtttcacacagaagggcagagctaaaacttgaatcccatcttttgtccccaagcctgctattctaattccagatcttgtgtttctcagagagctctaactcatcagctaaacttcttttacccttcaaagaaacatctttccccagcttttgacagtgatactacatttcggcaagcaattggaaggaaattcataggtatctttagtcctttagcagatatttgtgaaatgcttatctatatgyatatagtactatgctacagaatacaggggaatataaaatccagaaccacctttaggaagcttgtggttggatgagcaactaaatatttagtagaagaataaaaagattgtggccaagggccgaaggagtgacccagacactgcaggctctwggatttcaggggaaggagaggtcagtgtgggtgaagttggtcagggaagggtgtgaaattgtggttgggctttgggaaggtcacattttaatagatggagagtttgacttgcttctcttgctttctctttgtcctctggcaagacactaaactctctggtccctttcttccatctggccaatacgtttacataataatctttaaggrtcattccagctctgaaattctatcctataaaaaataaaactggcctaaagaaatagtcatggatgtattcaaagattaagtataatgccatttactgcagcctaatttataatgacaaaaacaaaggtatggaaacaaataaaattgaagagagattggttaaacaaattgtggcagagccatatgttggaatattatattgtcattaaatagaatgttttagaaggatatttaatgacaggaatacgctcgtggtatagtaagtgaaaagaatgattaaccatactgtaacttctaatttgttgaaagaaaaaaagaatgtttctgtagaaaagactagaaggaaatgggccaggtgggattatgagtgaatttgttttctatgatgaattttgaatattttcaatttgattatagctcctataaatactattttaaagttaataagatcacttacccctcagtgcaagagactggctcctttgccatctattcccatgtatatatgtccttgacaagtcacttgcacgggcckcaattcggaggttgcatggaagagagrcaagatactttagcaggaggcaggagagtggccatctatttttggctcggtcatgagtcagctttgtgactttgggtaagwccctcctgaatatccctgagcctcagtttcttcatctgaagaggggagttggaggtcacaaaaggtcctttaagttgcaaaatatatttgttcctaaagatggataatttctccactattgtggaactggctaagaggcctctttggcttcttgagcctggcctctttcttttctctcccgctcccctgcacttgggctctgctggctgcaggctgatttctttcattcagagttcagggtgaattggagtagaagttgagtgacagggtctctgcgcaggtagggtgtaatgacagcactgaaccactagagggaagcattgtttgattactttcccctttcccattttttagcggctgtgtctgcaggtgaagatcagtcttgatttgcctgggggtttcaaattctagcattttagaattaaaaggacttcgaagatcatccagtaaaaccctagtatgctgcagatgtgcgatgatagaggcctggaaaagcaagcgacctagttaaagtcacacaatgtgctttttcagggtctrcactgtaaaggaaggctgcagacagagccaagggtatgatcagttgagtccacaaagaatagacaggtcccatgttgtgcagaaacctaaaggatctacttgtatacttgcattcactgagcgcctctggccaggtgttaagaggcctggagatagagaagaaaagatataaccctgcccggaggagctgctgtctggcagggggaagctcacacaaacacacaatgctaccccaggtgtcttccccactatttggtggtctgcctagtctaggatccaggctgtggtggtggcttggagcctggtttatggaagaccctgcaggtgttcttatgaatgatcacctccaagattagggagatacattggataccccaagtttgtatttccagttaatttctgcaagcagtgctcagcctgttcacgtgccatgccttactatttcttgaggtttgcgaggaatcctggcagttttttccccaccttcaaacagctttgttccttggctctaggctgactttatttttggtttgcaggtacccaccagccctaagcattgtggcaaagtgaaaccgtgtactggcctgggaaccaggcagctctgtgatcttatgcaggttaccttctgtctttgagaagggaggtcatgttctcagctgcagctgtgtcatctctgctagagagatgaagcgttatcattatatttggattttgtgtttggctgtgaatacccattgatctgtggtctagagaagtgtagcatgtgtgcacctgaagcagaagcaggagtcaccctctgaagtgggtgtattcgacaaggggctgggcctgcagggccaccagatggcagcagtaggcagccagctagccttgggatgaggctggtagagtcatcattcggaattagtaaggtcagagctgaaagggcccctggaggtcacccaggccttccctgtttttgtatggatgggagaacctaggcccagaaagggaaagggtcttgcataaggacacaccctgagttaatagctgatagtccttgctcttaacaggaactgatatggatctgacctctagctggctgccccatggagatccaggggacaagggccagtgagccagctgtgggagaggacctggcagtggcagttaactgtctgcctttttcctgatttcttcaagggcctggtcttaatgatttttcaccttctcactcacagcaaaagcaatgtgcacatcttttctgctcgcctctgccctgtccagttctcctcctcagttctctggaccaaggcttcccatcacactgtgcaatggatagaattaggggtcatctcttaagtcctataccccacagatgggcaggcccagggccttgccagagacatgctgaagacatgagttagcacaattggttgaataagaacatttttttttttttaatttccaaggggatcaggttagggcagggagccagtgtttgccaagtacttactatgtactaggtgctctgccaggtactgctctacagcctgagggtaatactgctgtagccccttaaggtagggttcatttcccttcattctaggtgaggattgaggctcagagaggctaagtggcttgtataaagtaccatagctagttagaaagcaaagcagacacttgaatcctgctgtgtttgatatcaaagcttattttatttcatcatgccacttcctctcaaggtgaccttatgggaaatgtagcaattgactatcttattccattcaggctgctataccaagtgatatagactgggtggcttataaacaatagaaacctatgtcttacagttctggaggctgggaagtcctaatcaaaataccagaagatttggtgtctggtgatgacctgcctcctggttcatagactctcacctttttgctgtgcctcacatggcagaagaagtaaaggagctctctggggtttcttttataaggccaatgatcccattcatgagggccctaccttcatgacctcatcacctcccacaggccttgtctccataatattaagggttaggatttcaacataygaatttgatggggacacaaccattcagtctgtagcagccctttaggctttagggagggggcaacagatattttgtctctccttcctggagaaagcttctgggggagttayggtggtgaactgccagagggaggaggcctttgaagcaggaaagggcaggtatttattggagcaggttagggagtggtggctggtggtataaagcccactgagaaatggttaaatacctttcccctctgtgcctgtgttctagcagttctttcttccaggaatgctcgtctctgtgattcctgcatagctactgcctcacttccattggttcttgtccaaatgtcacctcttacactctattcccttcactgtgttatttttcattatagcagttttcattgcctgaaaccatagtgtcattatatgtttacttatttgttgtcattctctcctaaccgaatgtgagccccacaaggttagggacttggtctgctttattcatccctggatttctccaactatagacgagagactcgagtgctggtggcatgggatgggtagaacttttggatgtggaagtgatgctatttccartggctgtgttcaggagatacagcctgtagctggccctgccctcttcctaccttcttggagaagcccaggccasagagcctcagctccctgaggctgacagtgatgcctgatgccccagcgttttaagaccagctttgctcctgcctatctgcaaggccttgccttgagaccttggcttccccatctgtccatagtgagtggggtgaccagccatgctgcaagctcaccagatggttctgggaagggtgtagaggtccctggcagagagctcagtttccattcaaagaatcttcctctttcctgatggagattgatttgttccaggagctctctaaaagtaagcatttagttactggcctgtaattttgccatcatttttaggtttttggcagatggcactctgcttgccctttctcaggggaccttgcctatcccatgggtgctctcaataatcacagtgacagccaggcacggtggctcactcatgtaatcccagcactttgggaggccaaggcgggtggatcacgaggtcaggagtttgagaccagcctggccaatatggtgaaatcccatctctgctaaaaaaaaaaaaaaaaaaaaaatgaaaatyagccgaggtggtggtgcatgcctgtagtcccatctactcgggaggctgaggcaagagaatcacttgaaccctggaggcagaggttgcagagagccaagatcacaccactgcactctagcctgggcgacagagtgagtctccgtctcaaaaataaataaataaataatcatagaccagtaccttaaagtgctctcaatgtgagccaaggtgaaagcagcccattctgaggaatattggaggaatcaactcttgcccaatcagagagtgactttttacctcaggaggaagcttaatgtggccaaaagaaccctgaagagctaggtgtaagttctgatttggctatttgttggctgtgtgatcttgggcaagtcattgggcctgaacttcctcacctgtaaaatgagggccttaattcctaatttgtctgcttcacaggggtgtcttatatcctttactcaytcacaattcctccctttattccttcactcatttgttcaacaaatatttgttgcataggcagaagtgaggggagggcattccaaacagaaggaatactgcgaaaaaatctatagaagtgggaagtgctctgtggtgtagtttgcttgacctgggccagatgataagacattgggaacttttgggtacaatgagaaggggtccttgttgaggcgttactctgtgagtagtggaggagcagctggaggtttctgtgaggagtggaggtgtgtgagaaacataaacattgaaaggagagaccctgactcggggtgctcttgcagtctcctctgttgaggcctcatgcttgctttctactcatcgctgtggctgaattagaagtcctctgaattcttaggggagcccctttcaggggctcaggtgattttgagaatctatgagatggggagatgggtgggactggagttatctggttcattggcctttcttctgggaagctattgtgagccatatggaaggtcattcaggaaaccatcatgttacctttcatcttgaagcgtttcttaaaggtctaaaaatgagcagctctggggcttctccttatacctctctgaggagatggaggtgtgtgaggaaggggtcactcacatttatcaagggcacatgtatgccaggcattttaccagggctttacaaacatttgtttaatccatatacaaattttgccaagtgaggctcactcccattttacacatgaggaaaccgaagagacataaagagacatgggctcactctacttgggtacttagccttgcttcgctcaatgtgaattgcaggtcaagatcaccttgtcaagtttgggggtgttgtgaggctcaaataagatcatggaaagcactttgtaaactggaaagttactgtgtgcataggcagggagccatcaatagtactactgcttcccagccacattcctacattgagttttgtttgggccactcattcctgagctgatagaagcttctagccattagtttctcttctgcgcactttctcccccagccagccccagagtcagtggctctattcaccacttctctccattaagcccacaaataagagcaatgtccttttttagaatgctaaaactttaaaacgttacagcaccaattaatatcagggtaaactttcttttctgtttgccattttggtgaaaacaatagtaaattgtggaattttaatcctagaagggaccattttatccttatttgaaatttgaggaaacagaagcccagtgagagatgatttgtccccatggtcccacagctaacacgtagcasagccagccaggattagaacccaatgggtcccttgtctaggacccctccactgccccacatgagcccttttatgagagactttggcttctttgtggaggaagaatccagtttaataaatttcattataccagcccctttatgtaacagggctgtttccaggtcctggcagatggtccatagtaacagtgctttgctgatttggttggagctgagcctgtgaaatgaaaaatcctcagtagcagatgcctctcccaggccctggccatggaaaagtcctcctctccaaggaaagtactgtagcttgggtggtaactgtctctggtgggactaagtgtgagcaccctgaaagataatcttaaactgtgtcaagtttttacaaaaggtcacattggtgacttggaggttcttggcagttgagctgctagtagagggtgtttgtattctgggrcctgagggacagatgggagcagggagcagagcaggagggagattagtagatgtggaagggaaaggtggccgtcccaycctgggtctgccctggcaacccctccttttccataccatgaggccatggacctctagacaagccatttgaatgtgacaagcatttgtcacaccatctactagccttgacagtggactttaaccccaaacctctcccaaccccctactttggaattactgggactctaagtctcctgattatcttccctttcctggtgggtccttgaacattgtatgttctcctcagtggcctccttyggtgatgctcattattgccactgctcaatgcaagtgccaagtccccaaaccactgacagtggagtggtcattatctccattggcatcttcctgaccatgtccaccgctcagtttcacccttgtagagttctcaaatatggggtgggagaatgttttcccatctttgagtatagctctattaggacccctgtaggtcttttatactaatctctcttgaagaacctgggacagtttcccagggatggggttagactaaatttgagaggcactgtctaaagtcatgtaccaagatgttctcactggttgaccacaaattggcatcctaggataggctycttcccttccctactgctgcctctgggtgaattgcttacccaaagattggggccaacctttgtctcctctattggagatcttaatctgagcttcccatttccccaaagccagtttctctttggaaaccaaggatgcaaatagtatttctagggggttgtgggatgtcttggggtttcagaggtggggtcctggctttctaacataacagtggcagtggatacatggcagtggatgggctttgcagaattcactggctccagtgtatgttctgtctgtccctgatcctgctcctgtgggaccttagggtggtctgcagggggagctgtgttcccatggccaagtgctgggatttttaccaagggaactcaagcagctcctctgcaggtttaggcgtgcttgggaactgcggctttcctttggctgtgctgacactcccaagtcgcattcccagctttagccttcagcttgggtactgtgagtcatcgtcatcagtggaaaacacggcctcatcaacagctgggtgcagtgcttggccttttttctttcctttttttttttgtaacttcacagagatggaaactgctgatgattttgcaacggacaaaaactgaaggtgatgtacagaattagggatggcagttccagatagggagaggaggatctggaggagatggagaaagggatgtttctttcattacccagcccttgggcctcccaaaagccatccctgggatggaggcagtgaggaatcgtggggacatcacctgtctgctcttccctgccaaggagctyaggaagcccatgataattaggtgaggcaggtctcaatggaagcttggaaaagttgacttgtacaggcataccttggagttattgcaggtttggtcccagactacagcaataaagcaaatatccaataaagcgagtcacacaatttttttgtttttccagtgtatataaaagttgtgttatactatactgtatactatacctattaaatgcacaatagcattatstctataaaacagtgtacatatcttaattaaaacatattttatggctaaaaaatgcaaatcttctgagccttcagtgagttgtgatctttttgctggtggccttttagaagaaggtcttgccttgatgttgatggctgctgactgatcagggatgtggttgctgaagactggagtggctgtgacaattacataaaatgagacaatagtgaaatttgccacatcagttgaactcttcctttcacaagatttctctgtagcatgcaatgctgtttgatagcatttactcatagtagaacttctttcaaatttggagtcagtcctctcaaaccctgctgctgctttgtcaattaagtttataaaatcgcttttgttagcatttcaacagtgttcacagaatcttcaccaggagtagattccatctcaataaatcactttctttgccatccataagaagcaactcctcaaccctacaagtttgatcatgagattgcagcaactcagtcacctctttaggctctacgtataattctagttgtattgctgtttctaccacatgtgcagttacttcttccactgaagccttgaatccctcaaagtcatccatgcgggttggaatcaacttcttccaaactcctgttaatgttatttgacctcttcccatgaatcatgaatgttcttaatggcatctagaatgatgaatcctttccagaatatttttaataactttgcccatatccatcagaggaatcactatctatggcagctatagctttacaaaatgtatttctgaaataataagatttagaagacaaaatgactccttgatccttggactgcaggatggatgttgtattagcaggcatgagaacaacattaatctccatgtacacctctatcagtgctcttgagtgaccagggtcttggtcaatgagcggtaacattttgaaaagactcctttctgagcagtaggtctcaacagtgggcttaaaatattcagtaaaccatgctataaacagatgtgctatcatccaggctctgttgttccatttctggagcacaggcagagtacactgagcataattcttaagtgccctaggatttttggaatggtgaatgagaattggcttcaccttaaagtcaccagctgcattagccctagatagttatcttcttcccatagaaggctgtttggtctacattgaaaagctgttgtgtagtgtagccacctttatcaattttcttagctagatcttctggataacttgctacagcttctgcatcagcacttgctgcttcaccttgcacttttttggaaacagcttcttttcttttctttcttttcttttttttagatggagtctcgctgcgtcgcccagcctggagtgcagtggtgtgatcttggcttactgcaacctccacctcctgggttcaagcgattctcctgcctcagcttcccaagtagctgggattacaggcatgcaccaccacacctggctaagtttttgtattttttgtagagacrgggtttcaccatgttagccaggatggtcttgatctcctgacctcgtgatccgcccacctcagcctcccaaggtgctgggattacaggtgtgagccaccatgaccggtcctacagcttctttttttaaacctcatgaaccatcctctgctagcttccatctttttttcctcagttccctcacgtctcttagccttcctacaatggaagagagttaaggccttgctctggtttaggctttggcttaagagaatgttgtggctggtttcaccctttatccagaccactagaactttctctatatcagcaaaaaggccattttgctttcttatcattagggtgtccactagcgaagcacttttaatttcattcaagaacttttcctttgcattcacaacttgcttaacaggtgcaagaggcctagctttttagcctatcttggcttttgacataccttcctccctaagattaatcatttatagcttttgatttaaagtgagagatatgtgactcttcctttcacttgaatacttagaggccatggtagggttattaattggcctaatttcaatattgttktgtctccggaaatagggaggcctgaggagagggagagagatggaagaagggctggtcggtggagcagtcagaacacaatcgattaagtttgccatcttayatgggcatggttcatgatgccccaaaataattgcagtagtaacatcaatgatcattgattacagatcaccataacagatgtaataatamcaatgaaaagtttgaaatattgcaaaaattaccaaaatgtcacacagaacacatgctgttcgaaaaatggcgccaatagacttactggactcagggttgccacaaaccttcaatttgtaaaaaacaaaacaaaaaccgcagttatctgtgaagtgcaataaagtgaagtatgcctatacttttctaagaagctgtggacaagatgtactagaagtcagggcgacctgggttctagtctagtcttacttctaactcactatttgaccttgagtagttaagttgcttttgttttgggccttgttttacccagctagaagcaaatgattgggtaagaagttctctaaggtttcttctggctcagatagtgtatgaggctgaattgaatgtaaagaactttgaaccttattcccataatcctcttgagaatccaaaacctgtagctctttctccagatgaacagtgttgtgctcactgtgtaaggagaatcacatagatatggtactcaccctccaaggacttacagcttgttgtccttctttcctgtccccaccaggcagcagacagagtctactgggaagcaggaaattaggatcctagttctggttctaccaaaacatactgtgtccttgggcagatcattcccctcttttagccttattttcattttctttaaaatcaagggattagacttgctgcttggcttcagctaccctccctcacccctccacccacactcctcrccccccagcctactactagcttttctgtagggtgtgattcttagctgcagaagccctggggtatagtttcctttcttgccgggagggagaaaagcaagattattttttaattatgcagctaagattaggcagcaatctgcattttaaaatgttattaataagaatctaaaactgtgtgaagaagctttagagtttgaatgtgaaatgagttgggaaacatctgtagagtcactggcctcaatcagggatttttctcaggttgccaagcagcttctaggtgtaactagcagtgtgatgtgctgctggaccctggaggaacaggaaaaccaagacctcagccggcacatctcagagcagggactcgtggtccagcctctcatgttggttctttgtaaactggctttagagagtgatagtcataatgttattaacactagcatttaagagtttacaaagtgcatttatgtttattgcctgccttttcatcrtaggcttgagaggttgcttgagcaagtttcattgcctctgcttgagttggctgggacttgtaagtttaaggttcttccattaggaaaggtgatgtgctgtagaggagaagctcacaaaggaagatgggagctggacactggtcctgggcctccatctccctccccagcactgcctgtctcctttccctactttttatttctctgtagcaattaacgtcatttgccataggtaatgttttgttgttgttgttgtctgtctttcccctcattagatttaagctccatgatgggagggagttttgtctttttttttttttttaaattagagacaggttcttgttctgtcactcaggctggagtgcagtagcatggtcatagctccctgcaaccttgaattcctaggcttaagcaatctttccacctcagcctctggaatagctaggactacaggtgtgcactacctgttcaactagttttttttaaattgtttgtagagacaggatcttgctgtgttgcccaggttggtctcaaactcaagcgatcaaactcaaggctcaagtgatcctcccactttggcctacaaaagtgctaggattaagttttatgtgttctgttcagtgcagtagcccctagcacctaggacagcacctggtgtatagaaagtgctcaataactatttgytcaatattgtgaatgcctggatctgtttctatctatataggctgtgtgacttggaaaattatttgttttccttagttttgttttctctttggagagtaggtttagatggtctctgatatccttggtggtaacagcaatacctacaattcctactgttcaacaaacactgaacaccacctctgggtcaggctctgtgttaggtgctgtggggaatactgagagaataagaaaagatcattgttcttcacccttcagtgggcaaactaagatatgcagtcaaataaccctatgtttggagggatagaaagttgttgaaacagaggtacaagcaccatgccagtggctcctaaaggaagaggtggcttattctgaccaggggataatagggtgctttagggaggcagcagcatttaagctaggccctgaagggggagtaggattccataagtgggacagacaggctgaccagcattgcaggctgacaggtgttgcaggctgaccagcattgtgagctgggggcagagcatggccctaaggcccaggaaggaggaatatgaatatgcttttgacaaaggagcagtcatccaacattgagagaatgtaggtgctttgagagaggcaagggagctactgaacaaactaggactggggcttcctgccatgctcttccctagcctggaggaagaaaccagcctgactccttcttgcttttctctggaaaaccctaaccacatgttgtagatagttctgcactcagtcttggtgttcctcagggtgcagtctgtcttcacttctatcactgctgcccccgatttggtagctaataaagtcagtggtgaaaatggagcagctgtgtggaatacttctatgttttgggaatctgacctttgccatataggtcaaggatggatgaagctcactcactcatcagctgggctctctctgtgcctccagcccacgtgtgtgtccctgtgactctgaacaacctcaggaagtccttgcgaatgttcacttttgaagagccagtgtgaccamgtgaaaagtggagctgaggtcagacagacctgtgcatcccctgcaggacaatgactgagggcactgactctggttgccaggcccctgggtcccatcctagctttgccattgaaagctgctggctctgagccagagacataacctctctctatgcgttaatattttcatctataatttgaggattataatgcctactcagggtatttctgtggattaaaagggataatccatatgaagagtttagcatgaaatagccctcaaaatattagcaattattattgttattattgcagctgtgccacttactagctatgtgatcttggacaagtcatttaacctctgtggtctgtttcttaatctgtaaaatgggattcacaataatcattcagggttgatttaattatgtaacttaatgatagtgcctaaagcagttttatacagagtcagctctcaataaataaattctccccaacctttcaacttttgttcattctctttgcgggcttttttctcccctttttagttaggcagcctgtatttggaaatcttatttctgtattaacttaaaaaaattccaaaccttttattatgtgatattgtttatgatacgactttggaaacttgtgacattttactaaaaaataacaaactatacagtcaagttttaatgtttatttacgctaggaactatatgagtagtctttgatattagagtgcatgctttatttttggacagtggtcagactaaatattccaaaggtgacaataaaattaaattgtataccagtcattttaatactgaagatttttaggcatcataattaaaatgtagatcagggaggtatccaagaggtcayctrttgcggttctctcattttatagatgggaaaactgggtgcctaaagcagaagggayctgttcaaggccatgcagcctagaagagaagccaggattaggcctgaatcttaattcaagtcttacgagtcttgagttgaagcttcctctcttctcttttccaactgaatcttgcttcatctttcttctccgttgttccttttactcatttctttttcctacctttaattaatttgttttgtctcgtacattagaggcttctgatgtgcaagccactatgcttgaatcttaaaaaaaaaatcaaaattccatgatagagctttcaatgttctttctcttttttgattatcattagaggcattgaccctaacactttggtaggtgggaattggctgagaagatttaacaaagtggtagaaatgctgtgtggaaccatggaaatccttaataaggctgtgttgttcagtttgggagaatagtagtagtaatggccattcactagttagtatgtgccataggctttatggaaaagtatccttgcagcaatgctgcaagggagatgcttttgttttcattctgcagataagacttagagctgttgagtagtttgctcaagattatggagctagtgaatggtagttttcagtagtggtgagtgagaggtaggtaggttgataggtagggaggtggttggattcatttattctattgttcattcaggcagcagatatttattgagtgcctactttgtgttgggcattattctaggacacaagaatgagtgaaatagccagtccccagtgtcatggagctggctctctggaakaggagrcacacattaattaaacagtcctaatgagtgtgcatttataaactgaggtaaatgctcccaggatgaggaacatggtcctctgagattgttgcacagaggaacctgatctgagttgagtagtgggcagagttgaagatgagtaggagttgactaggtgaatggggtcagggtagtagagatagctggggacaaagggaaccagtatggaggctgtattagtctgttctcacgctgctgtgaagaaatgcctgaaactgggtaatttataaagaaaagaggtttaattgactcacagttcctgcatggctggggaggcctcaggaaacttacaatcatgacagaaggcaccccttcatagggcggcagcagagagaatgagagccagcaggggaaatgccagacacttacaaaactatcagatctcatgagaactcactatcatgagaacagcatgggggaaactgaccccatgattcaattacctcccaccaggtccctcccacaacatgtggggattatggggattacagttcaagatgagatttgggtggggacacagccaaaccatatcagaggccttgtggaggagcagcatggcacatgctatacagaaaggagtgtggtgtgactgcttccagcacctgtgctctgagctctctccttgcctgtttcctgctccttgtacaggaagatgatgctaggtgattcttggtcagttagttctgtgtttgactagtccctgggtattatcatcaaatgtcctttttataaagtctctgtccacatggcagaatgaaggatgagttacagaagtcaggttcttaaccttctaaggacacagaatgaataacccagagagtaactggtgcttgtatttgtaaacaggtgaatcataaatataacaaacctataggtagagagcttcctccttttcatgagtatattctagaagaccttgtaacatcctggaatattagagttgagagggactgaagaggtcatgtgaccttttctctgtcttacccatggattttctttttataacatccacctcagtttgctgactccattttgctatcttcagtgacattatattccctttttggacagatactgtcaagaaaatatggatgatcctctaatctatctttctatcacctataggactcccttccctagaacagggtagaaatttctcttccctgaagagctcagacatccctggagctacttctcattgtacctatagctatggctgcagcacctgcagcccttgatggatggtaaaggaagttggcctcttgaatattcatcatccacccaccctacccacagagtatcccctgctctctgtggtttgcatctagtagtctttctccttactctctcccctttcatttatatttgactatttgataacatgtttgccaaacgccccaggagagttaaataatttggtaatgaaataacattttatgattcccattagcgggacccttgatgtagcatctctacaccttcatcatcttcctactcaccttgaaatcctgaaatctcagaatggtgtttatttcctctcctttccttttaaaatcacatctaatggggtgccaagccctgtaaattctttcttctttgttttcctatgacttctattctagtttaggccttgatgcatcctagrcttgtgttattgttgttgtttctttcttttcttctcttttcacttgctacctctgtgactttgggtaagtaccttgttccctgtcagtaacatggggatggtaaaagtgcctaactcacagggttgttgcaagaataagcaggatactgtacagagaatgtacttactttaataaatgtaatttaatgtacatactttaataaataaattaatgtrcatatatcggtgatgtgttaaaaaatattttactaatagacgtcaggcgtgttggctcacacctgtaatcccagcactttgggaggctgaggcaggcagatcacttgaggtcaggagttcaagtccagcctggccaacatggcaaaaccctgtctctactaaaaatacaaaaattggccggatggtggtgcatgactgtactcccagctactcaggaggctgaggcgggagaattgcttgaatccaggaggtggaggttacagtgagccaagatcatgccactgcactccagcctggataatgcagtaagactctgtgtcaaaaaaaaawttttttttttttttttttttttttttttttactaatagtaagcaaccaagtttagggatccctggtctggagggtgagatccagatccagccatggcacttctctgtggctggccccagcctggcaatcttgactccctttctagtctccttctcttgtgacccttattcactctcctgccttttgactttttttttttttttttttttttttgagacagagtctccctctgttgcccaggctggagtgcaatggtgccatctcggctcactgcaacctctgcctcccaggttcaagtgattctcccacctcagcctccccagtagctgggactacggtcgtgggccaccacactcagctaatttttgtatttttagtagagacggggtttcaccatgttggtcaggctggtctcaaactcttgacctcaggtgatcctcccaccttggcctcccaaagtgctgggattacaggcgtgagccactgtgcctggccgccttttgattttcgtatctttgctcatcccctcacgctgctcctgcaatatcctcccttggtctcccattttcttttcttatccagaagttcaccttaaatgcctcttgttccctcaagcctgccaggacaattctagttccagaccccttaggtgttctttctccatacttctcatttggcctctgtcgttttctgtggtacgttgatatcttttgcagtctatacttcttggctctgtagttatttctctgtgctaattcttacatggacatgccttataaattgtgttkcacttgctgacttcgttttgagctattttgtcatctctgtcatttatcatttacctggagacacatacctatactttttggatgacattagtgtatctattttttttaatcatagtaatatataatcctttaaggagaagatacgtttgttaaatttgtgatttgaatctccctggatttgacagcacgcatcagcttgatgcagacattcatctacagtgtattaatgagcattttttatatgtggattcattgttttttttttactccagatgacataaaatcatcatccatgtgtttatgcctttatttcagcacttacagtcctgagttctacatgggctcctgggaagaagattattctagtgaggaaagctggatggtacacagagcatatccatttaatctgggttttcgtcttcctcaaacattgtaaaaatggctatttcatcagccaagttttgtcagtttgggacagcagctgtgcaatcattggagataccactggccctggagtcagaagacacaggtttaaatcttgattcgactatttggttgttgattgaactcaaccaaatcatttaactctcatcatttaacctcatctgtaaaataagcttaatactctatatgccatagcattattgtgaggattgagccagcgtcaatgaatgtactgggtacctgggaagaggtcagtaaatgtctgtttaaaagaaaaggaaaaataaaagggtctcttctgtcctgggtgagccttctgatgcagagtttattttgaggagaaatagacaagttcagagtgtgttaaatttaggcttgagactaaagactgaacgttaagtcagcctggtttctggacttgtcttaaccagaatgtctrtggcctccscagagagtatgaggattaattagttaatctttgtaaagtgctttgaaggtgaaaagtgctctgtaagtggaatggctgaattgctattggggatataataatggtggcaccatattctgccagtcttgcctgtctttgacttcaataatcaataacaggaaagctctaagatgttttacttcatgtgaaagaaaggattcaatgygtgatttctggtaaaattatttctgtagtcttagagataacaacttcctagtttttcccagcagaggaacggtcatttaagcagcaacagtctcatcccctggtttcttgggaatctcctgctgagcaatctggttagaaatcctagccagctcaggtagagggacaatttgccagttttggatgccctatgrgtcctgggcacatgggtttttaagaggctaatcttgcagaagtgaaggaagagtgttgagtgattatgcagtgactagtgcttaataaccaatgcagagtaataccatgggctagtagaaagggatgtggcttagctgtgtgaccctgggctagtcacttctctgaaccttaatttttttcacctgccaaatggcggcatagtagtggatgagtacaatgataaaggtggctcacaggagggtgactttcaccctttctggggagagctggggagtcaagaaaggtttcatagaactagtggtacatgtgctggactccaacggtggagccatagtttaccagctaaggagaggtcattcttagcaaaaggaacagcacacaaagagccatgaaggagtacatttgaatggacctactcccagctctcataatatacgaggtaccccaaataccctgtgagctacgcagactttgttccctctttgaggaagcccaaaagtcagattcctgtaaactgcttggtatctaccttagtgtctgctagcaggctgatgctgagaactgtttccctgcagagccttgtatcactgcaatattctgacatttccccatgaatctatggttatttttttagctgacactataaaccatatgttgaatgtggggccagatgaagctttgataccaaacacaaagtatgcagtagtagatttgtctagaatttaatatgcactgctctgtgttttgtctctaaagcaaagtttttctttgttaaaataaacatgtataaagaatttatacaacgcacatggttatgcatatttattgcagagaatctgttaataatctatggctcatcagattttgcatttctgttgaaataacaaatgtggcacttggtacaactgaatgaatttggtgaattttctcttatctaggagaagaaagtccatttctccttttgcaaatctcattttcttttgtcatttttagcactggccagcttcccatgtggtgcatctgggggactaaatgcttttctggctccaaatggttttgccattttttttttcttctctcactcccttccctctagcacacataaacacttgccttaggattgttagaattgctcctttgggtaagagcatagattctgaaaggtccctttatgttacaaggaggggagagcaaatgaagctggccattcattgagctaggccctaagagattgtggagtggagaacttcaaggtggctaaatggggccctgggttgggtgggggagaggagagcctgagaacaggcatctgggcaaagcacaaggagtgtgtggggaagggagggaatggaaggccataaagcatggttgaagtatatccgtagtcatattcatatctatataacatgcaagagcagaaactttagaatgaatctctgcttgaatccagctctggtactcacagcttatttgatcttgggcaagtcatttaacctctctgaaccttagtttccacatctgtaaaaatatgagtgcaygtgccttctttacaggaagataggaaggctcctggtaggtggtactaaaataaatgtcacactttctcttgtaattcattgcctacccatgagagcacagctgtggaatgtagtcttaattcaaataatatttgtttttagaaactggcaagatgtttacctggggccgagcagactatggtcagctagggaggaagttggagacttatgaaggctggaaactagaaaagcaagattcatttctcccctgttcaagaccaccgaacagcatgccttcrtctccgcattgcttaactggagcaactgaggtaggaagtgacttctcacagatgtaatctgtccctttttcttgtctttcagtgaatcatttactgagggcctactgtgtgccaggcgttatggataggtaccatgtaggaatcagaagaggtccttgccctaaggagctcatgctttaatgtggtcaaaagtcagtcacccagataactgtactgcaaggcagactttgtgtagttccttggaggttcaaagtactttggatctactgtgaagagcaagaaatgaattcagggtacagagattggcctaggcttagaaaatgacaaggctggccaggcacggtggctcacgcctgtaatcccagcactttgggaggccgaggtgggcgaactgcctgacgtcaggagttcgagaccagcctggctaacatggtgaaaccccgtctctactaaaaatacaaaaattagctgggcgtggtggcacacacctgtagtcccagctacttgggaggctgaggcaggagaattgcttgaactcaggaggcagaggttgcagtgagctgagatcacaccactgcactccagcctggaggggggtgggggcagagcaagactctgtctcaaaaacaaaaacaaaaaaaacaacaaaaaaagaaaatgacaaggctctgatctgtgctttggaggatgggtcagacttgagcaagcagttgtaagacagaaattttaagtgtgcacaacagcttgaaaagagtcatggaggttggaaagtgaagaaactattttggggactacttggtggttcagtttggctggagcattgggtatctggcaggacagttatgaggtaatatcagaaagatgggctggaacctgatcaagggggcctttaatactgagctaaacattttatactcgtgtttatttttcccagtccagaaaacactgtagttcagttgcttattcaaacccctttgattttctgaaatggcttgaatttctacatttaaggcaggaatcttaatttctccagggtgtgcgtttctgttactaaattttactttactgttacccttaaaaaaaaagaaaaggctagattttttagaagaatgaggatggccacacaggaaatgtgcctctgaacccaagttggcttactgaagggattcagtcttcattcagagtcagtcaaaaaaaattaataagctagtgagacttctgtaattagcatcagactaatgacaaccctcttcatacctagagggcttcccttccccagggccctgcctggcctcctccttccgggtatgtaggacgcttctcaatttctgctttaacatcccagccctggtcttcctgggccttttcgtagtgctgggttaagtgtgtctatctttttttctctctctttctcttgggttgaaaaggaactaaacaataccacaaagacaatttacatgtaataataatgaaactacttaatattatggaagatttccataatcttgccaccctaaaacagctacattcctttttgtgtatacacatctccatacttctacaagttgtaccaatagcatttatgatgttttgttttcaatctttattttatcacagatgctttgtttttttccctcttggtctttaaaatgatcatttaaaatggctatgcagtaaacattacatgattagaaggttctgggatttctcaaaccattctttggatattagacatttagatcatcctttttttttttttttcccaccactagtgaatctctgttgaactgttttcctgaagatatgatcttggggatgcaatgacaagggcaaaggtccggagcatctttatgacttttgatatatttctttagattgtgtttggcagaagttggctctaccagtagtgaataagggaatgcagtatttaaactagtattgtctgcttagtgagttaaggtgctgagagcctgtaaatagtgctttacactctagtttttctttgtctttccaagatcatttaagactttgtggtcaggtagtatagtagtggaggaacagaggattcttagatttttccgagtctctagttctattggcaagataagtataccctttataataatacctaaggtattggtattggtaaggataacatgcaaagttcttgacttagtaggcactcagaaactgttgattccattctcttcttaccgtttgaaattttttaatgccatgtggtagccacagtatgcagcactgtgacagacatgaccagtgcaaaatttagtctaagagcctgacattgatgtgaattttacgtagcttatcaggagtgggcttgagccctgagccccctggcagcttcattttagagctccttccttcctagctccagtctctggggtgctggagtgtagacgctctgatctcatttcaggttcagactccaggctattactctctggtaaattgggtctgggaattgtctccagctgtggatatccaggtctggcctgctaggcatgtatttgctcsaggccaagagagagccaggccaggaggcagctatatgctactaagagtgggttcaccttggagaagacaagagccacactaaactaggtgctaccttggtcatgggcttggccagagaggtgcagagatacctggaggtgcaggaacagtgttggactaggctgatgtttcctgacccttgaggacctgagtgtggcacatagctgaccaactgcctttaattcttcttagttgcctttaatgtccaagggataagcaggaggaggagtgaattgtctggtgtctcagataggatgtctgcamagaagggtccagaaggatagccaagcaggagaggaaaacacaggtagacagagctagactgtggtataaccatcccttcctgggaaccaaagaaagcaaagaaacacaaagttatttagtgcttattataggccaatatgctaaatgctttgcagatattattttgtcttcatgataaacctgtgtgcaggtgttacaattgctgctttatgaataaggagactaaggctaagaatgggtaaactcaactggcctctactgatcacacaataggtaaacagtgagcctgggtcttgaacttgaagtgcttgaagaaggtcacatactctatagataaagtaaaattgaggtccttctttctatgtgccctttcctgggtggaaccctttgctgggttcttgaaatctgggaataagggtctctaatgccctaagtgtttcaattcttttcttctgagccatgtctcctctctagcctgagaaacactttatttgagattttagaccttgtaggccttcctttaatgtccttacagtggtaaaaacttctgtgtttcattctctgtcagttttaccttagatactgggcctctctaggcactcctggaaaattccagggtgggtagtacagtgatctggattaatcccaccaagcgcatgtcagggcaggatgtatgtgaacaggtttgtttgctgcttgactgcacatgtataccccagcagctctctactttccaagtcagtttcatagctaaggtctctaatccctagctgctaactcaactttggcagacctgggaatgttaactaacctataagttctaggcttcttcaggaccacttcagccttgctctgattctttgccctgcctctattctctgcccttgtttcttgtccccaagccctcctattccagtttacgttgtgggacttggtatgatgctgctgttccttattccctggacctcaagagagtgctcctgctccctgttcaattctttgtgtttccaagatgaaatccctgtctggtcttcccagaacttgcagttcagctttgactgtcatccctatggctgtgcccttattgcctaggactgacctcagtgacactgccttcttggatttcttgcccaccatccccaccactggctgtttgtgtgctgycccaccttttatgctctcctggatctttctgacatttacctccttcttgacttttgagttcttgcccattccataaacattggttgacacctgtcatgcaccagtgttggccatacagtggaagtggatggggaggtggatacaaggatgaaaaatacacagtctttgccctcaaagaacttccaggtatgtaagttaatatctactgtatagatgaaaagtgctattagaggtatgtacaaaaggccaaaggagcactaaagatggaatggtcaattctgaagacactaacaaaaaagaaatgttatttgaattgggttcttaaaaatgcataggagtttagcaaagatagaaggatatcaggccgagggacaacataaactgaaattgagtctagatcacttttaacttgtgatgcaatcaggatgcctacccattctagtggctgaacctagttttgtaatctggctgcctgtctagcctgtcccatcactgtctgaaggaaaatgaccttcacatacattgtctcattcgatcccagcatgatgctgtgaaataggccagaataggcatggttactcccattttgttattcaggaaactgaggccagagaggctagctaggaattaggagaagatccaaggcaaacagcttgactcccagtgtttctaaggactttctctgggctcagtctgcagccacagtcctgagtcatgttcctggtttaaattctgcccacgtttggttcaggagcaccaaatcccagccagggaactcagtatacacgtgcatgtgtgtgcacatacagtgccattggagcaggagcaggaaatgtggaaataaaagttaaaccagagattgggtaattgtcaagcccaaatgccatcagctctcatttgcagcaggactaaaactgctaraggatcaacctgtgcacagggtctaagtgcaatctgtcggaatgagtgggaaagaagctatttttagtttgcagagtcactcactcagctgtgttagctgaggtttgagccaggcccctacactttccacagtgttatttctgaaggagaaataccacttgaatgcttgtgtaaaacccattaatgaacctggaagtttccagggcgtctttgtcctacagctccctcggaagactgcctttcctgaatgaccttcctcctttcctatatttaatacatttctaattttaagtttgtgtcaagactgtgggactttggtgccctaaataacacagaaatctaccaccagcaatcagctgagtccggagggctctgacagaattgaacacaacctgaaaaagcattcccaagtggctctctggtaagtacccacagcatcattgctgttcctagagaagcatgaggtctctgagaccatgggcccaggcaggccaaacctttcagttgtagcagggtccagtgttttaaagccctctggaaatgggatagcagtgcttaaaatgggtagtagtgtgcacccaaagatggtttcactggagatttaaaaatctagcacatctgtgctgtagctgctgacatagcagggggagaaataacacaaaacaaacctcaaagtggtggaccggatttgtccccatgaacactcagaagagaggaagagctgtcatgtttgagagagatggtgaaacaagcacttactaccacccactattttcttatttatatttatcatctctcttttctcactaaaatagaaaatccaagagagcaagggccttctctgtcttgttcaaagwtgtgatcccagtgtctagaatagtccctggcaccttgtgggtacttagtgaatgtttactgactgaataagtgaaaaatgaatgaaagtaatggttttggaggtatgtacccattttcactgcttcttctcttcttccccatagtctgtgcttctcaatcccaggccagtttgggaataggcatttccatgttttcaggcatttggtcatcagatgccctgcagagccagcacagataggctgtgagcctatatggtgctcagaacagccctgaagtttcttacaaaggctattgatgatgagtctcatagtcctttagcacttcacagtttaccaagtactttcgtgcctattcacctttggcttttcttctttaatccaatagatgcttgagtatgcctatctgtctgaacacagcattagggtaggggaagcagagaagagtggaacagtttctgccttaggagcttgtgagttagtagcagggctaagttccctgtaggacaaacagaatgtgacaaaggctttaagagagtctggcaatgaaaatatgttgatcctgtcccttcccgtgtcttggtgaccctttctttctggcattttcaatccctgtggttttgctgggttctgctgggtgggggtgggggctagggtgggaggttgtgactggaaagccttcctgaattggaaggcttgatgtcaaattagtgctcaagggagcaaaagtaaagtaacaggggaatcttggcaagaacttgaggaggaaagcagaggaagagcagccagatagagactgagtattgacaggagagggagaagggaagccaggtactgctgagtcacagaagccaaggaaacgctaacagggaggtcacggaggttggagatggagtaaagactactggatttggtgactgggaggctgtggcacttgagagagcagcttcagtgggaaggtagaagctaaagcaggagcacagcaaatgagtgagcgggtgatgagaaatagaggctgtgggtgtgagtagcccttccaggagattctggtcaaagagcatgaaaacaagcccagtaccttgaatagagagattggttactgtttgttttgtaagcatggagaaaccagagcacgtcagaaggctgaaagagagatttagagagaggaagaaaactgagtgagtaaagttgcaagaggaaaggagaagaattggagcaaggcccccaagaagatgagagagaggattgaggtcactgtgaaggggccagttctgacaagaagaaaggagaccttttctttctttcagtgctggagtaaagaaacaaggggatatgtgaagagagaagttttgaggtggagaagagagtgctttcattgaactgtgtacctcttttgtcatcaggttttatgttagttttatttatttattcaacagatgtttactttatcctactgtgggccatgcacaggcaccaagaattcacaaataaaagtcaaacttgctgcccaatactgcaatgtggtatttattagtaatgtagtaattattaacatgcctatttctaaatcaaacttgaagttctttgaggacagacattatttatctttgtataattagggcaaggtttggtacaaagtaagtaataatagaattgtgcygaaaaaagtgtgagagctcatgttggttggcttaaatcttcgtggttagattggaaggaaaattatctgctggagtgatgagattagggcagggaggctacctgggagggactagttcactttactctgtaatgggttcttccagcactgtcaggtgactgcctggaaatgggagaaggaagacaccattattggctctgacccctgagtggcgggaagggcagatgctgctgtcctcattctgggggtgaggaaactgaagttgagaaagaaagctgtcactgctcaaagtcacagtacatggcagaacagggacttgaacccggctctcagacccctcatttttctcattgctagccctgaacaccaacagcttcttctctggacagttctcatcagggtgtgaccctgggctctggctttgggtatcactggatggtagtcaggtctaatggagacttggtggccctttacaggctctgcctcagtgtcatatcaggaaaagcaacaaggaaaggaatagcctcagtaagtattgggacagtaagttaattcatgcttctagtaaactcgtgctggctggagttggaggtctgatggacagagtcttaaacgtagagcgtgacttgggttggactttctgttctgtttgtacaatctgtatgattttgggtcattcaaaacctttccaagccttagctttctcattcacaaagtgcacataataatatctgctttatcttgcccatagagttatagaaaaatgcagatagtatatataagggcgtttgtagactgtaatgtgctgtacatgtacaaaaaaagttgttttttaggttcatgacatatgagctgcttcgggtacaggttttgttaaaagtatgggtcagagctgctgttttgtcttaatcgcttgagatcttaggagctacctagaaccaccatggatcttgtaaacacttcttagaactagaaccagtgaagatagtggagcctagatgcttgataatccagccaatctccctgcagcatcagagtatgaattcctgttgaggcagccatcagcattgacagcaaggatatctctggcttgcttttttttcagcagcagaggaaattcatcagcactgatttaaagtcctagtgacctcatatgttactaccatgctctgcagaggtacaaccgccccaggctttgcccagggtcaccctggagctgaccagctgtcttttgttgcatttgaccttgaaaactgggctgtcccagggtgaaagtaaatcatgcagaggtttagagtgaaaacagaaggcaatgaggatttaaaggaggcttcagtggtctgctgagagcaattctaggtctgtgaaggctgaatgagctgcacatgaattggcttgtcaggggactaaaactacctccatttctaccactattcttctagtttggaccctcattatctagtgcctaatacagtgacagcttcttagttggtaagcccttgtctctagtttggtttcaccccagttgcccacaaccagttgccaaagtgatgtactgaaatagaaatctgattgcactatgctctttttctttagactcttagaaaatacagaaaacatttattcccataatacacacttattagatagcgactttctatgtgaaagaaacttagccaagcatttaagatatagtggagattaagacccagcctctattctcaatgggtaggagaaacacacaacccataaactgcacagccagtgtgcaaagaatggagtcattagagtgtaagctccaggactgttgttggccttgttcaccactgtctcctcatcaccttgcatagcacccagcacacagcaggtgctgagcaaatgattgttatagggatgaatgtgtgcccttactttctgayggcttcctatcctgaatgaagtctaaaatctctggattttcataagaagctcttcttgatccagcttctgtcaaaatacccagcctcaccttctaccagtctctccctgtattctgcagtttatctatgcctaaccaataatgcatcaggttttttgatacttctgggtctttgcatgctggttctgcttccctttgcctttggctccttggacaactactacctatttctcagtagctaacaaggatgatgtcttataatcatcttggtattcctgccacctagtcttacaaacatgcctcttcttactttctctgttgagtttttctttgcgtagtgtcattatccaccttccttggctctgttgagcagctgtccctgaagcacttttccaccctccctttacctcccctgcccttgggtttaggcctggaatttgttgggctgttggtggcctggctctgggatgtgatgagccctgacctcccttttgcctttcctaaacactttctccctcctgctttggccacatccagacagctagatctctctcccagttctacttgcacaaaaaccctatgctgagcagggtatgggttttgccagtcccattgcgcagggattggactcagtgtcctggatccttagtcactgtttgggactttgttctgagtggctcattcccctatataaggccatctgcttgattccaagggttgctgttccttggagcttcttgcttggaagctttctgaccaatgggacctccttgytgtttacactgacctgaattaagcctctctttgccaggctccattgggtactttatattggatagctgccttaggagcgagccctgtagttccccatcttccccaaagawgactgccgtctggctccagcctcttctttgcctgaaatgtcctgaaccactgaggccttgcctggtaggcacctcttgaggtagataaagagaaaacattcctcttgtcactttcagggaagcaaaaccacaccattcccttgggatgcagcctttagacccccaagatccccagccagttgttagagggactggtgaattgtgactagaagggggaggttaatctttgtatggttacataattccctttgtgatatagtggttctgtctgtggggacactgccagtggtggccaccacctcctgcatctgaagattactgtttggaagagagctctttttactggatgtctggtgtcatccaagactcagggagactggctatgggtagcagaaatggaaggaatcagagatatctttgcaaaaggagcaactgctacaataattaattgtgaggcctctggcttttcagaggaaccagaagtataagtggaaagcaaagtaggaggtagagtggggtcccactcacaggtgctgggaggctactgtggctcccacaggggcctccccatgtgccacttcaggagacccagctggctagggaaggttgctcatggctgctgaacaaaatgtttatgtcactgtaagcagcactcccaagactggctgaggaaagtccctcgcttcaaaaaggtgattcagtaattttttagtttcttctctgtggttttatttcactgtggtccccactgataagatttcttattaattacgtggggagcatgcatatcatttgacgatcgggtctgcacgagggagcaacaaataggggaaggacttggaagaatcaagagactacactgcggcttgatctttggacagctgcttttacttctctgagtctcagattttgcatctgtcaaatagatataataattcttattggatttagctttgtaagttgtcagaatgatgtcagggatgtgaaagcattttatcaactatgaagcaataaacaaatgtacgttttgtttatagatttcttacattggtttttcggaaacgaatttcttgtagcactttgggaggctgaggcaggtggatcacatgaaaccagcctgggcaacatggcaaaaccctgtctctacaaaaaacacaaacattaggcatggcgatgtgtacctgtagtcctagcctcttgggaggctgagctgggaaatggaggttgcagttagctgagattgtgctactgtactccagcctgggtgatagaacaagactccgtctcagaaaaaaaaaaaaaaaaaagaatggattaggaacaattggattttttaaaagaggtaataataatgttagttcctgtttgtcgaacattgactacatgccatgtattatgctaagcactttataagcatcacttttaattcttaacacattcccatgaagcagtataataatttatccttattttgtagatgagggaaccaaaacctggggaggtaacttatttaaggacaaagctgggaaataccagagctaacatagtggcagcagtgtggactagaggacatacaggtgactggatggtggttttccaggttgaagggcaaagaggtgactgtggcttggtgctcaccccaactcctagaagtccagatgtgccagtcttctggcagagcctgtaacagctcattcttccctcccttggtgtctgggcacaaactagtggaggtaaacagagccacccaagaggctttccttccctagaaaccaccactttaaagctggtacagtaaagcatgcctttgaagacttgagaaaagatgttttaattcctcatgattctttcttgggtttgtgttctgtttctgtttacagtggcgggaagtatgagttttggagtatctcattcctagcccccttacctgcacatccaaaatgtaccactttacaaggctcagattagagcttgcccagtggaatcttttctggacaacttcagttgccatttcaagtatgagctacttgaggataggcaccatatcttgattgtggctgtaactttagtgcatgacacagtgcctatcagaaagcaaatggttgggatttgttattgaattgaacggaaatcttaactcagagtttgaatcacctattagtatttgattgtattgtaacatctgattatcccatgtgtggtggtcttccagaggaaagtatatgttgctactgagtgggcactgtatcttaagattttttgtgtgtcttaccctgttaggcagggaatgaggggctaagtcacatagcaggcacttggagaagccttgggggctccatctccatctactctgaagcaggcttggagagatctgtcatgagatagctgtattggttgctaacagagttataatgtattagttctggagggagagaaacaaaaacagaatgctgactcctccagtagtctcagcatgaggggcatagaaatataggcatctttttcaatctgcattgctccattcctcagacacctattttagggtgagarcacagaggcgtgcaaatggtgcatttccctttgcacccctcaaggtgaaatttctgctgttgcatggggacttttgggagcagttctgtagttactgctgtataatgcatttatcattctgctcccctggcacattttgtaaagctgcataatttccccgtgccttacaacactcactagctccatgatgatgatctatctggtggccacagcctccctcatcagggtctgtgatgcagtggaaagagcaatgtatttgctaataatgacagcaggtagcatacaccaagtcccagtagatgccagattctctcctaagcactttctaggcaccatctctttaatcctcatgacagtcttgcagagtagggattattattcttccgtttgcagttgaagagagtgagactcagtggtggtcgttagtccaaggtcacgtgattagtaaatgacaaagttgctagtaaaaccctgatcctactgcaaaacctatgctactgcataccaggattccattttcatctctgatattgactccctgtgggacctaggaccagagactttgctttctctgagcctcactttcctaatctgtataatgagaagcagttccaagggttcttccaaagttctaaggccaataccattctagttggctagagctcttaatcacctggagaccaatttcttttcacctttgagtttttgttttttgttttttgtttttttgaggtggagttttactcttgttgcccaggctggagtgcagtggtgtgatctcggctcactgcaacctctgcctcctgggttcaagcaattctcctgcctcagcctcrtgagtagctgggattacaggtgcgtgccactgtgcccagctaattattttgtttgtttgtttgtttttgcttttgtttttgttttttagtagagatggggtttctccatgttggtcagtctggtgttgaactcctgaccccaggtaatccgcctgccttagcctcccaaagtgctgggtttatttgttttgttttatagtggcaggctagctgctgtgtattagttccacaacaataacattaaaatcaggcaagtaagagaatgcatagtataaaattgtatggatcagtgctgtccagtagaactttctaggataatggaaaaggtctgtatcagtctaatacaatagctaataaccacatgtggctacttagcacttgaaatatggttaaagtaaccgactgactgaatttttaattttatttaattttaattcagatttcagtagccacatgtggctagtagccaccacactggacagtgcaggtatagatagtgtaataatataaaactaaatagagcatagattcttctatgttccaaccaaggcttctaatttccatttgatttttccagaggtgtaatacctgatgtattattatatttgtattgtgctttcagcacactcaaacatacattattaaatcattgtgtttcctacctaggcggcatatagaaaagatggtttgtgctatgtatgtttttcagataaggaaagttaggcacagaacaattcaatatactcctagcagctgagaaaagtgctaattgtgtatcaaatatgagtaagtggcttatttaaggccatttttggagcagtagaattaggactggaaacttatatcttctgatttccagcctaagtttcctctagttttcttatcactgatatggcaagcatagaatagagagactttgttcatgagatcattcttttaatgttaggcaggaaggccttttcttttcattttatacttttctgtactatttgatcttttaattctgtgtcggtatcatcttaattataataatgaagtagatatttggaaaagttttatgaaatgttatgaggctgtataatatagctgttcctgttttgtaaatgtgagatctgccatgctaatcaaacagagagaagcgggtttttcatgcgggatctgtgctcagaagagaattgaatctcatctcaattccatttctggtagtggtgcagtagtttctatcagaccagtcctcctacagaaatcaactataaactcagacaaaatgtgaaaaaaactacctgaaggaaatggagagtgaccaaaagcaggcacattcttcacaagtgtcaaggtcctggaagttaagactgaggaactgttccaggttgaaagattctaaagagacatagcaactaaatgaaatgtacagttgtgaactggatccttttgttgtaaaggacattactggggcaattggtagaacctaaattagagtctgaagcttcttgaaagttacatatcagtgtttattttttagttttgatggttgaattgttatgtagacagtgatgtcaattttggtggcaaacacactgacatattagaataatggggcatcaagtttggcaacttgatcagagacagtttagaaaaaaataaaggccgggcacggtggctgacacctgtaatcccagcactttgggaggccgaggcgggcggatcatgaggtcaggagatggagaccatcctggctaacacgacgaaaccccgtctctactaaaaatataaaaaattagctgggcatggtggcacgtgcctgtagtctcagctacttggaaggctgaggcaggagaaccgcttgaayctgggaggtggaggttgcagtgagctgagatcgcaccactgcactctagcctgggcaacagagccagactctgtctcaaaaaacaaacaaataaaccaaaaaacaaatagagggaaggggatatagcgagcaaagctagtgaaacgttgagatttgggaatatgagttaattgtaaacaggagttctttgtgtggttctttcaacttttatctaggtttgaatttacttcaaaataaaaagatttgaaaaacttcgaacaataatgaaagtagagcacatcagtgtttgtgggatgcagctaaagcagtactttgagggaaatttatatctttaaatgaatatattagaaaagaaaaaggactaaattcaactgcttaaggttctacctttagaagttggaaaaagagtaaaaataaacctgaagtaaatagaaagaagaaaataataaaggaaagaacagaagttaatgaaatagaaaggagagaaaaataaaagttcaaaagcaattctttgaaaatatcaacagaattgataaagccctacctggactatcaggaaaaacaaggtcacaaaatgcaaatattagaaatgaaagtaggtatgtcactacagattatgtagacattaaaggagactaaggaaatattacaaataactttatgcctataaattcagcaacttagataaaatggattaatttttgaaaaactacagtgtacaaaaacacaagaggaaattgaaatagaaaatcagaatatctgtatgtctagtaaagaaatcaatttattatcaaaaacttttccacaaagaactctttaggcctaggtggtttctctaataaactttatcagatatttaagtaaggaaatagtactatttttacacaaactcagaaaataaaggaggggacacttccaaatttatgaagtcagcataattctgataccaaagacattacaaaaaagaaaattattgattagtatcccttatgaacataaacacaaaaatctgcaacaaaatattagcaaatcaaatccattaatatttaaaaaggataatatatcatgaccaaactatgttatctcaggaatgaaagcttgctttttcacttgaaaatcaatttaattcatcatgtattaacaaaataaaggagaaaaaccataataataacttcaacagttgtggaaaaatcattgacaaaatttaacatttatttgtgataaaaacttagcaaattagaaatggaagggaatttctgcagtttaataaggggcacttataaagcactaacatgataattgatggtgaaaaatttaatgtattccttcttagatcagaatgaggcaagtatgtcctctcaccatttttattcactattatactggatggaggttctagccagtgccataaagcaagaaaaagcaataaaaggcttaaaatcagaaaagaagaggtaaatctgtttctattcacagatgatatgattgttgaattataaaatctaacaaatctataaaataactattagaaccaaaatggcaatttagcaaggtacaaaatcaacgttcaaaaatcaactttttttttatatagcagcatcaaagaattggaaaatttttaaaaagcagtttttttacgattataattttacagttatatcaaaaagtacaaaatatttaggtataaacttaacaaaaacgtgcaagacttgtacataaaaactacaaaacactgctgggagaagttaaagacccaattaattggagagagatatcacactcacagattggaaaactcaatgttgttaacttgtcaggtcttcccaagttgacttgtagatttaaagcaaccccaatcaaaatctcaagagacttttttgggggttgaagttgataagctgattctgacatttatatggaaayataaaaggctgtgactatccaaagtaatcttggaaaagaagaatgaagttgcaagatccacctaacccgacttcaaatttgctataaatctacaaggtctcagcaacaacaaaaaccaaacagcccaattttaaaaaagggcaaaggacttgaatggacatttctctaaagataatatacaaatgaccaagattatgtgaaaagttgctcaacatccctaatcattagagaagtacaaatcaaaaccacaatgagataccacccaacacctattagaagggctactataccaaacagaaaataagaagtgatggccagaatgtagagaaattggaacccttgtgcactattggtgggaacgtaaaatagtgcagctgctgtggaaaacagcatgacagttcctcagagcattaaaaatagaattaccatatgatccagtaattccacttctggatatatatccaaaagagttgaaagcagaatcgtgaagatatatatgcatacccatgtacatagcaccactattcacaatacccagaaagtggaagcaacccaagtgtccatcaaaggatagacgataaacaaaatgtgatatatacatgcaatggaatatcattccgtcttaaaaaggaagggaatcctgacatatactacaacatagatgaaccttgaggaccttaagataagcaaaataagctagtcacaaaaagacagatactgtatgatcctgggatgggtacagagttttagttttgcaagatgaaaagagttctggagatggatggtggtgatggttgtagaacaatgcgaatatacttcacaccactgaactgtacacttaaaaatggttaagatggtaaattttatgttatgtatatttgccacaattttaaaaattggaggaaagactcatcagcatatgtgaaggacacttgtatctacaacttattttaaaatacatttaaaaagattggtgaatagagagagggatggctagatttgtgattaaagcaaatacagaaaaatgttaactatagaatctaggtagtaggaatatgagtgttcattgtacaattatttaagcttttctgtatgtttaagcttttctgtatgtttaagcttttctgtgtgtttaaaaatgtttataataaatattggtggagaaaccaaattgtgaggaaacagaaaacttatttgtaatgcttttggccacaattcagcagaagtacagtgactcggagcctgccttgagcagtgggtggtctgaccttgggcggtggttcatatctcagcctttgcacttactttctccagtgtaagactgaaggaacactagaaaggggccgtaagactgatcatcaagccggtcatggtggcgtgtccccgtggtctcagctactcgggaagctgaggcaggaggatctcttgagcctgggagttaaaggctgcagtgagcgatgatcataccactgcactccagcctggacaacagagtgagagagagagaaaaaaagactgatcaccatttttcaaagaaatggttgtgtgtgggtttgggcagagcatgggaaactgacattgagggcttccttacctagcattctacatgtacactgtcttgtttatttctgccattagtaataataagttatgtacatgttattgtctctgttttacagttgggtgggcggtggtgggggatgcggtcactggaactcaaagaggctaagtatgctgcatagctgagcagggccttcaacccagataatcttgactcaccatgcaccgtcttttcctctatcccagatggccttgttagcatcctgggatattgatgtcttgcccacaaggagaggaatgtttagagtgcaaggtggcttgggttttctttgacccctcttttttggtctgaaacgtgctattctaacttccctgttgaacccaccatactggactcagttcatttgctagacctcttcccattcagctttcttcttctttgttagactggaggtggaaaggaggaaccaggctagatagtatactgcctgttttattagaaaggtttttctggggctctttcctctgtaataaacatgtttaattccaaataaaacaagtaactaactgttccttctgattttcaaatattgctgaaaatattggtgacattcttgcttgcatgtccttttgatgtctgagcattcattagactgagaaagggactgacaaccctattaccaaagaggttttctaagaggaatggccaagtctagaatagaacagccatctgctgccagttggacagggtcccacggagctatggatttgacccaaaggctggcctttgctttgtgtttgcacttttgggatatcccttgtgtcattgctcccttctggctcattggctctccctttcccccaagggctgccccatctgtcaggagtcatgctgcctgtgatgcctaggcatacctggtgatccagaggaagcatactgtattcatgcagtgaggtggcacctcagcttctctgtgctgaaatgcccaaattaattcaccattcttagcagtcttcccagctgagaagactcatggcatttcagagtgttccagtgcaacaggtggggctcaggggagttagatttttctgtccacactcaaatactcttgcctgatttaccttgatatttcattatcttggaagccatcagaccggggagggagctgaagacaggttggtgagtgaatagaagtctgaataatgaagtctactttcctttttaaattagaaagmaaataacttatgtttccaggattgtcatctgacttgtttactattaatgcttttctattcttatgtcttttctctaccccaaccttcccctcttgttctccttgttctgccactcttgtcttcctactcctgctccactttctaatcttttaacatttcttttctgataatatgaaaatgtggaatggtaggaaaaatataacacaccagacttcttcacccctttcctaggtgatagagtcaccatcttaaatagagtccagaataaacattctttcattcagaatttattacatttattatgctctatcctataatagttctctgatgagaggaaatctgtagccaggctaaggaggaccaagaagccaaggtagcaattgatttttttctaacacccatttgtccattgctccagcctcttctgatacccatgaagtatctctacctctctcctctggtgaggaatatggatattcacttgtatcatagatctacttagcattagatgctatttcacttcctgtataaaattttgggtctagagtacccaatatacccatatgttccaaggatgtcctgtctttttctgtttgcttgctgtcagttactcctaactacaagtatgaacttcatatttcctcatgtctcagtcactgacaacttaataactaaagtgtcctgcagtcttgggcaaagagaaccataggaggtagaagagtctggggtccttcctaatatcaggggtctggggtcctcctaatatcaggggtctagggtccctgaggagctagggattctgtaatgtaacacatggaattggaagcccggacacttgggttctaaacctagcttgctgataacttgctgtatggctttcagcaagtcactttgcctctcacttttcctgtctcaactttaggtgcttgcagggatataggtataagttaagatgctcatattatattgtgaccaagccaaatccctactatattgtcttttaaaatacttggtgggccaaacccaatggtgggtcaagaataaaatgtctgatggttgtatttgacagtctgactcctcctttcctttcccatggtatatatgggaccacagctgcaaagtgaagcctttggaccactttaggtcctcagagaagtccatgagcacagtgtcctagaaccagtagcagaggtcctagcaatatgtttgctggacagaggggcttttactacttgtggtgttagaagctggtaatggcatagtggccaagctggtgatggcatagtggccactgactgctagggttgttcccctggaggatctctatttcttggccactgactacttgctttatccccaatagtatgtaccactgagcatcagggtactaggcaggaaggatggggtaacatatcctgtgggtagagatatttcacagggggctgtagaattccaggtctctaaagtctaacctaatcaggggccatgtggtcacatactgctagcttgaactctctccccaaagattccattttaggatagttcttactgttagaaagttcatctttatattgtttttttgtctacctctgtgaggtaggtaggacaggaatttttaaaaataatattaaatttcatgttatagaaagtgtgcatgcttattgtagaattgtggaacaccaaaatcatctgtaatttcacaacttagggaaaaccacttataccattgtaatacattttattttatttattattattattatttttgagggaaggtctttctctgtcacccagactggagtccagtggcacgatctcagctcactgcaacctctgcctcctgggttgaagcaattctcatgcctcagcctcccaagtagctgggactataggcacgcaccaccacgcctggctgttttttgtatttctttgttagtagagatggaatttggttatgttggccaagctaatcttgaactcctggcttctaatgatccacccaccttggcttcccaaagtgttgggattataggcgtgagccaccatgcccggcccattgtagtacattttaaatatttttttctacacgtattttttaaaaatatgagacattatagatagtatgtttgctttatattcatatttccacctacaattatattaggaacatttatctatattattaaatattataaagtaactatttaacatttaaaaataatattgtattatttgaatatgccataatttatgtgattatttttggaaatttaggttgttcccaggtttttgctaccaaaaattatgctatgatcagcatctttgtgcttaaatctttggtcaaatctctgattattttctcaggaaggatttctaggattaggattcctggatgaaaagatacagacttttaaaaggctcttgacacatatttaggatggcaagaattattaaagttcacattctcatccttgatccctacgctcatcaccagtataggggcagatgcctgagtgtctgaagtacttcatttgaaaactccctgtacccacgaaatggtatctcatgtactcttggcatccttaaccctaatgaatggaacccctaactgtgagtctctctgtgaaatgcctgttggtttccttggctggagccacgtttggatcagagtgtacgccctagagagcaggaagcttcgtattaccttggattgactgaagggccagccttctttattagaacatgaaaaaaaaatcctgttctgttacttgtcagatgagaataatgaatatgaaaacacattgaaaactggagaactctataaatgtaatgtgttattattagggctactttggattcaaatcgtaatgctgatatgactactgagatattacataatgcttttagcacattagggggctttgatattcaaatgataatgtagaacctcagagaatatcttaccctgccctcttattttatagatarggaaactcaggctcagagaacttaatcatcttatccagtattacccagaagaatagggcaactaggtcctcacttctaattctttttggtcacattcttggcttgttgtggagccaagtgcagcaattaatatcatgtttgtatgtgcttctaaggtgctgtttaacatttttaccaaatagttttaacattctgcttgttatactgatttactttggatgctattaaaagaatagatagagtcctgggaaatttcaggcagatttaccattagattatttccttttctgaattggtgagcctgaattaatgaattatagcacaaatgcacatatgcacataaagactgaatgggtagtgatctttgaggaaattcatcaattgtaacctctaatcctgctccctccactctgctgccccatctccccactttgctttatcacttgctaatatactgtattctttactcatttgttgtatttattatttatcttcctttactaaactgtaagtaccatgggggcagggttttcattgttgtggttgtttcttgatgtctcagttcttcagtcactgcctggcatacagtagcatttgataaatatttactgaatgagtgaatgaatggttcctgaattaggaataaggcttttgtgttgggcatagagacctaggatccaattctcgttcctaattacctgtataaacttggataagtctttcttctcattgtgccttcttttaacatctgtaaaataaaatcattggttctctaaggttctgtccagctctaaaattacatgattctatacattcttagtttttggtgtttttgttttgttttgtttttgttttgtctccctctgtttcccaggctggaatacagtggtgctatcacagctcactgcagcctcaaactcctgagctcaagcagatcttcccatctcagcttcttgagtatctggtggcatatgcctggctagttaaaaaaaattttttgtgtgtggagacatggtccactatgtctgaggttagtctcaaactactggcctcaagcaatcctcctgccttggccacccaaggtgctgggaacattcttttatttttaaatgcttagtagtaatacaccatttttattttattttattttattttaaaattgtatgcagagcatcaaaatctaaaacagataaaaatataactgttctggttgaattgggaatagggataggaaagtcagggatgggagaaggaagccttatcacttggctgcctactggcagrtttcctttgtggtggctcctgaggcacatccaggagcactagggccctataggacttagtttgagaaaatctttgtctaaattaagtgagaaataggacctgggtcatgtctttgagtgaaaattctgtttatgcttagatatggatttgaagggaatgttgaataatgaaaaaaagatgtgacgtggtattaggtggtggaattgtagatgaagttttctttcttcaaataatttcatttacttatgcaaaaagaaaatcaggataaaatttctgattatatagttctattagaaattcatttggttgaggttagtcagtacacttggtctgtagttcctctttcttccataggtacaaatgtcacacagcctgaagcctagagatctgttttggaattgccagaggattagggggtctttataaagtttttacattaagttctcacagtcattgccccattttatttaagtggactattgttgaagttaatagtggaagtaatgtctaagcagtggtctgacctagaggagagttgtcagatatatgtattcaacaggacaatgaattaaagataaatgacataggcagtttcttttttcctgaatgaataactagattgaactctgtttgggttaccagctgggaaacaagctaatatttgtctagctctgtgatctgaattgtttgaggggtggtttagcttgtttgaattttaatatccattaataattgagagcgattgcaagctcttgttttgctgagtgcatatttaccatgtattatattacattttattaatatagcagttaaagaaacattcagagtaaattgtccctagacccatttgactggtatcccttcctggataatggcagtgatatctatacctggacaatacctttcatttaagtatctcaatattaaaaaaaaattctagttttttttattattcaatttattctgagaaccacttgagccttgttaattccatgaacattttgacactgaacgctgcagagaagtatgaacatagagataccagctttagtagaaactttcttgtggctgtcatcataggaaaagcagagccacttgttcatggccattattgattgacccaactgactgggcctctctgttgctatggtaactgcagcaacatttggtggaaatatgcaaactcaaattttccaaagacacttattttgatgatccaaaatttagggattcaacaacactgagaactattttccagttttcctacttgcccatctatatatttgtaatacttaaaacagcatttttttttttttgcctaatttaaaagtattttacaagtagtttgttcttcaatagagggtttatttgttttgaacttaagggaatatagatactgtctcatagtaacaactttttgttttctgatctgcttatcacaacagtttgttgaattatggcagatattattgtttaattttatatatgaggaacctgaagcccagatagatggagtgactttcccagggacagtagctagtagtgactgagcatgttagaagccaggtctcttgatacccagtttagtgctctttccaatagaagtccaactcaatgcatatcatttttcttcctcagtttgccatttggatgtcacaagatgacattaatcartcaatacagattaaaataagatcaatgaggactagtagtgaattggaacaacattattaaatttacaaccctccaagccaagagttgtataaacctccatttaaaatgaaagatgatagaaatgaactatctttagatggatttatgattaaccatgtgtatcttttccttagtgacctgtagaacctcaaatcatctctacaggaaatttgctgttatagtacagctgacttttcattattattgtcttcctcagtattcaacattttgtggtatactggaggaaaattgcatttggatgataacattagacctaacttgacattgagtttcattccaggaaaacagatattttaaaatcaaatgtattattttaaaacttagttggagttaaacattaatgtataattcagtatagcctttatcatcatgagcactttttattacatgattgtccatgcattttaaaatataaygatgctctttaattagggccactgaattagtatgcataaaaacaatccatttctcattatactctccctgctcccagccacccagcttgaagttgctctgcctctccatttgttccgcatctctattcccaccccaatgcaatgacaaacaagaaaagataaatccaagcagtagctctgggcagcaactaagctgtgctgggttgatttcaycacctggtggcagaggctaagaaatgtttcaatattccttcattacctcctttctccttctatggctcctttctcctcttagggctgatcctcccatctttctttttttattcagagctcaacaaattcaactytaagcagtctctttctcatatgtgcacacatttatttttccatcctttcaaaaattctaccttcattttaaaattattgaccccaggaacatttattgctcctttccttcttacttgccatcctcttatttatgaattttttttaaaaagtgaccttaattatgattgctgagtctgagagatctgccagcgaatgtgtgggaacaccctttgaagtgatgggcyctcagttgaagaaaaggcctatatttggaaatgaagcaccacacaggaaaaggcctagggccttaggccgcagaggtttttgaacacgcgcagacattccctgttgcattagcagagcatttctttctttctttcttttttattatacttaagttttagggcacatgtgcacaacgtgcaggtttgttacatatgtatacatgtagcacagcatttctttctcttccttctctgacaaagctgtttttttttccaaaacaccaatatttaagatacattgaaaaacctgttcttacccagttttattgcttttctcttaggtttaattgaaagcttagttttctactgtttttactgcaaacatgcagcagtttggatgctttagggcagtgactctcaaacctcagcatgcatcagaatcacttggaggacttgttaaaacacagattgctgggcgtcactcccagagtttctgattcagtaggtctgggaaggagcctgagaatttggtttctaacaagttcccaggtggtgttgatacttaaggtctgggactatgctttgagaaccacagccccagtattaagtggtcttttataatgcagatattgggtgatgttttgcagtccattctttggcctaagtgctcacagaagtcaccttgtggcatatggactgggttctagtttgccactttttctttcacagctgggaccacttgacctttaggctgagactttgtctaaggacagtaattgtgtcttattactgtggttctccagccctaagaagaatgggtaggacatattaaatggcatttagtgaatgttgggtatgtgtttggatggaggtggttagtattgcaaggcagcaggcccaggacatktgagtattatttgcagtgtttctgtaagaaaaaggttctgggttatgaatgggctaccttactgtgtgtggcattacatgtttgtgaagtaggcattatatttttgcccccatgttctttctgatagtagtatgatttttattgcaggtcagcaattcattatagatattgctgttattacaatggaaacaaaggagaaaattgttttctgggtaaatttcatttggcagttatattgattagtctttctaatactctacctaatcttatttaaaataagaaagaatacctgaaatacagaagcaagtgacaaataaatgatagctgtttcagggagtgcctgtgatgatattatctagtaaattgcaaatgcagaaggaacaggtgcagtgctgaattgggagactaaataggctcaggaaataccatattagctcttccttatgaccattttttctgcagtgtaattgagagcagtgtagcagacgtcagctcagtggtgtgcgtgattgaagagttctccttttgcctgctgattacagctgactgacatgcagctagcatctcagatctttctcactgtaagggcccttagacactatcctagtctaatcccttcgatttacagatggtgaaatgagacctgaataagggaaactcttgtcccaaatcacacatccagtaggtggcagagtttggacttgaaccctgtcatctgattctaggtgtagtcctcctgttgtgctgtgttgcctttaacctcactggtctaactaagcttacttgtagacctttggattccattaagttacctatggacagcatagatggggaagggagttttgtatgcttttgtctaaatgcttcaaaagccaaaaggaatgggctcagtctctgccatcttctccccayggctgcagccattggatcctccatctgtaggcttagtcgtgggcctagtattgtaccttggtcagacacactgaaggagctcaagttcaaagcttgggagtcagtaagatgtcatctgggatgctatctttgaccttcccttattcctgtgcctgaatcctgttttgataagttctgatagaattggggccctgccttggtgttgtcaactctttygtaacyataggcaagttgggaagtgggtaggaggataacatttgttgagcatctattttgtgccagttactttacccacatcatgttatttaatcttcactacatctctatgaagttttgtctgtgtttcacacatgaggaactaaggctcagagagattatgggacttgcttaaggtgacctagctaatgagtggtacagctggggttcagatttgggtctgttgagctccaaatcctgcacttattccgctatatctctcagagcctgtagcttggctataaatcccagtttgttcatttgttcagtgaatatgtatcgaatcctrctatattctagcctctgtgctcgtaactggagaggcagtcccygctcacatggagcttaccatctatctgagactataaagtaatgatggatgtgtagaatgttaaaaaggaaatgctgtaggaatatagagcagacaagcctaatctagtccagggtgggatgggggaataaatcaggcaagacctcttggaagaggaaacatttacacagagaactgtgttgaagcatgaaacaaccttgcaaaagacctgaaggaaggctagagtggcaggaacatagtaagcagtagtaggctgatgttctgctgcctgcctgcctagcacagcgcctggcatataatgggaacccacaaatgtttgctgaacaaatgcatgaatggctaaaacaatgaatgaatggcaatgctgaaagctcattttgcttgttatataaaaacataataagttaccttgggatgattcatagttccaaacagctttttcctccagctcctcttgtctttctgttgttttgggtttccttgctatattttgaatgtccacacacgtgtcctgcctttccttcacagccatggggtgtcttcctgtctcaaagagagcaaaaactgagctgccctattatcctcttagtggctgccttgagcatgaagtttgaaatagcgtcagtgatttgattttttcctctggggatctggcaattgaaaataaatgtagaaagagccccaaaggagttttttcttgggggcatgagagatgacagcaccagttattggtgcactttgacaatgccgagttatgtaagtggatgaaaaataaaggctattccaccaaagtcagcttgccttacttaagtgattttatattcacaaaagtgggtggtccaaagtgttctgtaattctgctatttgcaaaattcctagtttatgacatagagaaatagaattctatagattgagtttcarcaaatgttaatgtagatgatgattatgtgttaggtactttcacattgcatttaataactaaaatataaatagcatctagtttctagaaaagaatttcttgcctggaaattctggtaagagtagcataaaacattacaaaacctggaaaaggttagaatagcctgtttgttagcataccttggtccagaaaaaaatgccargctagtttgagtccctttttttttcaggtttaaatctcctagaccccttggggtcttctgttstggcttttggactgaggagtaagcttagttcacgagtttgaagggtagtctcgactgacactgatgaaaccaagcgaatgatctttggtccttgtttctttattgtttttttttcattggttggttcgttcattcattcactcataaaacatttgttgaatgacttctatgtgcaggccactatagctagagacaagttttacagtcctgtcctcacaaagcttgcagtctgtgggagagacagataagaagtcagaaactggcttctccctggatttggaagcgggagtcttcaccactaaatattcagtctgtgctggttccactctgcttctcccttttttccctttctcctccatggactgactctgtgggtctgtgaccccagagtttgtagccctctctcacctttgccatactgtctaggctcagacagtgttcctttcaatgkggtcttgtctgtgagattccaactgagactgaagttctgtaggtgaggaccagtcaggagacaggtgaggccgggagaaatgctgtggttacagaggtgacctccttgctgattttagagcttctgttcatgcctgctggcagcatgccagtacagaaggagctttggattcactaatgcttggttcatggttagacttccgtgcataattagtatttttaaagtcattttatctaaagacttcaaatttagagactctaagtacttgagagacattttatggattgcagctgagtttaaaaggatcttgcagcattttctcctcagcccttactactagccagctgcttctaatcacattcagtaaagtcctgtgacagactctttcttcttccagcttcttgcagaagatgtcatgccccaggtcggcctggatcttcctgagaagctgcacaacagtgtttctcaaatttcaatgtgtgtgcaatcacttggggatcttgttaaaatgtagaagattctagctctgtaggtctgagtcagtagggctactttccacttctaacaggttcccagatgatttcaattctgtgttctgagtagcaaggaaattgctaaatgtcaggcatagacggggctttataaatggatcatcacatctgagactgtgactttacaaaggaagacacagaaatccaaagaaggagagtgacttgcctgaggtcacacagcaaattagtggaagagaccaggaccaacactcaggtcatcattttccttctgtgttgtatgtgtgcttttcctctgctgatctagcaatgtaaagaagcagaaataaggtttcctacttgcattttcatgtttacagcagcctcacagaaccaaaatcgggtatgttggtagtctagacttgcctgaagcccttctttcttaggttttagtgaggcatttaccacgggatcttaagcagagcctctctatgacaccaggctttgtgttcagtagtgcttgttgaacaggacttgagtcccttccacactggacaaggggaagtgggtggtgccaaaaattgccagatggccccaaatgagtctctagtgtgggttaaccctcataatccaggagcaaaaggtgtgtctgggacactgaagcagccttcagacttcagaatttgcttagcactctttcttttaggatgtgctaagtggcaaagagggcataccgggaatagagtaggtatgtttgacccagagaccctgtcaggggcctggagttggaacaacaaagcagccaaagaacayggtgacaggcgatggttggtttatccgtcaaagaggtcctgtgagttggggaggggcataggagcagacagtctgcagtgatctagaccagtgggtaaccttttcattctataaatatttgttgtgtgcccattacatgccagatactgaactgcacagtgggagatgtggagatgaattcctagagctctggtctcaggaggccctccaggtggattctgcatcragatagtcttttggagtaatagcaaggtaggactctggtcttggtgaaacggtttattaggtggggattcagatagaggaaacaatcaattcagggtcacacttgctgaacctctggcataaaggagggcatggtttctagaataaggcagatacccagtgatggaaaccaaggaacaagatcagggcaggaatgggcagcacactgaggctgcttctgagctgctaacctctgaaacttgaaatctttcctgatagaagacaggggtacgctggagtaaaggtcacctggtgtggacgtggagccaggcactctgatactggaaagacttagccatgcaggttttccatctgtttacctgtctctccctgcctctggccctgcttgtgagaactgtcttsttctgtggttgtggagggtaagattctggaagcttcttaggatcaggccctctagggtagcagaggtggcagaggctcctctccccatcatcatttgtactaacatgtctcagggcctcttagggctgagatgtcgttagatatctcctgatggaggcaagtgactaatgccccaattgggaaaaaaaaactgggtgaatgagaggttggcttgagaccatagacctgtctgcatttgaaactgacatctaatgactgagctggaaggggtggaatattggtaataacattaacagttgaagggaaacaatgcctaatacctagtaggctctcagtgaatatttattgactgagtaggtattagcaaagtgctttatagttttcaaaatatattgtttcccccagactctgtgagacaggcagagcattatactcatttgatagtaaggcagctgaggctcaagatgttacatattttgcccaagatcacacagctggtaaatggtacagctgacactggaattcaggtcttttgagtcttattctaatgtcctgtctttgaagacacttccaaaaatgcagacagatactgccagggatcttgctattgtacatttaatttttggtatctattaaacagatatggtttttttaatgcaaaacatttttgtaagatggaaatgtgcctccctgtgtgcatttttaccaaattgagcccttgggtctctttatttttaataaggaggaaacactagggtctggaacagctgaaccaagcaccattgctgcctactcattagctctttctgtctaattagattgaaagcaaggaaagaagcagaaaaggcaactattttgtgtttagcagaagtggtcatgtatggtcttgaacactccctccccctttttcacccttcttttcttcttctcttccttcctttgccctccagaaggcttctagaatgcagtccctttcaccctgcagtagcgtatttcttctgccatgagtggtgtstttgtgatgtgtgtgacagacagatggacttctgggaccttagagacttggtgggttactgtatctctttcgtggtgcccagtggcctagtcatgtagagcaaagaggctattgttttttctttaagaacaaattaaatacaaagcatttctctgaagtacaaggaggaccttgggttcctgtaaatggcttaaaaaacaaaagaaaaaraagagtacacctgaaagattttgtcggtggaactccatccccaagtttgcatgtgaataaaaaattgctggccgggatcccaggcctgtttgtagatggtttcatctaaccatcagtggtgactgtgacctctgggcctgttcatgcggtcaaagttttcagctggaattttccatattcatgctcctctattgcacaaattgtaagacagcaaacatggaaggaaggtgatttattacaactcatagacctacactttatrtgaagaagtcttggggaatgccaagggccagttgcaatttttctgagactcagtttctacctaacttcttgagctggccagcttcactttccccctctctccaccccatctccattcttttcttctcaacccaaatcaccccccrcacccccactgttctatgtttgtctccagtcttaccccttttttctaccctccacactgccaccacagtgcttctatgtttcactctcttactcaaaaccctgcagtggcttttcagtatcttccaggagaaatccattctctgtggcagagcttgcagggaatttttggctctaagtcatctcttcaccctgtgtgtcaccaccattcctttgcacagacccttcttatagccagacttgcagttcctgaacataccaggttctctttcctgcctctctgacttcacacatggccttcctttggcctgattttagatctttagattttagttcaagtgttacctcctctgtgaagttttctatatatgccaaggcaaaatttggtgctttcctttctgctytcagagtaattcaaatgtattcctactatattatttattacataattccagaaccatttgtttgaatgtttttctctccctcttacctcaaattcattgccccaaattcattcactagctaaccctttttgagtattgactctcagtcagggattgggataagtaagggctttagakaagttcactcatttcttcctccttgggtgtagagattattatcatcttcactctacagactaggaaattgaggcttagagagtttaaatgacttggcaaagctagtaattggtaggcctgggaattgtaccacgcactatgctagatggctgtagatataaagttcagtatgacacagtctcttccatcaaggagcttgtgatgtagcaggtgagacagrtaagtcatagtgtcagtccaggatgctgagtgcaatgatgagggtgtccagggtgctatggcagcagagtgctgggaactaacttatcctgggggagggctggagctgtgtgtacacccacctctgcatccctagcacttagcactgtgttaagttgttttcccctgtgaccaggactcaaaatctcagtcaccttttgcttcactctctgtattctcattagtccatctgcaacacctcccttcccagtgagtctggaatctgtactgcctccaccctggtccaggccccattcacataatctgcagcaagcgtgtgaggaatgtgcatgagagtgtgaaggtttctggagtaccaggagtctctggagattgcctgtkctcagctcatttgtcattgcctaggtttcctggagcatttccatcctaggaaattttttcttggcctcaggacagaacttctaagaacatgtcccaggattgggccctctggcaccgagtccctctcaccccaccacttctggccagcctctgctgtgtactggatcctgagctgcttacagagctgagcgcactgaggtatggcccctgctctccagggactaaggatccagtaggctaaactggatgagggcagaagcctggctagacctgggcctatggcagggctggaccaatagacgggaatcagctgatggcaggagaagaaggttgcagggacagggaaacaggcagacctcatagatgggtcagctagagaggaatgcaaactgatgtatatctaggtgggatgggactgtcagaggtcagaggaaggagagaagtgaaagggctggccccgtggtcattacccagatttctttctgttagggtaacctccaggtggaagttagtttcaaaccagcagagactaggatggcagttttaatctgaaatcaaaagaggtgaacccagtatccagataggaaaccattctaatttttccaggacacaaaaggagtaaagggaatagagaacaaaatgtaaatagctcccttatgtgcattgtgccaggtgcatggtatgttatttagtttccacagaaaccccatgaatctacatttatgaatggggaaactgagactgcaagtcatacagtgaggacacaaaagaacragcagtatttgaagccaggtatgattccagagcttctcctcagtgttctgcttgttctcaggggactaaaaaatacccscagtggagacaattgagtaaactcctgagtaccacatagtaygccaaaaactgaccagtatgaaactgccacccaaggagcaaaaagttgttaatgaaatatttgccagcataggctgtgttataatacttagaaaaaaaccccaatgttttctgcaaagggtcaggttctttttactttctcttccttgttctgagcatgatcatcttttccaagagctatgggtaacctcatgaccctaagatctctgaaagacccttgtctgttggtaccttgatgaataatcctaaracaatataggctggcctgctagagccctctctgtgagtgtgtgtgatctgtctcactgccagagctcattkgggctcgtttaataattgaaggccagtgttaagcattttgcagtttgtccttcgtagacaggagtggttttctgtgtgtaaagtgatatgctctattctccaaggacactctgtttcctgaagtgcagctgactcagcatsttcagacgttgccattgggtaacttagatttcatcaagttctcttttaaagagaaatctctcccatctcatctttgagacaagtccatgaggcttggtggtggctggggcttgagatcaccttactgggagtttgcactagggaaagtgggctacaaggcaagctcagccacttcccattgtgctgaggagtcagtgcatttagtcactttaacaaaaaaagaggggccattgcaggtctcatgaccatctgttccccctgtgtcggtcattctaggctggttctaattacagtatccctaaatcatgtgttcttccttgcttccaggcctttgcatgtgttgttctctctgtctcttggtctctgtctctttttcaccttcccccatgctttactgaactcatctttccctgtctagttcatttcaggtcttgctctcccctggggtgaggactctttgtctgcaccctcatagccctttttgtctatgtttctcttagcactcattcccttttgtgggagttacatgcttacttgcctttccccagcagactgagagctctttgggaatgagggaatcatggaatgtatgaacaaatgaacaaattgaggtggtttgtaaattctgctgctgaggaatttttaaggaagaaaatcagcatttactgaggacctattatgtcttaggcactggactagatattttacatgggcagtctcatttaattttcacaatggccttggattgtgaatattagaggttatacaaagaagccaatcttccttcagtctttcattatcatccttctgtttttggactgactcatcataamtgacctgctttataatttaataatgagtacttttaaaacttaaaaaaattactttcttttaattttgcagtttcacagtttagcattgagtacaataatgtatcagatgactgtcaaaatgcagaaccaactcttttgctggaaataattacactttgccaaacccgtttattttgagcagctccagtgtgataatgtactgaactgtaaatgtgagtcttgtgatgtatggattatgtggggggatcagaatggcaattaaaccaagtgcagatccactggatgggtgktaaaaagggaaatagaacatgtccctttgttaaatacattcccctgaagataagtttgtaatttgacaatctaggcagctggaaaaattagaaactgcttcactggagaagctggcctgattcttcaaacttgcacttggaaaatgaaaccattcgttctcttggtgattctctggtcagattgcttgtttctcagtctgcaggcagttcaggatctctatgcatacgtagacctgctcccttccaggccaagtctactgtcttgtgggaatggttgctctaatctcacatcactggcctcccatataggccactgtagccttaaacttggtctgtctaaagggagactttgcctgctagagtgagagttgaagttggacagatgtgtttgaattcagattactatcactgattgacaactgtgttatttagggaaagttgcattcctcctctcagcctcagttttctcatctataaaatggagatagttcattgaatttattgagcacagttatgtgccagccacttccaaggcatttggggaatagacagaaatccttgtctttatggagtttacattttagtgaggagagacagacattaaacctagacataagaaataaactcaaataccatgttagaagataataaatataatcaaaagaagaaaaaagtgagagcagggtaagggattttaggagttctggggaaagtgtgagttgctgttttgtttgtttgtttgtttttgagacagagtctcgctctattgcccaggctggagtgcagtggcgcaatctcggttcactgcaatctctgcttcatgggttcaagcgattctcctgcctcagcctccygagtagctaggactacaggcgcgtgccaccatgcccagctaattttttatatttttagtagagacagggtttcaccgttttagccaggatagtctcgattccctgaccttttgatccactcgccttggcctcccaaagtgttgggattacaggcgtgagccaccgtgcctggctgcrgttttttttttttttttagatggagttttgctcttgttgcccaggctggagtgcaatggcacaatctcagctcactgcaacctccgctccccaggttcaagcgattctcctgcctcagcctcccgcgttgcagtttttaataggcctcactgaaataatgacatggagttggtgagggacttagccatgcagatatctggggaagcatgtcccagtgcaaaggccctaaagtgggagcaggcttggcatattcaggaaatagcaaggaagctggcatgactcaagtggagtgagtatgggggagaataagagaggatgagttcagggagataataccctcaagggttgtaaggatttaataagtgatatctataatgcatcttgctcttccatttcactacccatttttcaaatggtttggagtctgttacccagactccaaacttcagtgagactttgatgtcttccttttctgctcacattgccaatcacttactgtgttctgtaaccatctctctctcttctgtccctttttcctcattcccattacccttaacctagttgtttccaaactcttgcctgtctaatcacagtggcctcctagccattagatctgaggcttccggtctctccatctccatccctccccttaccctttccttttcaggccatgatgcagtattgagccttctctctcctgcttataacctctcagctgctcattagtgtactcatttattcattcctttgtttatacattcagcatcttttgagaatttactaatgctcaaagtcatttgaattcagtytaatggaggaagcagacttgaaataattataataccaattcagaaatgtttgtttttaccctagtttgttgcaaaaaggatttggggttcaatgatttgttatgtaatatgatgagtaatatgcagcagctctctatatatgtacaaagttctgctctctcaacctagcatttagagtcttccctactgaggcacagtcctgcatttctagtttcatctcccaaagtcacgttaagtgaaccttttgcttcacctaaggggataacttgcagttctgtaacttgacttctctttcacacatttatacctttgctcacactcttccctttgccaggagtgctttttgcctaatccatattctgctttttttccagactagctttagatggcatctccttggaaagtcttccctgatgtccaggtcctaattgatcacttcattctctgaacttccagtaggtagggggagagaaagagagagagagagagagtgtgtgtgtadgtgtgtgtgtgtgtgtgtgtgtgtgtctgttcctgctttatttatcttactgattatgaattccttaagtcatggggacattttcacctacagcacctggcacagcaccttttccataggaggcagtaaatctttgaatgagggaatgaatggatgtttcccaggccatgacatctggggagggatttgccttggaggtgctttttcttatgttgatataaatgaagtgctgacaagttcctggagcccagatgtattgaccctgcagggagctgctaccttctggtgctgtaattcagaatgcatgttcttgtagaagccatgatgtaaatagtttctacaagtagttctctcactagttccaaacatctgacttagaaaaacatttttggagtcttgctcattcataagttggggactgtctctgttttgaagtgctccacttgtaccagcaggcaggtggtatctgcttagctatacccacaggcaccatggagtggagaaaggaacacagacttcgggtcatacagagatgatcagctgtaccacttcttagcttgtgaccttcagcaagttactttactgatttgagactcaattttctaatctgtaaaacaggaataaaaatacctaccacaggcataatgaggatgaacaaggtaatctgtgtaaaggacagtgcctagtaagtacttataaaccccatttaaataatcaaaacaacagtaaatttagtttcatttgcatctctgaagttcctgtggactaggatagtgcttctcaaatgataccgtgcatatgaatcacctggggatttcattaaaatgcagaatctgatttagtcagtctgggttgggacctgagattctgcatttccagcattcctatgctgctgatacggagaccatactttgaattgcaagatgtttgggtgatggttctcgaactatagcctgtttctgaatcacctggaaagcttgctgaaatgaatttctgggcttcacctctgatgatatactcatgcagtaagtctggagtggagcttgagaatttgcatttctttcttattcatttatttatttatatttccatagatttttggggaacaggtgatatttggttacatgagtaagttctttagcggtgattgtgtgatttttgagacccattacccaagcagtatacattaaacccaatttgcagtcttgtatccatcacccacttcccacccttcccccctgagtcattgaagtctattgtgtcattcttatgcctttgcatcctcatagtttagctcccacttatgagtgagaacatacaatgtttggttttccattcctgagttacttcacttagaataatagtctccaatcccattcaggttgctgcaaatgtcattaattcattcctttttatggctgagtagtatttcatcatatatatgtaccacagtttctttatccactagttgattgatgggcatttgggttggttccatagttttgcaattgcaaattgtactgctataaacatgcatgtgcaagtatcttttttgtataatgacttctttttctctgggtagatacccagtagtgggaatgctggatcaaatggtagttctacttttagttctttaaggaatctccacactgtttcctgtagtggctgtactagtttacattcccaccaacagtgtacaagtgttccctgttcactgcatccgtattcaaataatattcccagataatgctgatgctactgatttagggaccacactttgagaaccgttgtgctagggggataacagggatgaagttaataagaaaaaacagataaatgatagtgattgttccactccaggatatttgtattctctgccttttagcttgtacatgtccatagagtaactattatcagaccaggcttggaatgtcttattaattattacacagcaacaaaaaccaacacttattgagtacttattatgtgccaggtattgtgctaacacctttatatagtttcacttaattctgataataatcctgtgaaatggatactatagttttctagcttggtgtttcctatgctaaccaattcataagaatcacctggtgtgcttgctaaaaatacagatttccaggtctctactttgattctaatctggtggggctcaatgcctccaggtaatttataagctcagataaagctagaaatctctgctgcagttaatcagctactctgcttctctttcatctatgtccaacacaaaatgccaatttttaagaaataataataatgataataaatttgacactgaaagctgcactcagccaaattttcctttgatgattcagaaagccctttaggatctccaaatgccttagagtcctcattttgaacattcttggactgtagaggtacagaagggccaggtgatagagcgatgtatttactacaaagccagggaagcccatgccaactgtataacttttggctctcttgagcattttgtttggaaagttattctaggaaattggtcttcatygcatccagatggatgctgtgattccacagacttttaagaaaaatggaaaaaaaaaggttttacttgcttgtcttcaggccagtttgtttgcccacagcaaggccagtgtggccaaccacttgttgcagcacaacccatcactacgtcaacagtccctgcacctgctgctgtccctcacctggccagactctttagctyctccctggttttccagccactggcttctttgcctagcctttcccatgtagcctggcattgccttaccatatctcattggaacttggctaaggatggaaaatgggaaaggttcatagttttatttgtagttggaaattcaccaatcccctgcctgctctaggagatcctgtctgcatgccttgctgtgggtggtggagttgggcagtgaggtgtcgtgagggtgagattgtctgtgaaatgtaccacgcttgagtcatcagcaaagactgttatgagatcaaagaaaatggaggttttctttagttttactgatgccaatctgagttgttttttgggtcagctgagttaatggtcctcagaatagttttttcttgctaatggaaaaagtgtttcagtttgatggaatgagcactggaccaagagtcagaagaactagggactcagatcacctctccctttgatttcttctgtgaccttgggccagttaggtgatcatctctgaagaatagttttctctttaaaaaggggaggttgagctcagtratctcaggatgagcttgatattctgtgatcttgtgatgacctagtcgcaggaaatatgccatcaaaataacttgtcccaaaattcagtcaagttcacccactcagccaatatgtattcagcatctggtatatttcaggtactgccctgggcattatgggggatacagtgattaataaggcacattgatccatttactcattcattcattcattcattcatacaacgagcatctacttattgagcacctatttatgcaagcactatacaaaaagctatgagagatacaaaaatgaattagacacaggttttgttgtcagtcaatatgccatctaaaagggacgtaagattgcaataaggaaagccgttcctaaccatattctctaagagaggacctcttcttttattctccattcctttcctgcttttactggcacttatcatctgaccttattttatctgtttagtatctgtttccscatcagaatttaaactccatgagagcagggccctttgtgttgatcactattatattacagtgcctagaacagtgcctgacacaaaataaccctcaataaaatactttaaaaataaaatatgtatgaaagaagctagaaactatgtgtcataaaagatatttagataaaatgttatgggagctcagtgagaggagagatctcttttaacgaggacaatggtttttaactatggttgcatattagaaataccttgagtttctctcactctttctccataaataaaaataaaataaaataaaatacttagctgagggcagtagtacatgcctgtagtctcagctactcagaaggctgaggctggaggatcacttgagcccaggatttggaggctgcagtcagccttggattgtgccactgcattccagcctgggttcagagcaagaccccaactctaaaaaaataaaataaattaaaaaaataaaaacattaaaaatgttacttgccaagccctaccccaaattcattaaatcgtcatctctgaggataatgcttaggcatcagtattttgtaagagctcctcaggtactgataatatgtagctgaaataatgtgaactagtagaatagtcaggaaaacttcatggatgaggtgggatttgagctggcttgaaaatccgtaagatttggacaagaaggaagcattccagatggagtgcacagcatgaacaaagtacagaggcaggaatcacagactgagttcagggatcagcaagtagttcattttggctgtagcctaaagaacacaaagggaaataattgaaacaatgttgtaaaggtcaactggggccaatttgagaagacctttaatgccaggctataggatttgggcttcattcagtcatgtagtcagtgagaattgtgaatggttattaatcaaatgatgtgatcaaagccttccctggctgcccttggaggatggcttggaagtaggcagggagaccagtaaggaaacagttgtcaaagtctaagtaaggtgggctctactgagggctgcatcactggtgttggagagaagggctgcagtagagcctgtacaaccaggctgtgtgagggctgcctacactgcagccacaggtctcttttctcttggtggagtcactggcattgcattttaatcaagccaggggagtcagtctgcactggcattctctagcctagctttttcctgtgcaygactgaggagtagatagtgcagctaagcctccttcctgaaatgataggctgttttatccagagaagcatttctacaggcagaactcagtaccccccaaagctacctctgagataggtttctattatcttacaatagcagtatgtgtcttctctagctaattccagcaccatgaatgaagtcagctctaccagtgtctggagctgttaatttcttaagctctgggtgtactaacaacatcctgcctccaaaaagacagctttgagctagggctggggtcaggggcccaagggtgtatttctagtagcttcatagcaggacgctcatttataaacagctgaagtttttggaggcacaggacatctgcacaggcaagcatgccatatgtgtgtggggctggaagaaagtggggctagtggaggcaggatggtgattgggtctagtattgctgatacaggcttatgcagagaggactgcctgcccttggccagatgctgcgggtagccagtgcatccccagggtcrtatactacccaaaaggacaggcaagcaagagttgctagtgcagatattttttctttccctctgtctgtttagccagggctgacctaactcacagtcatttgtttcagaatgtcagtccctgagatgggcacagactttacagtttgtaaggatcctttgcacccattatctcattggaatctcacagcagtcctatgaattaagtaagataagagttattgctccattttactaatgagaaaactggggctaggatagggtaaagtagcttattctacagttgtgtggatgtaaaatakgaaggctgtgacttgttgaagctggagccgagaggccacttgtcagggctgccttaggtggaatgtatacacattgtggtagaagaagtagtgaatgctttggctccctcataatctagctgggtgattctgcgcaagtcctttattatgcctctcacttttgtcagctataaaatgggaatatagcatctatttaataggattattcgaagattaaaatgatcattcattatgaaagtgtttagtacaatgcctggcatacattagatgatgttcagttcgttccttggtttttaaactttttaattttgaaatatagattcagagggaaattgatacagatgatcctatatacgcttcacccagcttccctcaatgatagaatcttatgtaactgtcgtatcatatcaaaatcaggaaatgggcattggtacaatacctcttgttaactaggccacaaatggtattcagattccctgtgtttttttaaagaaaaattatatcatttctgagtttgtttctggttctgaaatgtttttatacagtgtcatcattatccttgacttttctctggcatctaactttttagaagctttgttctctgttggttttcataacactgtgtatttctccttgtcatccccctgtctccttcaccatcttctcttcttctcttctatactgtatgtctcccagattcagttcttagcccctgctcttctctctgtttgttttgttttgtttctccctcttggatagggtcttacttttatctttattctggaatcagtattcccacctccacttaccaagcccctctctagttccctgtttttgactatttgctgaatataagctcaaactcatcatatccaaagctaaatttgtcatttttttaaactccaaactactacccagctacctccacttgacttccctgcttccattaatgagttgtcattcaaaaactgctcagggctgtacgaggggactttttggtgatagatatgctcatcatcttgattgtggtaaagattttactagtgtaggatgggcatggtrgataatgcctataatctcagcactttgggaggctgagatgagcagattgctggagcccagaagtttgagaacagcctgggcaacatgatgaaatcccatctctacaaaaaatacaaaaattagctgggtgtggtggtgcgcacctgtagtcccaactacttgggaggctgagcggggaggatcacttgagcctgggaggtggagattacagtgagccatcgtgctgctgcactccagtctgggcaacagagagatcctgtctcaaaaaaacctaggtgacaaagaaagactgtctcaaaaaaaaatttttactagtgtgtacatatgtcaaaacttatcaaattacacacattaaatatatgtgtgtgtgtatatatatgtgtgtatatatattttatatatattttaatatataaaatatatatattatatataatatatatataatatatataaaatacctcaataaaacttaaacaaaaaacttcccagagccagacatgaatcctggccccatcactcatacaagttactcacctttcctctgcctcatttttctcatttgtaaaatgagggttataacagtaatttaccatattggattgcagggaagattgagtaggtaaagtgcttaaaacattacctgatacatattaagttcttcaaaagtatttgttgatgttcctctcttattcatctcatgtgccccatgtctggcacagaataggtgtttaataagcgtttgttgaatgaatgttgccacagtcttgaagtactattttccctccctgacttttatttaaatattgcttcttctgtaaggtccagcttaggttctacttgatctgtgaggtcttgtctacccacctgagccacgaggccctcctggccaccctcctctatccccagcactgatgctttgtattagcgtatttgttactgattcacagccagatttttggttttgccttttttttttaaagtggctttcagtatagatatctttcttcttcatctacattggacatcttctgagggcacatgtaatttctgattttttttctctatgtcctcttcgcctatgctgggcatatagttggttttcagtaaaagtagaatgaatgaatgaatgagtgaatggtgtatgatttgcaaaatattagggagacttcagacgacaaattcccatgatttagcttattaaaacaaacccacaacaggccagacatgatggctcatggctataatcccagctctttaggagactaaagcgggagagaattgcttgaagccaggaatttaagaccagcctcgacaacataacaagactccatctctataaaaaaattttttttaattagctgggcgtggtggcacatgcctgtagtcctaactactcrggaggttgaggcaggaggattgcttgagcccaagagtttgaggttacagtgagctatgagttcaccactgcattctaacctgggtagcacagtgagaccctgtctctaagcaaaccaactaaccaaccctgaacttacaagatttagccttggagggaaagagrgagagagagagagagagagwgtgtgtgtgtgtgtgtgtgtgtaggtggcaaatggttccaagtctgttcctctgaattcaccttctcttttggatcttaggggaactgtaggcctcctttaaccccttgatccaagtttggaccctgaccttactgtgagtcccctgagtgcagctgaggcaggctggcagtgttctgacttgtctgaatgatagtgcatgagagatagggaactagacaaagagagaagaaatgtgaagcatctggctcacttagtctaggacactcagtctctggccctaaggggtggatgcaactcccctaactctagcctggtcctctgctttccagctgcagccccttgcctctgtgggaggtctaatcagaaactttcccccaggagctccttcttggatatatgacattttaatgtctaagattggaggacctggtttctacttctctgaatacacacttcctttattcagtttgagagatatatccaggatgatcactattcaggtgacacttctgccactccactctgcacaaatgtagttctggtttgtcctttatttgactctaatagcatgatgataccttagccatatcatcaagaagacatctatattctgatagttacacaaaataacacattattctgtgccatcccagctgggccctgatcctgcttacaagttcatcattattaataccattcctttggattaagcattgacctttccagcagaatctcccactgggaatggtaacatatcaggttcctcataccttggagtacattcctttatcaacatgtgttctttctcgtcacaaggaatctggaacaatttataagctctggattccttcaaacagaagagacagcttctggccaaataataattgtcaattacattgctcctttcatttacgaagtgttgtatgtctcatatgtttctttaaatagttctgtgaaataggtatcatatgcccattttgccaatgaakaatctaagattcctaggaaaacaatggcttgacttgcccaaggtcacagaggtagtaagtggtggagctacctaactccaaaaccggtcctctttccattgtaactcctggctccttctaccagcatcttccctttgatctgcctaggcttattctggctttagccccaggttttttctgtgattccaggctaaactatttattaatttctctgctgcttctatacctttttattcttgggagagttccatggattccagcaagaagaagttttacctctcaggccctgagattcttctgtggcttctcwtgctgatgayggaaccctatccatttccctttgctagagctcttactagtttctgcttttattttttctactgtcagatttgttgttggttctgctttctccctaatctgtcccatatttctcaccatttgtcctgtcagtattgctytgattcattaaggctcccccatctatcaggtaggcttggtttcccacgtgcatttatttatttactcactcactcattcatcaactgttttctgaatactgatgtcaagcactgtatttagagttccaagatgttaaaatatggttgaggagatcaaggaatcaggagccctttacrattcaatatggaaatggttgtgatggcataaacataagatgtttgtggagcataagaggagggatatgtcatccagatttgagggagctggtcagaacagtcttctcggaggggatcatgtctgaactgactcctaagggatgagcggaaattgccttagagtgagtgagtgatgatggtggtggttgggggagttgtggagagggcagagtttcaggcaaaaagagctgcttatatgaagatccaaagctgcacattcaggaaactgcaagcacttcagcatgactggagcagagcctgtagggatggtgagggatgagacaggagaggtcatctggaaccagattgtataggactcctattttgttctgaaggtgatgaggggccattgaaagatctgaagtagaagagtggctgtttaaaatagtgttttagaaagatcactgtgatggcagggtgaaagatggattggagaaagggagagataagaggcaagtcagaaaactgtgacagtgattgagggctaagttgcggagaacttgaactaaggttatggcagcaataatggagagaagtaaataggttcagaatatcagggaggtggaatttctaggactagtagctgattagctgcccatggagttgaggatgcatgctattttgtcttacccttagatttgtctgccttgctgtctcctacaagcagttcctttttgctgtctgaagagaaacctgatgtttgtttcctagttaactatcaatttccctttccctaccccatcttccctctgagatccttctccttttggctgactctacctttatcatctgtctgactaatgtccaggttattttttcaatttgtacttggaaacctgagtgacaatttgatatttctttaggcaaccctcattccccctctgcctggatagttctatcctcctccaagagtggtacctggggaggagtgaggaaaagggcaaccttatttgcggagctatctcaaaagaaagaggaggcaagtatctgccttacatttttagaatagaagatctttaaacacagggaaagaacatataactaattctcattgtgagaagagaaagcccattgtaggcagattgaaatgcaattggtgacattcagaactgacccctccatggtagtgctgaccaatttaatcttttatggaatagaatagagcattagcatcagaaggcactgtagagtttatccagttcatcaccctcattttgcagatgaagactctgaagtctctagggatcctgtggtttgctcaaggtcttaattatttagtagtagaactgggaccagaatggggacctctagttcagttcttgtttcactagtctgatgaaagtacatttttttttttttttttttttggtcataagtttgacagtttgacagactagagaataagagactcacaggatgttttaatgataatccagtttgatattttcctctttccccaaracactggaaatagctttccgagggtcatggactgggcgaggagaagaagggcctgcagacttatagcctagtgctcttcccagcacagtccaaagtctcatctagggcccaagacttggacaactgtggctccaaggacactgagcagaatcattctttaaatatattacaaccacattcagtttcataagatcgaaagacatgatttctttctttttaccctgaggttttttttttttttttttcttatttgatagaagtgtatggctgtggaaattacgtcagtttaattaggctgcttgacacagtacttttccactgaatttactaggaactgtgaatttgttgtaacaaactgcactgccggctgcagtatctgattggcatgccaggagcatcactagcgaacagctaaatagagattggggagaaaactgggtcaggaaacaggcctcctgtacctgcagaggctgcagaaggcggcgcagaggcggcaggtggccacagcatggcactgtctcctagagcctgagccaccaagcgccccacycccacttagctctgtgctgcaacccccaccccaccaaccccctttgcaggtgattgttcctgtggccattttgccttctgtttctctaaagaccacaaagcttttatatctcgcagctcaagaatggctttttctcaataaaaaagacagagactggtttagaccgaaacttcgttagccactggtattctaaaccatggatcaagtcttttggctttgcagagctggttttgtcaggaggctgaaactgggtttgagagttctgcacggtaatgaggaaagggttggtaatgtttcagtttgcctgtctcctgtattcccttccttatcagcccacccctccccgtgccctgctccaactatgtagcatccacctctgacagtgtcagtgctgagcaccaacacaaattaggagctcctagagaaggaatgagtggttatgccagaagggtcaggggaagcttcttgaaggcagtggcattcaaactaggttttgagtgatgaattgggtcaagacaggaagaaatgaagggaagatgctagtggcctcccatgctggtctcaggactgccttgttaaggctggagacctcctcagcaatctggggttggaatctatttcagaatttcgaggctgactgagaccctaaggatctgctcatccaagctccttattttatttatttatttatttatttttcaagctccttattttagagatgggcagactaagggacagagaggaaaggaccagagcataggccagtctagtgctgttacaaccacacagttcccatttgtgcacttgtcctcatttctaatgggtctctgaaaacattcacttcttctttctgggtttcactcctgtcacctctgactcytgtcatgtgagctctgagagacccaatggtctccacttataaattacccattagagaaggagccctgggtcctgctgactttggattccaaggtcactccaatctctgccagayaactgcatccttcctcctcagactaagcctggttcagccagtgctggttgttcagcaaggctggtgcctccccaagaatgcttggtaggaatgggtcttgcctcagagcaagggctcagattctcacagtcagaaaagctgagtgtgtcaagaacccaggccattgcacttttatgctattctgtgagaaaactgggctcattgtgactaaaaattgtttcaataaattacacttcaatttattgaaatttgctttaaagacaatgtttgttagaacatttaaattctgtacagcatctctttcgcttttgaagagaaacagagggtggaataaaagcaatctccctaataaattttcctggatattttggatagtctccagtatgaggaatgttgtctttggaccaagtattgatgttacaactgaaatgcagaaatgtgtacccatattcttatagatgtactaaagtttgctaatcaaatgaagtatttgtgtaggatctttcagggccaatttcaagaccaacatgttttggaagacagttgatawttcagatgtcaagtagtctctgggttgagcaaagttggaaaaacagatgaacccattaggataggtgaaacttctgcctgtgagaattaggctttgatgacccagggaatcaggcatccaggactgatccagttctcaagcagaagtttctgyctygcactgcattgcattgtgttttgggtcagagaaggtggttttaaatgcctctaaataatttccttggtcttggaaggttatatctgtttgcagactggtaggccttgcatctagttggtatttactaaaataaagaaagagggagaaggaaagaagaaatgcttcttgatacctagggaggtttctactcagaggctgacatagtcatataaatttccatttattcttaaactaggacttgtcactagagtcacctaacagttcatagaaatggtttgaatagacagagtaaagctggagagagattataatttgaagtttatcaagagtcacctctcttcctagaacagttacattaaaggaattgaaaggcagggcctgtggytatagtcgaatgccccagcggggctcagtctggcatggtggaggctggctgggtagtctttccaggatcccagcctctttggtcatggacatttatcttaagagtagactttagtcctcaaccattcacttttagctgctgcaaagggtaccttggagaacccccactcttttccttgaggacttcacttctgcttcactggttcaggctgtggccaatgttcctacttccagccttggaaatgcttttctgtttcttggagccctcattagccctctgatacaaaatcaacacagggtctaaagcagtgggctgcattttctcctcttccctcggctttgctactatcccaatccctgaacacttccctgcatatactcccctggccctagatacctactcctctgttctaggcacacagagcagttgtgggctaactgatctggcacttgtggtgatgcctgcaaggcctacacggccaaggtgaaggagggattatagtgttcatagttgatggctgttaccttgtcacttaagatgacctacggaagtggagactcccctttccctttttctccacggctgtcctcttccctacattaatgactcctcagttctgatcatggttagaaagctcaggcagcttcagtgtgcctcttccttccttccatatttatctgttcaatgatcaaatcctgtgatttttacctttggaatttcttttatatctctccccgtgttttaacttttgctgccacctgaacaattgcaaataagcttctcttcccaaagctctgctctggaaatgtctgtcctggttgcagcctctacaatgtcagcttccattgcttgctgcccaggcctctcctcatttacttgtttgcatctcaggcttttatactaaatgttcattaaacattctacratctatctagggtaaccttgtcagaacagggagggaaaaaggaaatatctatcttctttcttgtcatttctctcagatgaatgaattaaatatttttattgccttgaagattaattatcttctgtccccaggccagctttagtattctagctgtatcttcttgtgactggacctgccagttggagtttctgcccccactctcaactctgtttttgccaggtttttcttcatcatcatatcatgtaggcttccgcagtgagtcacagtccaggggttcagagagactagagtgtgacctgcagrgtttagaataaattttgaattatctatcttagagctgagagacctcctgaaatcttctggtcctttctggcacatgagatactgttattgtacttaacaagtgaaatacctgagacctagagagtttaaatgaccaasctaaagctgcccagctaataaattatgagtcctaatgscagattttatccttccgaggaaagccaactcttaatttggaaaaggcatcaactctctggattctctttgcagataaaacagtttaggacctccttttgtaataacatgccttgttagtgtaaggaaggaaagacagcttagaagtcatttccttggggcaggtgatgtctggtagataggcagatatcccttgtcccttgtcttctagaaagctcatgagctcagcatgttggcaactctagtcctgcatgcttcttgttcagctaatccttgcaggcgctcatgtacaaaatgattttttgtttgtttgtctctgaagtggcttctcagtccttgagggccaccaggcactaattcctcgtttctgcccatgttccacctaactaaaaaagtaaacttatgttctttgtacatgtgctgctcccctgacacctcctaccttccccaaatccctccattcttctgggtgttcttctgttcttctagttaccgaggcttggggttctctgtgattcagcttgatgagagtgctccagtcagttagttcatctgcactcaccaactctgccattttttctcttgaacatgctttgcaaattcatccattcctgtttgctcccttgtggcttccaccagccatagccgggtgtctgcgccctctttcctggaccactgtagcagcctcttagtgatcttctggtcctctgtcctttcatmcatcatgcagagtgatagactcccaacttttgaacttaaaacttggtaaagcaatcaggccaaacgttatagctctttcatcaatcaaaccttcarttcccatataggtttgtcataccagtcaaagtggactactcctgtctgctgcatgtttactcatttgttccctccatccctctctcccttcttcagygaaaaaatacagtaatgtttctttgcaaactataaagcatgcaaccttttatctgtccaacaaagtaccctgctatgtgaaagggaagaatggagttttggatttggtaactacctactgtgtgctgataatttgtatttagtatcttatttaattctcttgttattcctgtgagttagattgagttatgttcacgttacagatatggaaactgaagctctaagaaaaargtaacatgttctcctgctctgctgccatcctggtgctagacgcagagtggtgggtgggaactaaagtctttaagagggcaggagggataaagcacacacataaaacagctgtcatggaagaaaatgctcattgtcatgagaactgtagttatggtgctgtcaaaattctgagcatgatgaaatttcttctagctggaagattaggaaagacttcatggagaagttggattccgctgagtgtgaaggatgggcagtgttttgacagaaggagctgacaggcagagatcaggaagggagggactagcataggcagaggtacagagaggaaatgctggtagtgccattagaaatcattagtttacagtccactttggttggagcatggacttcttgtggtggaagatgtggtgggatgtaggctgtaaaagtgagctgtaacctgttcattgatgaacacttaaacgtctagctaaaggattcgtggtttgttctataggctcaggggagccattagcaggttttgagcagaggagttgctagtctgagctgaagtctagaaaggttactttgggcatccaatgaattggagagaagaagaaacagcagagagaggaaacacttaagaaactattgccattgtccagtacaggtgttttgagggcctgaactagtagagtggcagtagagrtggaaaagaggggcaacatgagagcagaaccaggaaggcagaattacaggatttggtggttggccacacttggggagtgggaggaggaggtgattctgaggtaactacaatgatggtgatggcagcacctaacagaaataggaggatcagtaagggaaacagatttgggggtgggaagggatgaggtgggggtagacggtgtgttctgttttgtgcagcttgaattttaggtgcaggtgaattgcctatttcacatctatgttcagtgttcttcaccacgactgccaccattcctggtccccttctctcctccctctttattaagcaaacttttggctccttttacaatgtggctgagtgaaactctcaagtagtctttgtttatctttgaatttctgatgtaccatccatgtcacttggtatttcctaaggccagtctccccattgtatgcttccacacacataaatatacttacaggtatgagcacctggtggttataactggcatagtaacaccagtggttcatgtttgtatgaacgtttatggttggcaaagcagttagaattgtcagaagtatgttgtacttctccgctaatcccctaggtagggtcactgaaccattgactcaataagctaaaaaggttattagagaataaacagtagattttagtttaataataaatgcaattggagccattagcatatatcaaataggaaagttagatgacttttagctgctataagtacatagattttgttggaagagatgatcaaattttaaaatatattcaggatgatagcaatgccgagattgatgttttgtgggtattaagaatagctgtcatgtatagggtactttgtacaatactgctctaagcattttgcatatcataattcaaatctcatggtaacctagcgaaatggcaactatgttattcttgttttttaggtggggaaactgagacgcttagagttaagcagcttgcccaaggtcacatagctcaaataaggcagagccaggattcaaactcaggccgtctgtttctagaccctgcactattagccactatgtgtactgccccttggtgatatttcagtcagctttgaaatattgtttaaagcaaactctagcccactactcttaactcctagaaggtagggatattgtcttcattctgtctgtatccctagtgccagcacattgcctgacatatagtacatgttcattaattttttatttagtttttttttttttttggaggcaagagtctcaaaattcaggctggagtgtagtcatgccatcatagctctctgcagccttgaactcctgggctcaagccatcctcccacctcagcctcctgagtagctaggactacaggtgtgtgctaccatgcctggctaattttttaatttttttttagagatggggggtctcagtatgttgtcctggctggtcttgaaccgctggcctcaagtgatcctcctgcctcagcctcccaaagtgctgggattacaggtgtgagccaccatacctggcctcattaaatgtttgatgaatgaatatctttctaagttactttcctaatctgatatgaagtgaaggtggtcaaggaagtttcttacatattcctgttgttgctgctagagatgctgtatttcacagaagaggtatggtatggtgatatattaataggtacacctttggtgtagatttggacaaatcactgagactctctaagccttagttttattatctgtaaaatagaaacaatgatggaacctgcaatgtagggctttagtaaggattaaatgaaataattcttgtaaaactcttagcattgtacttggcacatagaactcagtaaattttggattatattattactgatggaaattttgaaaccgtagaagggaaaaaagtcattttttagagtaggaccaaattattaattaaaatggaaatatacagtgattttaaagtgccctggtatttatctgttctcacactgctataaagaaatatctgagacttggtaaattataaagaaaagaggtttcattggcttatggttctgcaggctgtacagggagcatagtggtttctgcttctgggaaggcctgaggaaacttacaatcatagtggaagggaaagaagaagcaggcatgtcttagatagctggagcaggagcaggagagagaaggaggaggtgctacatacttttaaacaaccagctctcacgatcactcactcactatcatgagaatagcaccgagagggtggtgctaaatcattcatgaagggccacgcctatgatccagtcacctcctaccaggccccacctccaacactggggattacaatttgacatgagatttggtggggacacagaaccaaaccatatcaggcctttagagatctaaaataattgttgatgggtgcaaaaatgttttgtttgctcataaaattatagctaacacatttagagagaattaaactcaaagttttggaagagttgtttttcttttccatctaatgtttcttaatgaaatataaaggaggtctgggggaaaaacgttttcctacccctcaaacaatttcacacttccccttttgtttctctgggccattagatattcagtggacaagggggcaagtgaaccatcatgtaagcatctactttgtccaagatgctaaataatagctaactgaattcaactcttaggatagtcctgtgaggttagtactataattcctattgtgcaggtgagaaaactgaggcccagaaagtcttagtaacttggccaagttcacagaagattgtgatagaacctgaagttcaacctactcttacctggactactgcagtagcttcctgacagtctgtgattgcagagctcatgttcctttctccctgccgtgcacccttcctgctgtgtgtggcagagggtgacagcttatgttcacagcttcactttagagctgctagaacaggaattcattcaaaaatatttgacctgtatattgcttgaaggcaagacagggccagattcctgagtttctcagtcaccattgctgcctacttatttaaaatatattttttaatagtgttaaattatcatgaatgctcagccctgccagtgtggcccctctataaatgggacatattattaaatggaacttgacaagagaaatctatgtagcatagctttttgaaaacttggttattcccttctggaatgtattttaaggtttcaaattgtgcttttgatagaccgtttaccaacattaggggttaatggggtccttagtcttcttagagtggcagagaaagaaatgaatatatagtggtgtgttttgtgagtggacctccccattctccatgctaggctgaaggtacaagtggaggcagaaaagtcagacaggaaggggataggatcagtcaaccaatccaccccaaccacagcctttctattgctatacattagatttgtttttctgcctgctttctatcactataaattagatttgactttcctagagtttcatattaatgaaatcatgcactatttacttttttgtgcctggcttctttcactcggcacagtggtttttgagattcatccatgttgttatgtgtttcagtagactgttgcttttgtattgattagtggtattccattatatggttgtactatgctttgtttattcacttatccattgtattagttctctcttgctgcataacaaattaccacaaacttagtggcttaaaacagcacataattaatagttcatagtactgtaagccagaagtctgggtgggattggctgggctttctgtttaagatttcacagagcctaaatcaaggtgtcagctggactggattcttacctggagactctagggaagaatcagcttctaagcttgttcagattgttgggagatgtcagttctttgagattataggactgaggtccctgtatctttgctggttgtcagccttgagttgtcgtcagcaatagatgctgctctccagttcttttatgtagcaccacatcttcaaacccagcaatggtcccttacatccttcttgtgctcctagtctttctgatttctccttctgccatcagccagagaaaactctcagcttttaaagggcacgtgtgattgattaggcccacctggagacagtcctttgatttttggtagagctttatttttagaatggcctttctaatattaaggtgtactttgacttttaagacttcccttcccttcccttccccttccaagtcttctgttctccagactgaaaacactcatttttttccctttattttttatgtgatacgttgtagcatagcattaagtgtactctctggaattataccataatttgatttaaattgcagctatgccacctatgaactgtaatattgaaaaagttaacttctctgacctatggtttccttatgtaygtatactttatagaattaaatcacagattaaatgagctaatgcatgcaaacaaaattcctaagcccttttcctgtgacattatatacaccccatatatgttagccaatattatcatttcaatattgctaccttttccccattttgttctttttcttctgaatgtggttcattttgtcaatgatcttaataaaatgtactccccaaattgtatagttgtcttaaagagattcatagcccctttttcaataattctattttagaaaacttatcccaaggaaataattagagatgttaagattttttgttcaccacacactttataatgacaagttattgaaagtaatgtaggtaccccatagaagagaaatagtgaaataaggtatattcctatgatgctataaagtctggaaaatcacattttcaatgaaacaatgatatgggaaacataaaatgttaaaggcaaaggtcatgatataaaactgaatatatagtatgactataagctgtgtttctgaaattatatatattttattcacatgcagacaaatatcgataggaaaggactaaagggaatataccacgtgttaagtggacagtgggattatgggtgtttttgttttccttattatattctttgcaataagtgtatattacttttataacctaaaaaaataaataaactttatttaaaaattattatgtatatgtatatgtatgtcacccagaacagaacctgaaaatctacaactttattttgtaccagaaaagttgcagtcatgtcagtagatcaagaaggtcactgtgatgatcactcagctaggaactggacttctggcagtgggattctagcaagctgcccctggggacaggacagcagcactcctaagtctgctgacttgtcgggctgtgcctaggaagagastctgtcaggctgggttacgtggcaccagtcagctgcaaaagatatattcatcattcttgctgctgtgttcaatgttatattgtatacacttgctatgataagctttgatctctctgtcacatcttatcttcattattgactttttaatcccagaaagagtaaagctttaggacctggcctcaatacgttttgttttgttttaatcacaaaatcaaaagtgatccttacggtgaggggctctggggtaccagagggcctcttgattaggggccatgttcacgtgtttgtgcctcatgcctggcagtggcccagccaagctctgctgtgcagctgcagcaaaggcaaagattcttgggctctgtgcacaaatggctcagagtcagcctgtcatctggttgttgttgttggggatagaatggagacaggaaggggctgtgctgcctttccccatacactacaggcccactttttaactgtctctgccctgtggcatcacccagggaacttttccctaggccttgtgggatctgcctgtgatgttttgggaggccattctgtttagccactgactcaaattcttaacgtctgaaggatcatcagtctctgaattcagccattacttacagagttcaatgcatttacaagaccctggtgaggagctgaggaagttcagagataaattcagtgtcattcatttagcatttcctgagtactaatgtgtcagcctctgagccaggagcagtaaggggtacccagataagtggcttcaattcawcaaacatctcattaagacctactatgtacacagcactgtgcaagccactggggatagaaatgaatgaaatatatcccgcgtgattaagaaagttataatcaatataatttgggaagagacagatttgaaaaccacttaataataagtagagaaagtactatttctatagcaggacccagaggaggaagcaattacttatgaagtggcccatccacttactagctatgtgcttttagtcaaggtatttaaccatcctatttctcagttaatctataaaatgtggatataatgtgttaatccaccaaaagtacctagaataggtttagtaatcactaaatgtaattcttttccttttcttcttctcctctctccttccttctcaaggatgagtggtgaaggtacactgaagtgagagcacagtgtaagttgggcatgatgaggagtggggtggtgggatgctgtgtggaggggtttgatgaggtaggagtgcaagtacttgtgggtaattttactggggaaagaggctagagaactgcattgggtctagaccatggaagatcttaaataccagacaaaggaatttggacttcggcaatgtggagcaaaataattcacttgtactttaggaagaccattttgacagagtgggggagaggtcagaggggagaggagcacaaggaagytgctgcacaatcccaggcaagagctaaggccagaattaagactcagaccatttctctgacaccctcagtgtcatggaggctgagcaagatatttagttccaccctttctrtgtgcctgtggttttcttgctggaggaacactggtttgagtgatagtttattccatgtagcccataacttttaatattgtgaagttatgttcagccttctgatctcaaggctgatctacccatgcatccctgcccatttggctgtactcatcacatcatatgagagttgagcatatacacaagatctttctgcacgtggatactagtggcttgtatagagctgagccactgtggaaccagctgaactatgaaatagcctcatgtaggggagcctctctgaaaagaggcccagtatttatttacaacaatgaaaattaccttgatatagattccatataaagatgttttccagaggccccatgatatgaaaagagtggggatatcaagggagatggaagtagtaatattggttgaaccacttctagatactaggagatgggttgggttctttagcatatttgatctcatttaatcttcactatctggtggggcaaatattactacacccattttacaatgaagaagcaaaggttcaaaaagtacaggcttcatgcccaaggtcagacagcttacatatgtcagaccttggaccaggcttttaatgtccatgagcctcaattttctcatctatttaaaaaagtcataataaaacctacttttagggctattttgtggatcaaataaggttctgtacagataaagagaaaatcattccctggcatccaggaactggcctggtactatcagtcactgggccttggtgttgctgtgagctggcctggcactcaggtaggtcttgatgttctcctgttgaacatatactacttgacaaaacgtcaacatcagacaaggccactctgtgaccatgatggatcaagacaaaaataagaccactttgtaatcatgtgtgaacacagacaaaacatgaacattgtccaagccataaatcaccaaacatcccacttttctgtctaatagagtcctttctaatatgttccaggctggagtgcagtggtatgatctcaactcackgcaacctccacctcccagagatgctccatggtttcctgtagtgtgtgttctccttcacagcaataagtagtaaacccgtctgttcaactacacacaagttcctggtagtcttgggctgcagggcattaacagtgaatacacttggaaaccgctcagtgctagacaaatgttagtggatgttttaagtcagttatctatcgccacagtaatgttacgtaataaatcactcataacctagtagtttaaaaacttctaggttctactacgagaaacagttatttgttcatgtgtctgtggctcagctaagtggttcttctggtcttggcaggtcttgctcccatgcctaggtcttggctgatctttgattaggacaactgggagtggctcagcactgttccacatatctcatcattgaacagggtagcctgggtgagttctcatggcagtggcagagggcagaaggcaaaaatgagcataaatatacaaatgatttttcaaatctctacttgtgtcacatttgctaacatctagttacccaagcaagtcacatggctgagtccaaagccaaaggatgacgggctggtaaactgtctctgaatgggaaggcaattcatggcaaaggatgtggatatgaggaggagtaagaattggggacattcatccaatcagtctataatagtgttcttatgttttactatcttctaggcatgcttcctttttatccccaagtgctcctcacatttttcctaactctgtagtgtttttctggaaaaagctggaagcttcccctcccctttttcacccccattttaggcatagtcctactccagaatttatctatatgcaaatacttattttcagaatttttgcccacttggaaaaaagatcctaaaagatagacaaggagaccaaagaaggtggtggcttaggaaaaatgtctagccaatagtaggacagatacagaaactcagaactcaaaaggattttaataattagctttgagaggcagtctgtacttaaatgcttcccatagtgggtagtagctcaccaccttacaagatataccactctgttttagaatagctctgtgttaaaaaggttcttctgcatattagaccacattctatgttaataacactgttttgccatctggaaccctgcagaacaagttttctatgtgactgtctttcagttatttgaagagtcatatgcacctccacctaccacgtccctacaaatctttttttccaggcttaacatgtattgtttcttcagcagctcattatatgacaatttctacatgttttaatattctggttactttgatcttattattccttaaattcagtatcttaaaatgtgagagagagtcccgaactgaccacagctctccaaatatgatgtgaccagcacagaggacactaggaccagttcatttttgtgggcaaaaatgtaatgcagcccaggatcctattttttgagaggctatgtcacattgctgactcaaattgcaagtatggatcttttttcacaagaaatgctttttagtcaggtcttgccaattctgcatctctacaactttttttttgaaactgagtttaggaattcacattttaaattataacctatgtgtttctacttgttcatctcgttgagtccagagcatctcatccaaggtactggctgtctctcccagcattataaattctgtgtgtttagtaagcaaaccttcagtctttatccaatttgttgatcagaagtttagttaggccaaattgagggccatattccttggtaaaccacaagatgcctctaggtaagagcttcacataggaagatttctgttttagtctctggcttatattccaatgagtatcattatttattttgatgctcaaatygtcttatatttagccagtgggaaccccttcaagtttgcttytgtgtcatttgacatgcccccatcattttttgagcacttttttttgctctctgacacaagatgttacaggttcatcttatactttccctgcctcagtcctagaatcagccatttctccaagaataattttttagtggagaatgatttttagaaataaaaatcagctaggcgcagtggctcatgcctgtaatctcaacactttgggagcctgggaggtgggagtatcgcttgagcccaggggtttgagaccagtctgggccacatcataagaccccrtctctacaaaaaatcaatcagtccatcaatctcaggtctgggtgtgcttgtatcattggagattgctgctcacagsctccctcagtggacaaagctgagaaaacatgtgagagaaaacgtgagaaaaacatgagtttgtgcatatacagacacacacacacacagccctacttttctatatatatttctgtttctctgtctgccttgaaaataatgagttcacgccagcgtctttagttataatgcagcactacagagttccttctatatctcactctttcagttgtaattcatttccctgactatgagaaacctggctcccattatcttcaatacatttacttacttgctcagttctcctgtatgaaaccgacccattgcatcacagtcctgctgactaccttccttgcacaggttgattccccaccaggccacagctgtccagccaggctctgaaccttcactgggaccctgctgccccttcttagccacttttctcatgtaggttctgatgcttggccactttcctcacttaggcttaagaaggaagctatcctgtcttttttttttttttttttttttggttgaagtgtaacttacctacagtaaaatgcacagatcttaaatattcaactcagtgacctcttatatttgtatgcacccatgtaatcacccaaattaggcacttcagtaagcttcctggatatacctatcccaaaataaccattattctaaactttcaccacagattaattttgcttaactttttattttgaaatgatttcaaactcacggaagagttgcaagaataatataaagaattccacaaatcccttcacccagacacagaatgtattaacattttgccacatttgtgtcctctctctttttaaaacaatttaacgttgatagaatactcttatctaatctacagagcttctgtatatttttccagttgtctcaatgatgtcttttatgacaatttttcactttgatctagcatccagttcagaatcatatattgcatttagttgtcatgtccccttgcctcctttattctggaatagcttttctttatctcttatgacattgacattttttaagagtacaggacagttgttttgtatataatgtccctcaattggttttatctgatttttcctcatgaktggatttcacttacacacttttggcaggaatactaaataagtgatgttgtgtctgtctttagtgcatcatatgaggaggcacctgatgtcagtttggcacattattagtgattctaacctacatttcttgtgtaaggtggtgcttgcctcctttctctgctataaggctaccatttatcctttgtaattaagaagtaatctgtgaagagatactttaagactatgtgaatacccttttcctcttcagacttttgcccagtagttttaacatgcattgatgattcttgtctgaattaactaatgattgcaaaattattttctagcccaattattcttttacatttattatttttggcatcctactataagaaagagctttccctgcttccctatctatctattgctcagtatatacagtggatttttattttattcaatgggctataatctactgtcattattcattttggagctcaagttctccctgatttagctagtgggagctgtttcaggctggctagtttccttttgacacgtctcctttactcttttatcactttcttacttcgtggtacaaatacatgttccaggctcaaactgttctttcctcatcccaaccctagaatcagccttttctccgaggagctctgatccctcttagttgaatggtatttaaaagccagggtctgtgcaccaagtaaactcattgctgctggggtgtcagtgctgctgggcaatttcatgttggtttaactcaatgcgtgtgtgtgtgtgtgtgtgtgtgtgtgtgtgtgtgtaaaactgtgagttcatactgataactctaattctaacctgatatccacagggtttctctttgccttctctcattctatatttgtgtttccttcaactacagtgagcattctggctcctagcaacattcatatatttcctcatttgcatggtcccacaatatatacaaaatactttcagaattgatacacgcatgcaatgaaagaaaataacctacaaagtagttaaattttttttgcattgtttgtttgtaaacagaagttatttagtcaaagtactgtgttcaagagttattctgacccccttcagagcagttatattatttatttgaaatcagttttgcctacttttgagtttcatattattattcttaaagatttacttatgttgtgaatatcaatatttccccccactgctgtaaagcagcagtccccaacctttttggcactaggggccggtttcctggaagaggtggggatgggatggtttcgggatgaaactgttccacctcagatcaccaggcattagttagagtctcataaggattgcgcagcctagatccctcccacgcggagttcacaatagggtttgtgctcatatgagaatctaatgccaccgctgatctgacaggaggcggagctcagatggtaatgtgagcgatgggaagcagccgtaaatacagatgaagcttcgctcccttgcctgctgcttacctcctgctgtgtggcctggttcctaacaggccgtggaattttaccagtctgcagcctaggggttggggacccctgctgtaaagtattctgaatgaactacactgtatccattatactgatgatgaatatttgtgttatttcatatttttattatgaataaaactgctatgaacatgcttgtacatgccttttgatagaagtaagcaataatttattttgggtacttgagtgtccacatatgtgtttagctttagtagatactgccagacagtttttccaagcagttgttgaatttacactcccgtcagcagtgtaagagttccagttatttcacatcctcgttagtacttggtgttgacagtcttttaattttaacctatcatggctactagggaaagggttaaattgtttctgagaagcctgccataggatatttacctggcctgaatctattaattgcctgtcttttagtttgattgtccaactcacatggttccattttgttctcagtacaagtactgagtaacttaagtaacttggtggcatgcctttactgaaatccagatgtattgttgtgttaggcttttttagttggcaaggaccagagatattagcagattattattgtgaagactgtattgtactttagcataagtgaggaaaacaggtgaagcaaatgccttataaaagaacaatgggaaagtcatttagaacccaaggcaactcaaaagcctaaaccttcttgagccctcagcagtrggatctattgattcttcctttagaactcacatcctggtgacttagcttcactttactgttccttcctgctgcttctgactcctctgcttgtacctcctcctcatcttaaccttccttgtgtctatttcttccagctactgctccagctaccaactggaggactcactccctagaactgtttcaaggcagaattttcactaagccgtttcacaggctgtggtcaatctatgcattaatccacattgagacaggtgtccatccatagtccaattaggtttggccccaggaagcaggactgcatggtatcaacacggccatttatgatgaagacattcccttagaagggcactatgggaaaagcaagcagtctgactgcctggctagtttaattgtatatattatagcctaattactgtgtatattatattstaattcagtagacatttctcaagccctctccttatctgtcaataaactattggaaaaggaaatgaactgtttatactgaagaaggtttttttgtttgtttgttttgttttgtttttagtctcgcttttagtactcgcccaggctggagtacagtggtatgatctcggttcactgcaaccttcgcctcccaggttaagtgatcctaccacaccacttcagtcttccaactagctgggactacaggcacacttcaccacgccgggctaattttgttgtattttctgtagagacagggtttcgccatgttgcccaggctggtcttgaactcatgagctcaagctatctgcttgcctcagcctcctaaagtgccgggattacagatgtgtgccaccgtgtccagcttgaagaactcttcatagtgaacctatgccagttsctaatgcttatagtctcctttcatatgttctcaaataatatataagtcctaaaatgtatctgtagaacagggtcaagcccaaagtgaattttattctgtagatagcagaggttaggatgcgtgaggtatacctggttgtttgaattccgttttacagatgagggaactgagggccagagggaggcaaagagatttacccaaagtcacatggctaggaagtgggggcggggggcatcaggacttaaatccaggttttctggttccatatccagaactctctccattacctcacactgacatgccccatactcgtgtccaagctgttaaaagcacaaaggagatttgataaaagcaaactatagccaaggcaagtggtgagaattgagaggaggcagatctcctaaaggctgaggtgatctgggggactgcctcaggttttgaactaggccttgtagagttggttggatttagaatggtatggagaagggagaatggtacaaatgaagatacaaaagtgggggaaatgagatttttccagagacagaaaagagactcgtgttgctgggttagagggtttatttaggaaaggagtggtaaaatgtgtgttaaacagtaatgagactttgataactgtgacaactttaattaaaaaaaaaatcagatcatgcccatgcatgtacggtgggtcatgcctgttatcccagaactttgagaggccgagggaggagggtcgcttgaagccaggagttcaagcagtctggacaacatgatgagatcctgttcctacaagaagtaaaaaaaaaaattggccaggcatagtggtgtgtacctgtagtcctcgctactcaggaagctaaggcagaagggtcgcttgagcccaggaattcgaggttatagtgagctaggttcacaccactgcactccagcctgggcaatagagcaagaccctgtctctaaaaacaaaaacagatcagatcatgatattatggtgagaagaaagcttaaagtcattggttgctaagactccaggctgaggcgaaaaggactaaactaagatgatagcagctggaaataagtcagacttgagaaccattgagaaggcaggattaacaggatctggagacagcctaaatataagggtgggagagagataaggaaaagagttagaactgtcacttgagagtttgagcctttgtgacagggacactctgtatcaaaagaggagagtatcagaggaggaggaggcagtatgtgtagtgagttagcttacaggctttggaccaaagcagacctgggaccagtgacttaactgctctgagcgggtttgctggcctgctatgtagggagacagattcccacttctcagagtggctgtgaagatgggaggtattgcaggtaaagtgaaattctataatgtcacatgcttgacatccaggcacttaaccaaactttagctctcttcttctcaccccaacttctctggaagatagcagaacctagttcaagmtcatttttttcacaggcatacatacaatgtgctttttttwaaaatgtatatataacatatacacatatatatgaaataaaatacaaattcaagcccacagagagagttaaagatatcttagtaaggctaggttcttccagaagcaaacagccgtgctgcctctctggtgtcgccatggccttccccagttgggaccatttctgagcttagaggtggaactctggtggctcactggattgcagtgtgcctgtaaaacgtgcccagcttccaagcactgcgtttctaatagtttggaaattctggttgtcaccccagagatacacggatggaaaccgggtttgggcagagctctagcaaaggcggcaccgagacgcccattccctcgccctgttaacccaggcggcgcaggctgcccagccagctggggctgccattctggagctgcttctggtacgcttctcccaccctggcggctgtgcccgccaagggctcgcagtgcggcacagagcataacccagtaccgtaccaacctaaaccccgttactccccttccaccctggccatcatgtgtttccgcacgtacgcctcgttgccatagcacctgaaggcgcccgggctcattggcaccmggcgagaaccaatcagcaggcctcgctgtccatctggcaccctgggtggcctttgggctgcggctggctacccctctctggtagaggaaagcggcccctggctggtggcgtggggctggcctcgcctcacttcctctccttggcgtacctgaccctgagttctggtccgcaacccggtgttcgtttcccaccccactcttccgcgccccgatttccccgtttagaatgttcvacaatctggcggcgttctgtcgccatgggtatccatgaggagggcaggcgacagaactttgttgccactttgcagccgttcccctaagaaatatccctggaaacagctccttgatcattccagaggtgggcactcctagcccyaggcaggatgttgtttgggtcctataaatctagggctctcccagscttacgtccctggcactgggcttgccagatgtaagggaactggatgggtggtttatttccatctaatatgagaaaaagaagggtacataccgttttgaggaagaaagcttgaacctgaaggatcacagaatcctgcacctccgctagctgtgaaacactgcacaagttaccttgcttccctgaaccccagcagcttcatctgtaaaatggttgtaacaaaggaatctcttaggttttgtgtaagtctatatgagataatataggtaaagcagttagccaagtgcctggcctataagtattctataagagccagtcagctgtttttacaaacaggtacaactgtactgctaagaaccaaagtactcacatccaacagttggcaagcattttcacattcatccaatttttgcttaaattattcgtttgttttaactcattaatgcattcaacatgtatttactgagcatattatcagtcagctcttgccctggtccagctgtattttctaagaccccacccctaggagagttttaactggccttgcaagaactgatgaagtctagcctggtgggtggrtgggagatcttatccctctggcattggggtttcggaatttgttttttgcagctctgacttcgcaggcygaggtccctgaacagagcagacctctctcatttctgggaagcactaagacagagcagctttccacagccacctttgcttctcaccccttacccttggggagttgtgtcccccttctccagaaggccccaatcrgcaagctggaacttgctttttctatagtggggtcctgtttcctgtaactgacttctgttacagtcttctgtgctttgctgtgctggagttgccagaagaaccctactctgctttcagtgcccccagcatcttcatgctgtatccttctaatgctgtctccttgtccccattgtgcatgtcagggtctgtctccaattggactggattggccacactgctgcttatacttgctttgggatcatataccttccctgagtcccttctctttgtactgccatctcctcacccccatgccctgtacttagattgtgtgcagaaagactactgagcaggcagtcttctagatgtctgagagacagaggacctaacacatgcacagtctgatcagacatcatagtgggataagggccatgatacatagtgctgtgggaatagccaggacggggcagctggctctgcctgaagaagtcagggaaggctttaccaggaggtgatgtttgaacagtctttttttttcttttttttttttttttttgagactgactcttgctctgttgcccaggctcaagtgcagtggcatgatctcagctcactgcaacctccacctcccaggttaaagcaattcttctgcctcagcctcctgagcaratgggatcataggcacccgccaccacgccccaccaattatttttgtatttttagtagagacggggtttcaccatgttggccaggctggtctcgaactcctggcctcaaacgatccccccgccttggcctcccaaagtgctgggattacacacgtgagccaccacacccggctgagcagtcttaaaagatttaccttggtagacagtgggagaaagcaaatttcaggcaaggagcatagcatgcataaaggcctgaaattgcgtgatgttcttagagaaaagtaatgtgatgtgaatagaacaaaaggattatattatttggtttgaaggttcatgagtagcagagggaggaaatgaggccagagaggtaaacagggacctattcatgagggccttgtaagatgttttaggctttatcctaccaacactgggatcctgtgaaggttttatacatgggcatgacatggtcagatttgtgcatgaggaaggcaggatgcatggctgtaaggggataaattgtctcatttgtcctctagcgagtctgtaaggcaggcagggaagacactgttatctactttttacacctcagaacactgaggcccaagaggtcaaatcaaataccttgccctttaggtctcagagccagaaagaggaggacctgggactcatctagcttcctggtcctgaatctctttctcttgggcgcattgccattgttaacagcatcttctagaaagctgcctgcagctgagcagtgggtagatgctgacaggagcattatgaagcaaatggtcattgatacagtttcactgagggagtataacactgggattttgcagcctgtggtgttcagtstcctgacctctatgccagcacacagacagcaagaagcagtggggaactttgagcttcaagctctacattggtttgacaaaatcaattcatcactgtctcattcattaatgtgctgtctgatactgacatttgtcaatggcttgtttctggaagcccctggtcctcaaggctggtcagctctacagtcacagccccagggtgaaccccagcagtcagaagcagggcttttctctctctgcattttgtaaaataaaataactttaaaacaataacaaaagtaacatgatgtagcagtaaagaacactagcttggagatcaggcagacctgggttttagttctgctgctgccacttgtctagctgtgaaggttatttaatatgtatgagcctcagtctccttatgtctcaaataagcaaagtggaacttacctgaaaagattgttgtgatgactaaaatgtgataatgtttataaagtaccttggcatgacacctggcatgtatgaatcctcaatatatgctggctttaattcctacagttactgttgccctagccaccactactactgccaccacagttaaataatatttggaaaatagagaatagtagaaaaaatatcttacaatcttaccaccatgatgcagctacccttataatttaaatttccttcaaatccttttcccccactacttctaaacattcctgattttatagcatgtatattttatacccaggtgggtttttttctctgtggtggtaactgcattacacttattttttctagtttttaatagatttttccctaattataaaaattttgtataaaattcggagtatagaaaaaaagaaaaagaaaaatcatactcattgttaacattttgatgtatctccttccattcttattcatgctttattatagagttgagatcatattacatatacaatttttatgtaatttttcatatcatgaatattttcctattattataagcatcattttccgaggctgcatattagtccatcagatggctctaccataatttacataagcatttcccaattgttcgacatctgagttttctccagttcttcaatcgaaatatcttcctgtaacagacctagrgaaccagcctcattacagccaggaagcatataatgaacttgtgctgcatatatggtcctgagtgaggcatagtgggagccctcaggtcaatcagacacagagccagccttaaaggagctcagrgactaaacaacctggaaatacttactggtaattaagcactgtcagggagtccacttaagtgtgggtaacccttttccctgtggaagctgggatctgggaagcacagcttctacacaggaaaaagcctaggargccttgctgccccttctcacctatgaatgtgcagattggcttctaatgctgaaatgccttttgagctacactgtcaggggcctgagctaagaaccattgaatattacttccaagtggttttcactaggagagaatgagaaacactaccaaaggaacttgtgggagaattaagagaatcagagtggctctagtcttagttttttattttatttttttaattgacagataaaattgtatatgtttactgtatacaatatgatgttttgaaatatatacgcatggtggaatggctaaactggctaattaacatatattacttcacatagttgtcatttttgtggtgagaaaacaaaatctactttcagaatttttcaagaatataatagattaactgtagtcatatataataacatggatgaacctggaagacattattttaagtaaaataagtcaagcacagacagacaaataccacatgatctcattcaataaggaatcactcatacatgaatttaaaaagttgatttcatagaagtagaggatagaatggtggctctagtcttagttttgtcacagacttgccctgggacctgaggtaagtaagttatttctccctcccaagcctccatcttctcataacataggtgatctccagggcccttccagtattaacattccagagtacttgaaacattcctcttgccaggagctaaagtgagtatcctgataaaggtcacaggataattctctaaagcctagagctcctcttaattagtcctggggaaccatttatgcctttgtattcccagtcacttcctcctgctagcagttgggacatatggagactgaagggcaagaagtatctcccactggttggaaactctggattcagaaagccaaaaattgtcttttatgtattaggtatttgttcttttatgtactttgttctttcattcattccctcatttagcagatgttaactgaatcccaggccttgtccaatccatctgtgcaatacagaggtgaatgagactcaaccatgttctcaaaatagatgtagtctcataagaggacaggaaacaatgataaaaggcaacaagatggttgctacggtgggggtacatttaagggcataaggacaggtgcacctgagtctgcctagaagcaacagcaaagaagtcttagtagatactttgagattttaaaggataagtagaaattttttaggtatgcagtagaggagaggacattctgggtagaggaagaggcatgtgcaaggggctagaggtgtgagagaacatgacgtgttgaaagaactgcatatagtttgtgtggctggtaggtgaaagggagagtggacagatgagaaaaagtcaaacatttctccacagaccagtctgtttccactgaattctttgctcattttatcagtccatacgagagggatggtctttttagttcagttttcaaaaactgttatctttattgccttatctttccatttttacagtaacatatgctcattttagaaagtttgaaaaatacaaaaagtaaaaggaagaaagggtttaaaaaattactcatggtctcactagctaaagacaactttaatatctgatgaatttccattcaatattttttttattttctttttatgtagctgtgaatgtgttgtaattataatcttaacttttgtatgtgatgcttctttctatttccttcctaaattttgccaaaaatggatgttagtgtcattagaaaagaactatgattataaaatatactggctgaaatatctatccattttctttgtctttttttttttttacaggtctcttgtggctcagagcataatttggcaataattggtaagtaatttttatactgataactgtttcttctgaaaatcatgtggcagaattggagaagacttttggttaaccaaaagccatggtgcgtgcactcatgcatgtgtgttaggggagattgggggaaatggaagtttttggttgaccaagggtttactagaagctccttttctgaatatttcgattcatatcattgagcatctttttaaggtacctgagctggcctccctgcccgggaagtggcatttgagcatattaaagaactcacaggctgaggggcaccatgtgtagaaagccagacataaaaaggaagaatgattggactgcttctggtttttcgaataaatccccattctaagttctttcctattggtttggctctttctttggaaatatgcggctctgctcactgcccttgctgccttgtatttagtggcactcaggaactcccagttggactcaaacctctggttaatagaggcttcctcttagttggccctggataatcatagtttagtgttttcataattagatctatgagtaattcattcaagaaggcttctcattaacttccacaggtagactcagtttccatctcacagtacattaaagagactgcagtgtagggccagactgcctgagttcagtacagacttctacttactagccatgtgaacttggacaaggtattgacttctctatgctcatctttaaaatggggagggcaatagtgcctacctcatagtgttgttgcagggataagttatgtaaagcacatagaatgacgcttaactcctaggaggggctttggtaatgttcgttattattacctgatattatatgttaaagtaattgccctccgctaggctttagtttccccatctgtaaaatggagaagttaaaacagaaaaccaagtttccctccagctctgatattttaggactcttgttacaaccccaccactgactgatttgtgtcaataatttctgttcctggccactcctgtctcctagcttctaactttgaacttctaccaggccaggcccttgtgttttcctcatttcttgccgattcacagcacctaaagcagtgtgtggctcttagcagagactcacacattcttttctgaattgagctggactggctcagctgcctggggtggcagtagtttgaagcactactttgcaggcccaaacatgatgtacaaagaggcagaaccaaggacagcagaggaggtggggagtaacagggactggagttagagaaggagctagaaaatgtaacagcaaacctgcatgctttgcagcaggaccagatactttataccggaactgcttcggcctgggtgtaattaagacaagctaatcaaaagagtcaaaggcggtgcctaggacattgctgctactgctatcactggactgggagaggctggcttcccctgggaccaacataaacaagaagatgkyagggaatctaaatttgtgaaagcacaaaatccagatgaaggaatgggtcagagctagcaaagcagcaggctgagctgacrtaggcagcctggggctgtagaaggagcaaagactctgcaggcagacagccttggttcaaactggctccatctctgtgtgagcgtccatattcttctcatctttgtaatgggggtaatcattccgcctttcaggattattgtgattaggtgagataatttatgtgaaatggctggcagatataaattcctttggtttctcttttctcttggttgggtagcgggaggggagaaatacttgttagtgtaactgttctagtgaaatatttctttgttggaagagaaacaatgacattctggaaagatgtgtccagtgttacctgtgtggaggccatcagaggcagtgggagaatagggcatgctggcgagcacttgaggacagacctgttattttccattttatccccagtgcctgggacctggctcacagacttctgaatgaatggtttcagagtcaggaaaagtgagtgcaggcacagggctctgcacatatgtacctgcctggtggccaggagcaagaggctctccatcactggaggaatgaggccctcagtgggtgccctgcagggtgcaggctttgaaacaggaagctacaagaagctgcctgttagtcctagcaggaggctagcaagagggagacaagttgcaggtgaagaagagttcctgccagcttaaagccatgtttctcatggggttgagctcctcccctcaatcctactgcctttgcctgctttagagggatttccctgccttcagtttcattccctgaactctagcccttcagtgcctggtgctgkgtcccacatgtaaaaggcacaaaatagttatagactagactagaagagaacataaagcagccaaactttgcccaagggtataagcaaccytaatgtctgatgaatgtgtgacagatgaatcaacttggaaagggaggtgaaacagagaatggtgaaaggacatgattgagaacctagtctgtcttaggttagtggacacaactcctcaaagtatatttgttgtatctgctttgtagagacgaaacagactcagaagttaaatgggttaaacaggttgtagagataagtagcagtgttacctgagcaatggactcgctgcccagcgcacatagaagcgaatgctgtgacactggctttgagaaaagaaagtttattgtgagtcaattgacaaggagacagggaggcaacgctcaaatccatctccccgatctgggagtgggtcaagcttttatggcattttaaactaatcccaggtgatgccagtgcagctggtcagccaggctggtgatgctaacaattaggctgctaaagcttttctcctgagcatgccaggtaactttggctctgcactacctgtaacttaagcagtgattacttggtttgaattggtcctacggttacagcaataaatagtagagctgtctgcctgacttccaaaactgctcctctattctgtcatttccagtggcctgaagtagtatgggtagtagttaagaagagctcaggcactggggacagattgcctggatccagattctgtcttctccacttacaagctgtgtaacctgtataagtggcttaccttctctatgtcttgatcacctcatctgggatataatattattgacttcatagggttgttaggtaaagtgctaagaacaatgcctaacacaaaagtaaagactcaataaatgttagctgctattattattattctatattaagacctcaaggaaggaagtaattataagcctgaggccagggtaggaatctcaggagctagagaaggaagtgtctttcccagcctggatatcagggtccatggcaagatctcagcatagctgcaggatggatttgtaaactggagcctggggttcccactggggaatctgcacatccaagcagccctggaaacagtcctagcccagatttgttcaaggacaggattctgctattcattgtcccagacagggactcaggccctgcatgttccagcctgaagcaagccccatggaagccacatttcagtttcttgagaagatggaaattttactctgctgctttatgtgcttctgggtttctttgttccccttcttttgaaatttggtttagttacttccttagttttccaattaagtttctcttgacatgttttgtctttgccaccaggtgcccccatgactagacagaatggtgaagtggtatgagttcctgctttagactaaggaagaactgttggagctgagcatagagagactcaggtgacaatcagaaaagagagagctgaggccattgaccatggctggcttgggcattctctgcctatatgccttgtacaatcactctgcctcaccaagcctgattcctcatttgtaaaatcgacatcatgatacccactcccagaagttgttcttcccaatggcataggtatgtcaagtacatgctcagtacccgccatgtcataggtgctccgcaggtgttgtccacttggctgcttcactgattcactctcttcctttccacctaggatttctttccacatctgacaaagctcactggctaactcccatttgtgggcatagactgaggtgaactgagggcatgtggccatcacttgctgagaagatccctgcctttcagaggcagggtccccagatccagctctgctttcaggcccctcacctctgtgtctggatgaattggctccagctgttgtgcttccaccaggagcagcttattttggcttgaattggcaatttgcttgccttcttcctgatgtgcagttgttttgtcttcccttcctgcggagaaaaaagagctgactgcgtttcctctctccctgctccacacagacccttggaaggattttattggtggccctttcctggagcactcaggcttgccagacaggcattgttaaagggttggttattggcaggaaagtgtgatgcctcctcctcctcctcctcctcctcctcctcctccaagcagagccagttcttttactaaattggagctataatatatgcatggatttttttttcatttcacagatgattttcaactgttgaaccattgtacctttataatatgtatggcagaacatctaaccttggcatgaaaccatcaagcaatttcatgtaagaatttaataggaaaatagagaaataactctttttttggcactggatattcctctgagtggtgatatctccaaaccctagggccttgtagagagcttagaggcagatacaaatttgtatgtttctgtgcacaatgagataggcagaatgtaaatgctttacctacctcatcccatttaatcctcacagcaaattgatgagctggtactctggttaatcccatcttctrggtacgggaaaatgaagctgaaggtgagcagtttactccacccaggtcacacaagtaggaagaatttgtgtgttaggtcttttacccccayctctaatttcagagcctgtggaccgatgstgccttcctgcagactggtgacagtctggcctgtttttaaagccaccagataggagtacttcatctttttgtttcagtatttaagatgaaaaactcccttccatgctatccccctctctctagctccccaaaacccttctaccacatgtgcaggtaatgcctgttactagtttcttctgtatccttctagtgtccttttacatatgtaagtgaatactaagatatgtttttatccttccttttacataaatggtagcatactatactcatttctcagtgcctgatttttcycaacaatttttctgggagatctttccatatcagtataaaagctgtcctagttctttttttacagttacataatattccaaagttcctatgtatcttgatttatttaactagtgacctgttcatggacatttatgtaatttctagtcttttgttattataagcaacgctatagtgaatgaccttctatgtatgttatttcatgtgaggagagtatagttataagttcctagaagtgaaattactgtgtcaaagtataaatgtatttgtaattttgcaatgtacttcaaaattggcctccataggggctatgccatttttcacttccactagcaaggtataagggtgcttgtttattgcagcctccttaataggatatattaagaaactcttggatttttgccagtctgataggtaagcaactactcagggtagcttttgtttatctttttaagttgaagtataacgtatataatatagtaaagttcacaaatcttaagggttcagatgatgaatttttacatatgtatgtacttaagaaaacaccatccagagcaagatatagaacatttccagcaccctggaagactagttcatgctccatctctgtctataacccacccccagagctaaccattcttctgacttctgtctccaaagatgcctttgtttgaacttcacgtggatggtgtttggcttcttttgttcaacacattgtgtctgtaagagtcattcatgttgtgtgtagcagtaattttgtaatgcttggtaatattctactgtataaatataccacaacttatttaaccatttaactgttgaacatttgggttgtttctagtttggggatgctaygtacattcttatacacgccttttgatagatatgtgcatttatttctcttgggtgcatgattaagactaggaattctagttcatatttagtattagtaaatactgygcaacagtgtttaaagtagttgcaccaatttacacccccaccagcaatatgagagttccatttgtgctatactctcgccagatattttcaatcttatagatttaggcaattctgttgagtgtgcagtgtggaatctcactgattttaatttgcatttctctcataactaatgatgtggagtacctttttwcatgcttataggccatttgggtggcttcttttgtcaaattcaaagacttaagtccgaagactttaagtctttgcccattgttttaagttgggttttgtctatgtttctcttagtgatttkcaggcatcccttatatcttgtagattccagtcckttgttgaatatgcatattgcaaacatcttctcccagccagtggcttactcttttttttttttttttttttggagatggagtctcgctctgtcacccaggccggagtgcagtggcacaatctcagttcactgcaagctccgcctcctgggttcacgctattctcctgcctcagcctcccgagtagctgggactacaggcgcctgccaccacacccggctaattttttgtattttttagtagagacggggtttcaccatgttagccaggttggtctctatctcctgacctcgtgtggcttactcttttactctcttaatcgtgtcttttgatgaatagttatttattttaatgaagtccagtttattgaccattcctttaatggtttgaggtatttgtgccctacttaagacatttttactcattccaagatcatgaaagtattcttatgtcttctttgtgaagctttattattttgccttttatatttaggcctaaaatccatctcaagttagtttttttaaacatttagaaccatttattgaaaagttcattttttaccattgaattgtggaggtacctttgttataaatcaagagactgcatatatgtgttgatgtgcttttagattcttttttattagtttgtttttccgtttgtatgctagtatcacactagcttgattattgtagctttataataaatcttgatatctagcattataagccctcctactttgttcttttttaagattattgtggcctttttaatctgtctaattttagttattataaatgaaggttgagcttctttttatatgttcaagaactatttgtattttctcttttatgaggagtttttcattcacacccgtattagttttgttcattgttgctataacaaattaccataaaattaatggcttaaaacaagacaaatgtattatcttcaagtttgaggtcagaaatctaagatgggtctcacttggctaaaatcaagctgttggcagccttcattccttcctggaagttccagagagaattcattttcttgccctttctagctactaaaggctacctatattccttgacttatgacctcttccatcttcaaagccagccatagcttttcaagtctttctcctactgcatcactctgacactgactcttctgcctcccttttctacatttaaggacctttctgattacatcatccctgcctggataatccagcataatctccctgtattagtacattttcatactgctgtaaataactgcccaagactggataatttataaaggaaagaggtttaattgactcacagttcagtgtggctggggaggcgtcaggaaacttacaatcatggtggaaggtgaaggggaagcaaggcaccttcttcacaaggtggcaggaaggagaagtgccaaatgaagtggggaagagccccttataaaaccatcagatctcatgagaatttactcactatcacaagaacagcatgggggaaactgcccccctgattcaattacctccacctggtctctcccttgacatgtggggattatgggtattacaattcaagatgagattttgggtgggaacacagctaaaccatatcactccctgtcttaatatcagctaattagcaaccttaattttatctgataactcagttccccttgccatgtaacaaaacatattcataggctctaggaattaggacatggacatctttaggaggccattattttttctacctcaatatcctttgccttgctatagagtctgaatgtttgtgtctttcaaaaaattttatgttgatatttattccctaacgtgatagcattaagaggtggggtgtttgggaggtgattaggtcatgagggctctaccctcaagaatggtgttagtacccttataaaagaggtccaagggagcttgttcaccccttttgccatgtgaggacatttaaaaggtgccatctaaaaggaataggccctcactatataccatcagatcagctggtaccttgatcttggacttcccagcctccagaacttgtattatttatacattttccggtctaaggtattttgttatagcagcccagaaggactaagacagccttttatattgtcagtctttttctaataaatgtctaggtgttctttacatattagggagattaggcattgttctgtgakttgaattgcaaatgtattttcccagctttttatcttctgtttttgatgtttttgtttattttgtctgtaatattttgtcatgcaaccttttattttactatagattaaatgtatcagtcttttcctgtatggcttttggattttgagtcagggaatccttctctmctccagagtataatggtctttctttatattttattctagtatggtcatgcattgcctaaaaatcgggatacgtggccagggtcagtcgctcacacctgtaatcccagcactttgggaagtcaaggcaggctgatcacttaaggccaggagtttgagaccagcctggtcaacatggctgatatggtttggctgtgtccctacccaaatctcatattgaattcccatgtgttgtggggagtgaccttgtgggaggtaattgaatcatgggagcaggtctttctcatgctgttctcatgatagtgaataagtctcacgagatctgatggttttaaaaaggggagtttccctgcacaagctctctctttgcctgccaccatccatgtaagatgtgactttctcckcctkgctttctgccatgattgtgaggcctcccctgccatgtggaactgtaagtccattaaatctctttatttcgtaaattgcccagtctcaggtatgtctttattagcagcatgaaaatggactaatacagtaaattgataccaggagtagggtgctgctgaaaagatacccgaaaatgtgggtgcgactttggaactgggtaacagacagaggttggaacagtctggagggatcagaagaagacaggaaaatgtgggaaagtttggagccccctagagacttgttgagtractttgatcaaaatactgataatgatatggacaatggaatccagactcaggtggtctaagatggagatgaggaacttgttgggaactggagtaaaggtgatccttgttgtgttttaacaaagagactggtggcattttgcctctgccctagagatttgtggaactttgaacttgagagaaatgatttagggtatgtggtggaagaaatttctaagcagcaaagcattcaacaggtgacttgggcactgttaaaggcgttcagttttaaaagggaaacagagcataaagtttcagaaaatttacagcctgatgatgtgatagaaaagaaaatcccatttttctaaagagaaattcaagccagttgcagaaatttgcataagtaacaaggagccaaatgttaatccccaagacaatagggaaaatgtctccagggcatgtcaggggtcttgatggcagcccctcttatcacagacccagaggcctagaaggaaaagacggttttctgggctgggtccagggtgcccctactgtatgcagcctagggacttggtgccctgtgtcccagccactccagttgtggctgaaaggggccaatgtagagccctggccgtggcttcagtgggtacaagcctcaagccttggcagcttccacatggtgtcgagcctgcgagtgcaccaaagtcaagaattggggtttgggaacctctgcctaggtttcagaagatgtatggaaattcctggatgcccagacaaaattttgctacagtggtggggccttcatggagaacttctgctagagcagtgtggaagggaaatgtggggtcagagccccgacacagactccctactggggcactgcctagtggagcggtgagaagagggccactatcctccaggccccagaatggtagatccactgacagctgtgcacctgcaaaagccacagacactcagtgccaacccatgaaagcagctaggaaggaggctgtaccctgcaaaaccacaggggcagagctgcccaagaccatgggaacccacctgttaacatcagcatgacctggctgtgagacatggaggcaatggagatcattttggaactttaagatttgactaygctactggattttggacttgcatggggcctgtggcccctttgttttggccaatttctcccattttgaatggctatatttacccaaagcctgtacccccattgtatctaagaagcaactaacttacttttgattttacaggctcataggcagaagggacttgccttgtctcatatgagactttggactgtggacttttgagttaatgctgaaatgaattaagactttaggacactgttaagaaaacatgattggttttgaaatgtgaggacatgagatttaggaggggccaggggcrgaatgatatggtttggctgtgtcccagatctcatcttgaattcccatgtgttgtaggagagacacagtgggaggtaatggaatcacggaggcaggtctttcctgtgctgctcttgtgatagtgaataagtctcacgagatctgatggttttaaaaaggggagtttctctgcacaagctctctctttgcctgccaccatcagtgtaagatgtgacttgcttctccttgtcttctgccacgattgtgaggcctccccaaccacatggaactgtaagtccattaaatctctttcttttataaattacccagtcttgggttgtctttattaacagtgttaaaacagactaataaaatggtgaaaccgcgtctctactaaaaatacaaaaaaattagctgggcttagtggcacatgmctgtaatcccagttacttgggaggctgaggcacaagaattgtttgaaccagggaggcggaggttgtagcgagccaagatcctgccactggactccagcctgggtgacagagcaagactccctctctctcaaaaaggggggatatgttctgagaaatgtgtcattagatgattttgtcataagcaatataaagtgtacttaacaaacctagatggtatagcctagyacacacctaggctatatggtttagcctgttgctcctgggctataaacctggacagcatgttactgtactgaatactgtaggcaattgtaacacaatggctgatcagttatctgaaaactatttatggagttctttggctgccttcctgggtcctgttgctaccagagcagccgtaaggcattacccaaaattgcacagctggtcagtagcagagctgggactagcactcaagtctagcttgtgctattcagaaggagatggtgcctgattctcaaggggctttctcaagtggttgcttgagctgtttgccagacagggagacagcagctaaaggcagagcaacagttttttagttctattggttaccagtgctctgtcccaggtcttgcctttctcaggcaaaatatggtacaaaagattaaagatgatacatctgtatacggcatttactatgaatggagctttcaggactggaagttgttctgggtgagtcagtgagtgagtgatgagtgaatatgaaggcccaggacattattatatactactgtagcctttataaacactatacacttaggctgtaaatactgtgcacttaggctacactgaattacacacaaaaaatctctttcttcaaacgtaaattaaccatagcttactataacatgttgctttatgaactttaaaaaacttttttactcttgtaataacacagcttaaaacacattgtacacagtacaaaaatattttttaatatattttataagctattttctatttcttaaattattattattattattttgctttttaaacttttttgtttaaaacacaaacacacacattagctcaggcctgtacggggtcagaattatcaatatcactgtctttcacctccacatcttgtctcactggaaggtcttcagaggcatgtatggagccatcatctccaatggtaacaatgccttcttctgtaatatctcctgaaggacctgccttttaggaggtatttttacagttaacttaaaaaaaagataagtagaaggaatacactccaaaataacaataaaaastatagtatagtaaatacacaaaccagtaacatagtcatttatttatcaagtattattacatactgtacataattgtatgtggtagacttttatatgactagaagcacagtaggtttgtttacaccagcatcatcacaaacatgtgagtaatgtgttgtgttacaacattatcacagctactatggcagtaggcaataggaattttttcagctcccttataatcttatgggactaccattgtatatatggtccagttgttgaccgaaacttggtgatgttttggtcaacaaaatagcatgactatatttttatggttttatttttggcatctaaatcttcgatccatatggaatttatcctggtataagtcaggtgtgcattcagcctcacaattttttaaatggctgatcagttatctcaaaactgtttattgaattctttggctgccttcctgggtcctgttgctacgagagcagtcctaaggcattacccaaaattgcacagctggtcagtagcagagctgggactagcactcaagtttagcttgtgctattcagaaggagatggtgcctggttctcaaggggctttctcaagtggttgcctgagctgtttgccagacagggagacagcagctaaaggcagagcaacagttttttagctctcttgrttaccagtgctctgtcccagatcttgcctttctcagccctggaactgatatattcgttgccactaccacacctggccgcttggggcaccatattttcctctccaacaggccagaaacrtgataaaccttttacatttaagaaagatgtttcacaataaatacagagtgttttttttacagaatcttgcttattgctcaagtcacatttctgttaagtcatacattttcaaggcatagcttcaaatcccaagatgtaactttttacctctcaatcaaggtggatttttcactgttcctaaagaagcgacatttatatcactccacaggagtcattctatatgacaccacaggtgagggtgccaggctgttgaggaggctcccatacttgctaaattactctttcatgctggccattttaggcacaaggttgaccacctgtttagcacaatgctctggtcctttttagggttgcttacagtagtagaaactgcatttgtgacccactgcacttgtttacagttactcaagaggcttgaggccttgcgaaagtaaatctaatgtgaactcaaagaggaaaatacaaaaaattagagcaagttagagacagccttccactgtgcaccataactagagttatggtgataactctctgtgttatcctaggcagttactctccttctctgggcctctagaatccccatctgggaaatgtgggagctggactagacaatttctaaagtcttctgcaactctcaaagtctgtcttcatgtccacaaactgtgtttaacatcttcatagactcagaccatctatacttgccatgcatgcaataggtgcttcatgtgtttgttaaatactcaatgaacattatatgcaatattttctcattctctcctttcagcttactagtgtctgatgatgtgccatgtagtgttatggatgctgtggaggaatacaacattcatggaattcacattcatggaactcacatttagtgggaaagagagctatgggaattaaatttggccatactttggacttaaatactgaatgaatgaatgaatgaatgaatgaatacaaagcagaccatgataagaactaggagaaagaatgaagaggtaagaatgattgattttggaaatccttatggaagaagtggctcctcagtggaggaagggtaaagagcagcattctgtgctgagggataagcatgagcaaagggaaagaaggctctaaagtgtgaatggttgagggacaagtggtcagccagcaaaacagcttaggaccaggtctccaacagcatgctgaaaggcattgactttattgtttagacagtgtagaactatcgtgggttatttaggaagattcttcagaagttgacaattatagcagataaaacttttttttcgttaaaggataatacctttttacagagtaaaactgaagtgatgtagttaagtacaaagtgctgacactattctgaacattttgcatatatcatctcacttagttatcaccatgcagggtagaaagtagatagaaattgtccccgtttttcagatgagaactcaaagaagtagagcccagaattcaaactaaggtctgctgactgcaaggtctgcacttgccgcttcttgtgctgctccctgcagaggtttgacttaggttaattagcatatcaagcagcataaactgaacttttaatatgcatgtggctttggaagacaggaaaaagcaacagcagagctagcattactgatggtacttgtttgtaggggcagagaccagcccccatccttttgtcttatctaccatagcatagcaactaggggacaaccacatgtgacattgggcagctttgacaatggccaggcagtccagcccatgagcctgctctgtccttccttagacaggcactakcttcctgagcctgggcagcaccatcgtatctgcaaaactcagactcacagtattgcctctccgcatccacaggcctcagcttatgctagtgcccctstgtatcacctgtcctatgactgctgtccctgctgcctcttgcctctggaatmctctgttcctccttggtgcacctaaagcccttaaatgtagaacagctatgactattcattcaccgtgctgtccctgggcagtgctttagcaacattcggtttgcctatttgtccattcatgaattcatttattaagaagctgtaccatgcaataggaagagtactgggacagaatacctgagtactagacaagctgctgacaccttgggcaggccactttccttctacaggcctccttttctttatggataaaataggagaattgagtaagataatctttgaggtctctactagctctctcactttgaggctgttttgtttagctgtaaattcacaccttcatcctaacatggggttagggaatgcttcttagaagagatgatccttgaagtgggtcttaacggatgagtatgaagaagagaaaggtattccagggaatatgatcaacatgaacaaaagtatggagaaggcatggcaaactgggggaaatgagggcctctggaggggagcagagcagtgggagacaaggctacagtgatggctacgttcagatcgtaaaagctttaatgtcaggctaaggaactagaacttcatcctgtggggtaaaggtgcaggaaaggttttaaagcagagaaatgacttgatttgatctatttttagaagctagtactgttcaacagagaaacctgggaggaatggcagtggtttcaatcttgtggctttgtaagatattaatttggtaagtttttgctttttarcgagacaagatgctaccracctattggataggggatgtcatgatttacagtctgactgtggctctagaatccccatcagactcctttatccagattctgccccattctagttggcaactccaggcctaggccaaagccagcccttttctcttcccatgacaaccaagccaaacagctgacttaggaagctccacagtgtagcccttgcggcacgcatgcatgtgtcagtaggtcctcatgtgtgctcactgcttcatagtgtatcaggctctttgactcaccaactcttttcattcttacagtaactctgaagttctcagagaaagtacaatccctactgtacagtggggaaatggaatctcagaaggattgcatgatttgccccaagcagcataatgtagtgtaaggggcatgaggccttggagttgttaagtcatgggttccatttccagttctgctgcttaatatcttgatatctgaccacgggcaagattgccaccctctctaaactgtgggtttctcatccttaaagactgagataataatagcttctgtatgtgtgtatcattggagcgaattatgtggtttatggaaaagctcttggcrcagagtaggtgctcagaatgtctgtttctgtttcctctgactcacttcagtgctctttctggtgtttcgccttgcttcccatatggccctctttgtcatctctcttgctcctctattcttaagtcaatgccacagacatgcattactggaaatgttcttcctgggtacacaatatgaagctaagccttgtggatgaagtgagaggacayaggaaatggccctttccctcactgcttgctacctgattattgtgggtgttagggtggagagggtttagccttcactcttgaaacaaagctgaggtgatctgaccatctcatgatgatcccttcttgctcctcagggaacttactgtatgccaagtgccggactcaactcttacactgtctcactaagctcttacacactgttacatccactgtgtgtgtatcttacatacgcttctgtattcttaacatataaccctgttctacagatgaggaaaatgaggctcagaaaagctaaacctattaagatcttaaactcatatttgatgaaaccaggatttgagctaggttatctgattctggagcatgcactcttaaattagattaccttttgtttattacaaaatagtgtatgtacatagtttaaaaattttctaaatactaaaaggcttagtaatggcaatttctgcctcaccttttcccactcttttgtccaatttccggagccaaccattttgaattattttggggtgtctatctcyatatttctaaactaaatgtctatttaagatatcaattttaaaataaattttatctgttgctttcttataaataaaaatttaattatcttataccaccaccttcatttcccttccctccatcctcacgtgtagttaagtcattagtctattattatgagtagtgtaaatactgttctcactgctaagccaagtaatatatcatgatatggttcctatgctatacttttcttttcctggagttaaacttgcctgtttattttccccttcctttaactgactttctatataccaattactaattgttcccaaatgcctccaaaacatctataaaacacctcttacacgctttgcaacatggtcaaagacgtcaactctttcagcagtctccccacccccactttcaccacatgccactctggggttcagcctttctgttccactctgaaatggttactctaggcctgcaccgtggttacgtgatgacttctctataccatttccctgtgttaaatccctgttccctatcttccttcttctttagattagtctcattttggtggggcacaggactcagtacctttcccggaaaagaggagttgaagataaattttttgrttctttgaaattctgaaaatatacttactctattttcacatttgattgacactttcactgtttgtagaaatctaggttggcaatttttttcattctgacttttgcatgcatttcccattgtcctctagcatctaatgttactattgagaagtctgctgctttttctaattcctgtttctttgtacgttgccatttttttttccttgaaattcttaggaacttctctttacttcagtgttttgaaattttatgatgacatgccttgatatgtatcttctttattcattgttctggtatttattgagccttctcagtccagaggcttaggcctgccagttctgggaaatctttcttgaaattgttttacaattttttccttatttttctttgttctgtctttcagggacttctattgaatgtatattgaatttcctgactcctaattttcttatcttttctttcctcttgggcatgtttttacttttcttaccactttgtgagaaaattttttgacttgatcttccaacttttctaatggaacttttattcagctattatttttaatttctaaggttctttcttatttttaatcctttaaaatagttttctgttcttgtttatattgccatatcatctatcatttttctatggatattaattatagagtttaaaaaaatgttttcttctctgccttgactctgtttttttccaatttttaattttctatttctttgttttgggttctgtctttcacactggagactgtgctttatgttttttgtttgccctgtagatgcattatccaccttttttcacactccatatatccctagggaggatggcctctctatggcctgcatcaactggccctctggcttctggttgggttcagctaatgagaggaacggcagatctcaggactgaaaaacaacgaggtcagggtatttattctcctagcttctccctgcttacctgccatggctgcatccctctatcagggattccagtctggtgtccctctccttaacttcaccctctccaattcaccctctccaagggtaaccactcctttcccttacttcttcaggcttagaggtggtagagctctagttttatctagtagtcctggaatataaacattgtccatacctctgtaaatggttcctttattaaactctcacctgctgtccagtttgatgtggtcttctgctgagattctaactgatacagaggttttcctctctaaagatctgatgatctttagctggctgtttatattgaaaagagatactacatgagactctgtgggcatggggaggatgcactggctgctgacttccttgtaagatgtttggactgatgagttggggaagcttttccattggtaaacttccagagatcaatatttatgaacttttcccctaatcttctgtcttggggtgtatatgcttagttgttgactttctggagcaggatgccggaagggggctggggggagtcccatcatcctttacatagactgtcacttactcacttaacccatttgtttcattctgatcctcactcccaccctctgatgactcttcttccaggtccagggctgccctgggtcagtttcgccagataataaatgtgtggtgttcgttaggtatagcaagagataggttgcctagttatgtgtgttggggagaatctgggcatctaactaccccccataaatatactttcaggcaacgcctctgatttcagccctatccttacccgactttcaaagacacttggtgcttctcagtcctgaggcttttcattgtcttccaagacaaaatttgtttccttctcactgttccctgcagcaggcacagggtttcagcctcctccactctgcataatcagttacctccttcatctgtggtattcatctgaaatgtgttgaactatcttgtttcttcttctattcctcttttcttggtggattcatactttctttgttcctttacagttggcttaagagggttttggaaggaaatagagataaaggtgtgggctcaatctatcccgattaatggaagttcmtactgctctttgtaggccacagctgacaaggatagagaaagtggtcccacagtggccctgagaatgtgaggcaggctggaagttgtgtgactgcacagtatgacagaagggaagccactcaaagctgaagccttggcaccgtggcctttgtatttgtgagttttgtgagtctgttcattttattcgggcagcacctctgagatgaatacttcttgtgaaggaaatttactaagatcagctgggaacttacttgaagaagttttcaccaaatggcattacatagcaagaagggggaaaaatatggggagctcttagacagatgctttttaaaattttaattttgccaaatggcgagggtagccaaagaagaygtatatgcttctagtctgggagggactgcttttcagagcggggagaagcaaaatcttagctgatctaatgtaagaagarccctggggtcatagaaccacagactttcatggtggaggggactttagaaacagcctaatctttacagaagaggaaattaaggcctaagtttggaaatgatttgccctaagtcacacagcaagttatgggctatgtccggaacggtcacccacaagtcctaacttcagctggcacattacacccctctggagatagaacgtcggcaactttagaggtgagctccaaaggtcccacctttgtcactgtgacctagcagtccatggcctcaggagcccttgacttggcttgtttctgggtagtttctgctactcacccatactggagatattatattctccatttccctaggctgcataggtttgtaccaaaccagtgctatgccaaattgtagacctgtttagacatgtttcctttcgtttcattatttttgggggctctgccaaggctcaccatatgaactcaaatgtgatttaagaaacaaaaaaagataatgacttcaatagcttggctttttaggaaagttaagggggaagaagagtccaggaagccaacacactgtgtgaccaactgtcaaatatttattgaaccataataacagtaatagttgacattattgatctatgtgtggttttacacattttacatacattattaattgattctttacatcaacagtaaggtaggtactattattatacctgtttcacagatggggaaactatggcagagagggtaacttgctcaaggaggagaaccttgtcctgggtactctgcagcttaaggacttgggtatctaaagacacaggttcataattagcaatattctctcaaattattcagtaacagattgttaagagctgcaaaggggtctcttttggctgccaaaaggctccagctgcagcctgtctccatgaaggcatagaaggggaccatttcactttttctgaaaactgggaatttattacacaaaggatgatgaattcaggatctaaagggtggaatatgaaaagaagtcaacaaagtaatgtgtaattgggaatcaatataagagagggcctagtggtagaaatggtaagtcttgggtattgactgagtcagcttgcactagggaggccagagcacaggggagccagccatgggcagcagagatattgacagagggtaaaggatgagcttgttagttatattgcctttaaattgtcagtgggataggcagtggggtagtctgaagacattcctataaaagaggcctagagaggaaatttgtgggttaggggtggggatgtggttttcagtatcttgcattacaggaccacatctgtgcccacactgcagaataacctttgtccattctagagagagcctgcaaagtacagatgaccatggtatacttgggaatgttgggtttatagaattaaagtgggttggtgctggaaaggatctcagaagccaactgttcccaatcttcatctgtaagtgaaatattcaagtcttagaaggggcagtgatatgtttcagttgtgagccagccagaggacctgcccaggcagactaagaaagcagatctcccaccactcagcccaggcccctttgcttcaaatcgtgtctcagagggagaacagtagttccccttatctgcagttgcactttctacagtttctgttacctgcagtcagccacagtccgaaaatactcaatggaaaattccagaaataatgcaaaagtttcacattttgagtagcgtgatgaaatctcatgccatgtcactccatcccacccagaacatgaatcatctctttgtccagtgtgtccatgatgtatatactatccgcctgttactgtataggaaaaaatagcaaatatatatagtttggtactatctgagatttcaggcatcccttgggggtcttggaacatgtcccctgaagataagggggcactactgtatttaaaactgtgacagtttccaaatccagtactgactgtcccctagtgaagatgtctttttaatctggctccttaaactgtccaggtacctttgttaatcttcaattttaaaatgaaatttaaattaccttaagtaatttactcgccctccaagggctccaatagcacatctataaaataaagataatactctggctctcctactcccccgctttactttatataggccttctgaggttgtaacaagtacaagtatggttggaaaagaaagataataattttgtataaaaagtaagaatattatagttttaatagtttcattataattttcaaatgaagttgacgtgattttgagagggacactaagtccatgaaagaaactcagctctgctccttcctagcaatgcaacgttgagtgaattataacctccttgarcctcagtttccctatgtagataaagaatgaaaatgctcagagcaactatgacagttagacgggataatatatataaaggactgagcttagtgcctgatgcttgacagaagcagtaaatgcagatttctatagctccacatccttgccagaacttagcatgatccagttatcaatttttacctgtcaaaggtgagaaacaaaatgttattctactaaaataagaatttagttttagtttcaaagacagagtgtgtcagtccaggttcaactagagaaacagacccagaaggagatgcaaattaagatattttggtgaggaaatggcttgtacaactgtggagactggctagcaagcttgaaatccacagggcaaactgtcaggaaggacaggcagtggcagcagaaataggaagtacggaagagatttgaaagccattgctagtcagtaattaagtggcctaatatgaaaaggattgagaaaggaaggggaagaatgggcaggatcaaggatgtggtacccttttctccttggtagactgggtagatatgtcatcattgagaagagagatgcctggagagaggaaagaataggctttgggcaaggtaatgaatttattttttagcatagctgagtgtaagatgcctgtggaacactaggcatcttacccaaacaggactacttggtagaaggttggaatgaaaactttcagctctgtagagaagtcggggagttggttctgtagagaaagcttaatgaagcagagctacttaattacagtttttttctttatgtatatgtacacagtgtttgtgctaagtggccctgctatagggtatggtgttgtgatagctttaataatgttatgtaagtgtcactattctgtgattatttttgctgctgcaataatttggcccagggcaaagactgctttcctggtcctttttttttttttttttttttgagacggtgtctcgctctgtcccccaggctggagtgcagtggtgtgatcttggctcactgcaacctctgcctcccgatttcaagcggttcccctgcctcagcttcagcctcccgagtagctgggactacaggtgtgcgccactgtgcctggctaaattgtgtgtgtgtatatatgttttttttgtttttgttttagtagggacaggttttgccatgttggccaggcttctcaaactcctgacctcaggtgatccacccgcctcggcctcacaaagtgctggaattacaggcgtgagccaccgtgcccagcctcctggtccctttttatagggacraactcaccttagtagactttccagattccaagaagctattgcaaaggttgagtcctcaataggaactccatacgtggatacatgggaaggctctgtctccctgaggaaaaaccagatggagttgtccatttctgcagagtgacctgaaagcacatagcaccacgtatgattaatgactttgtrtagcagctcactgccccagtaaacaaggccagcccagtcacattgcctgggaagaagcactgtgtgctcttcctcaaccctagacctcgtcttaacaggtctacagataacagatgggggtgtggtgccttgggaaatacaggagcaaggggaaggagaagaaatgaacattcacttaacatttctcatgtgccaagcagtgtgttgggcacgttcatgatgataatgatgaaaacagtgacagctaacacttactgattgtttgccttggcgccaagcactgttcatgtatggtatttttttttctatttagtcatcacaaccaccatatgaagtgggtactattgtttgctatgttttacaagtgaggaaatcagggcagagattaaatgagttgcctagggtcacacaattatgtagtagtatatatctaaggtgggacttgaaaaatgttcctgagcccacagttccagactccgtgctactactctctgatactgtygcagccactttcccctccctggtcctgtcatgcagaggggcaagactacagagttctttctctgatagttctcatggatttctgtcttcactttattgggtgagtggcttatgggaagcactgagcgagaattaggagacctgggttcttatcctacccacggtctgaccttggacctyagatctaaccctcacattcttcatctgtaaaatggagatactaacatctaccagggtattatgaggatcagatgaataaattgctaggaaagtgtttatgtaaatgctgagagttaccctgttgcatctgtacctacttcttkgcttttcagaatatcttctttcctgttaccttccctgaccctgattccttttgtcctttattatgatttatgacatttttatcacttaaaagtctgtgataatcatgcttaaggcaggaggccactgaaattcttacataaataattccacctacctgagccaaatggagggggtgaagtggggtggtgtgtagcagatttagcagctgctgaagctataaccaagagaagtctccttgtcagtcacaggaatgaatcattcaaatggctgccttgctgggtccttcccagagccagaaggtaaattagggagcaatgttgctttcattactcattaagcttaaaatgaagctctgcctctttgaaatgtagcaaggatttctgtttgaaagagcatgggttcgggagtcagactgacctgagttcattcaattcccagtattgccacttagtagctgaatgaccttgggcaagtcatcttacctaactgggcctcagtttcctcctctgtacatgcatcccaaggttattgtgcagcacagatgagatcatgggtataaagggcccggcatggtaccacacactcattagactctcagcagtttttactttgctgtgtctccaagctgtgggaatgaacaccttagggaggtagatttgatggggagtgaaacaacctggtttccagagtgcaaaagcagagaactcagtaatagacatttgaatcacaggtctatttttagttcaatccagcctaagatttcaaaatgtgggttcttccttgtgtcccttcatcctttctgtgtaagcagtgggggtggggttgtccagcttctctgaaggcacgtactcctgccatttcagtcatatctttttcctcattagtgtccagcacagtcaccttggatacatcagcttaaaaatctgcaataatgcatgaatgcaagtgttttactctagtcttcagcaagattctgtcactgccacgccagcctttaactctccaacttttaaaacttcggagaaatttcatccataaccctcatccatgtttctagtatggctgacttcatgactttggggagcacagcagtaaatacttttctaccaggtcctgtctgtcccttgccttctcaaaatgcacatatccccacacagggccccacagtcacagagcagcctcatgtgcgggggctctatagagcatccttgtactcatgtgtcttacagaagagggatgcaaactactagatacacaggagacacataataattaatgtttsttcatttcttccttgcaacagctctctggtaagtaggaatgtggtttcaaggttaagggcactgcatttcaaatcaaggsgaccaaggtttgaatcctaactctgtaacttaacagttayatgacctggtacaaattattgaactcctctgagcataggtttcctcttctgtcagctggagataatagcacccrtctcacaggactgtaaggaggagtgaaagaatacatgcaaagccctcagcacagggccagcacacggtacagatatatacatagtaattgtgacagtttcacagcagaggaaatactgccctagggaggttagctaatttatctaaggtaggtatcatccctattttatgtaaaaggacatcgaggctgagtcaagcatgttgtccaatgttatatagtgaataagcagcagaatgtgaactacaacccaggtctcctgacacctcagccaggtctcctaacatttcaccagaaacctctggaaaactgaaataaatgtcccccagcccatttacaattgcccccctggtggtggaatccaagcccagcttcccttttgctgaatcctgctttctagaaataggctgccagtgaaagatgtgtgcaagtgtatatagaaatgcatacatatatgtgatagagwgggaaaatatcccagggagccatgattaccagagtactccaagaatgcagtattttggttaatggatttttctcagagtattaacctcttggtttcaggccttattgaaagtcattatgaaatgcattgcaaacattcactctctgatgctagaaggagctgtctagtgagcgtaattaaattctctttaagtgacagaggatcttggcagsatgtccatttatcaccagaatgatcagttgtgctgttcaggactctaataacaacccatatgtctgtctgggtcttttacactcattataacatttaatcattgcaacagccctgtatgtgtacgtgtgtgttgggagtaaagggcaggatgggaagatgattatccccatgttgttactgaggaggctaggatttggagagcatgaatgtcctgttaggcatctgctatggtttgaatatgctcctcaaaaattcctgtgttagaaacttggtccccagtgtaacagtgctgggagtggggcctttggaagctgattgggtcatgggggatcaacccttatgaatggatttatgtcattattgtgggagtaggttagttattgctggagtggctttgttaaaaatataagctytctctcgcatgtgttctcttctccttccacctgtccaccctagcatgaccctcactagataccagcaccatgctcttggactttccagcctccagaactgtgagccaaatcaacttctttataaattatccagcctgtggtattcggttatagcaacagaaaaaaagaccaggagaagatcatgtatcttgaaagtaacagagrtagaactgaaatgacatttgctgagacataatatagtaaagcagaaaaaaacatagatttttgagtaagacatacttgagtttaaatcctgattttgccacttactgatggtattgaccgtgaataaattaatctctcaggtcctaagattcctcatctgtaaaatgggtcaaataatatttcccttgctgggggtaattttaaggattctaaataatgtatataaagcaaccagcattgtgcctggtcagagtaggtcctcagcacatggaagctattattattctgtctcctggtcctgtgctctttccagtctaccaagatgtctactactgtagatatagaaggtacaagggattggccttacctgtcttcagcccatcaaatgctagaagtcttttcattagcctcaagggtggggttgggggggttgttttatccctttctaataacagaagctggaggcagcttttattgtataggtaaaacttaaataattttatatcaataccagagctgctgcaaagcaataaagtaagtatcacgtatgactcttgttgatagtaagtgcccagagtcaggaaatgctttttggattttaaaaatatgcatagaatttgactaggagaacaagagatacttcatgtaggatcaacggtgtggaggtaagacaatgtaagatttgctcagcttggctagaacaaaaattgtcattggtaggggagcatacatgataaggatggaaaaatagactcgtatatagagcttcacatgtgcatgtaaacacacacatgttactcacatctcctatgcatgtacattgccaacctaaaatacttagaattgattggaagcattgggtgaatagatattatttcatctctctatgatttgtagaaaagcaatgtggtcagaagaaagagagctagagtgggggttgggagacccagatgttgctcttggtaccgccccattcgactgtataatctggacaagacatggaacctctttgggccttatctcctcatttataaaaacatctgtgccacttttggaaaatcctttggagctattatcaagagccttgaagatgtccattcactttcatttattaattcatatcctagcattcttctctaaggaaagatcttaaatatggaaaaaaactttatggttaaagatgttcatcatagtctttttataatttagtaaaattaggagctacctaattttactaacatttggtaatggataaaagatgacctatctgcttcactaatttgtagtgtttattaagtaagaattgcagcattggtcatgtaaaaatgaaaacaaaaaggcacatatgaaaaatatactgggaaatatactttccagtgtaggaagcattgttgatgttatccacacccttcatgatccagacccagatgttcacaccagctgtctttgtgccaccactatttactgtatatggtgacctcactatggtgaccttaggacattttcctaacaaatacctttcatccctgtatgcttttgtatgtctggttcattcctcctgaaattccctttactcccttgtctcgccatgaatatctgctcttcttctagtccagctctgcaaatttccctgacttcctaggtggaatcagttgctccttcatccttctttctataaaatttgtaacttggctctaacacatatgtcctctgttacagtcttcttgtttgtttccatctctgcacatagactgggccttccttagggtcagaattgtgttatcaacaaatccctaggattcagcaaagggcctggcatttaataatcactcaatatatgattgaatttttacttttttattttgattttttgcttttccatgttttctgcatattttataatgactatgcattgtgcttataatggaagaaaaatagtagtaattcatttactcatttactttaacaaggtgactgacctagttcagaggttctcaaacttggcagttcatcagaatcacctggagagcttattaaattgcagataccctggcccctagacagacttcttgagtcccagtctcccggataaggacctggaatcagtattattaacaggctaccagttattgggatgctcagccatgtctgagaacctttgacctcagtactgctaaagccctttcagcttaaaatcttcctaattctttgattggccttctgtcccttgctccccctgctatgagaggctttagctggagggcatgtggagcaacaggccatacaatggagaatacctgtactagcttcattattgggctcctcttctgtgccaaagactgctttgtaaatagcgttttaaaatatctatacaatcatactttaaggtcagttttattttctccattttacagatgagaaaactgaggcaaagagaagttgtgactttcccaaggtcaaataagaaagcattggatgctgtgtttcaattcagttctgtcagacttcaaaactggatctagaatttccctcactgcccctccctgtcccccttccccccaaataaaggaaccccagcagggtcacgtacagccctgctgagtgcagacacgttctgccgtctgctcaggcatgtggaattagcatccttgggcagcaatgcaccacataagcagaggcttgcagctcaccaaatgtgctctggcgcccacccacctgcttacagggtgcagtgaagcagtggaattcaatttgcggcagtgacctaagaagagctatttttrgtaagaaagtaggtcaggggctgcagcggtgctgcctgataaaggaacagcctcccctgtcaccaggaggcttgctcacttctcgcacagccagtgtggaggtgaggtgcagatctgacatcctcacatgactgcagttgtaatcattactgtggagccactagggggtaatacacacacacatctaagacacagaggctcttgcctgggtttgcttaaggtcttgggccctagtcttcctcaggagattagaatcccttcaggaaacacctctaacatactaggaggctcatctattatatacctgctacatgtcagccaccattctgggttcaatatgcattctctcatttaatctttgcagtatctctgcaaggtaagtattattatcccagttttgctgatgtggaaatggagttgcagagaaattaagagatatactcaagatcacagtgttcatgtgtcatggagccatttttgaatcctgtgagagacttcagtgctgatgatcggatgaccagaccatcaaaccatgctggaggtgattttttaattaccattctgcctctgccccgttttgttcaatacttcagagaaaaaaaaatacaaagatggtgttctccatctgaacttatctgaatcaggacaggaaagacccaggacacagaccctttccccagagaggagagaatacatctctacatactgctgcccaatcatcaagcccagtagttgccaaaaacaaaccaaccacctgatttccctgggcctggagtgtttcagaatcctctgccccacttgttctgccgtgtattaactgcagagctgtggcaaattgcaaggcactcattggcratacacaggtggacatgagcttgttaacagaatgcagtaattgacataccgtgattcattatgcacagcacgaaggactctagtagaagcccactttatggccaagagctgctggcaccaccaaccttgagaatttgttcctggctctgttctgtctccccagctagagagcaccatccctttaggggccagaagcagtctgtggcttcagtcttatctgcccctacctccaggcaaggagtaaggatacttccctggtcccaggctgcatgacgttggagggagattatttgttcattcattcactcaacaagcatttaaaaaaatctggccagtaatgcagtggagaacaagacagatagttcctgcccttccagaacttaatcacctggtgactatcagaactgcaaatttctaagcacccaattcccagttctatagacctggaagtgggccctctctggaccttagtttctttatcatcaaatgagtagaaaagagagaattgtattggtcaatctcttttagctctaagatttcagactctgtggttatggattataaacatgagtcacagtatcartcttagtcatttgtatccaatgccaaaggaaaaaaaatgaaaatctcaaatttcagaatctggatgggaaacatggacacaagctaattcaatttcttcacttacaaatgggaaaaatgaggctaaaagaagggtgtgtcttgcctagtatatcagtgaacagagccaggatggagaggccagtcagctgagcccaagtcttgagacaccccattcctactgaggctgcctcttcactcagcactgctgctgtgcccctgtttggaaccctttctgcacttggcttttctaacagtgagctctactgagtcttctacttacgcctctaaccactgcttctgtgtttccttatcagccccagggccgatggcctgagagtagaagaaggagtaggctttgatagctgagcccccaaaggtaaatcaaatttaactttgttatgctaaggctataaaaaaaaatggacatgaagaagttgaagcagagcatgtagagtttgctgacagagttctcgaacaagcagttacagaggcaaaccacagtgaaacaacagaagaagggaacctggtggagatggctgctgagaagttgctccatgaactcagaggacctatagaagggcctacctacactcattgtcttagagcagccttgctaacccacgggcagcgagctgcatgtggcccaggacagctttgaatgcagcccaacacaaatttgtaaactttcttaaaacaggggttttttgttctgtttttttttktttgtttgttttgttttgtttttttttaagctcattagctgttgttagtgtactttttgtgtggcccaattcttcttccagtgtggcccagggacgccaaaagattggacacctctggcgtagagcctctctatacccctggcccatgtctgtcttctacatgtagccaatgaaaggaatctaaagctggaagggcaggggacctttctgatgctcttgtgaggcaaagggattgagatcactgcaragaagctggcaacaggaggcccatcattttttcagtgggcaggacatctccattctgggtggaggaagacgcaaggctttggcaaatactaaaatgcttgtttgtctattgctctttctttatgtccatcacagtctgggaaccagtaccttgaagcactatccttgattaatttataattttctgccctatactgactgcctaggaaagaggtggtcagaggtacgagagggtgaaaatactgttcttaattatgaaaacctatatctgttctgtgtatccatggataattttagtcttctaaattgatttgttattttccaagctttatttttataaaaagtcatttttcagtaaacatataacattgtcaagaactacctaatccatgtacataaaatgtcatgtgaatgtataaatatgtatataatgtataaaaataaaattattctaatttttaaaaaatgactaaaggtcatttgactgtgaattggatacctgagtctgaagtattgattcctgtgtgtccttgagctagtcacttgccctttctgcccctctgttctcatatctataaagtgaaaggtctggatcagtggttttagtcacctggactattctatcaratcacttgggataattattaaacatatacattcctgggcccacttccagatcaatagatttgggaattgggtgcttagaaatttttagttctgatagtcctccaggtaattaattccaggtgatgtagccaggttttgagtagttgtcttccctgaacccctctggttctgatgttttaggatcctttgccttctttctctcttgctcagtttcccattgttctcttttccttttttccctagagtgctcctctcactagactgtgaacctctgaggaggaggggctgtatcttacccatctctttatccccgtcctccagtgcaatgtctgacacactggtagtgctcagtgaacagtgggtgcaatgaagggaaggagggaatgaatgggctctcatggctttataccacctatacacatccaagtaatgtccttaatgtttcctgcatcctcagtcattatagatttcttcagaacagtaagtggaaagaccacagactttggaatctaagaaaactggatttgaatctcaactctttctcttactgtgtagtgatttctcctaagtcatttaatctctttaaactacagtttccttgattgtaaaataaggagaatggcacctgttgcttgagattgttgttaggattgacttactacatgaaaatatggatgcagagtgcttgacatatagtaggaactcaagtatctcagcttcttttcttcctttacatgcccagtgatgagtgacagtaaaaggagggaggaagactcagaagaatagatcaaccccaagccaggccgcagaggatgacaatatagttcattgtcatctcctggcttcctgtgacactgaggttctcactgaggcccaggcatcttggtggatccccacttgctcaaccctgggcatatcagaattcagacttagaatctcctgactttaagtgtggcctgttctctctgtttctgtgagctacaggagatagacaagtaacaaaagaaattcaaggaactattataggttggggatccttatgcaggcttgatgtctgggcttgctgtgagaaactcaagttcatttcatatggttggttctcagggctaaaaatctgtgcgttggtttcgttagcatatcagctcctctcttcacacactctgtgttggaactgccacagcatgctgcttttcataaaagtctctctttcaaaccaagtccagctgtttcagtcctagaaggcagccagattagttctcttctgggcaaaatggtaagtgcttatcactccccacaatgcctccagcaccacagaaataacagccaccctttactgagtgcctactgtgcttsagtcctttgacatcactatgagtggttattattagctcattttatagggcagtaggttatgattaagactgtagactttcaagtttgaccaaggttcaaatcctggccccaccatattttagcaaatcctctctgagtttctgtttcttattagcaaaaaagggctagtaatgtatacctcatagtactgaaaggattaactgaataccggatgcatggtcttggtaccacgcctaatgcatggtaagtaaatcctcaataaatgtaactgtggtaatgatggcaatgctgtggtgtcttcatctatagaaggtgtttcactgtagtggataccagagagataaggagaggtggcaaaaatatcaacagtttctgttagtctaatccagactcaagagaacctcagaaatactattagaaagggacctgttatgattgcttggaataaactcagtgaatagctgcggtgtattattcattcagcagatttttattgactatctactatgtttcaggccttatgctaaaagctggagatactatgatgataaaacagacatgatccctcaccctcaaggagcttaagtcttatggaaggactcagacactgttaaaaaaaaaaaattgcaccagtcatgcaaaattacagactaggataaatgctacgaaagaaagggacaaggtactatgagaatgtatgataggggtcctcacttacttcacatgatcaaggatagctttgctgaggaattgacatctgagctgagatctgaaggatcactaggagttataattagatgaaaggagtgggtagggtggagagaaagctttctaggcatatggacaaatatggcccccatggtgagaggcagcttagcgctttcaaagaagtgagaaggtcaatatgatttgagtacagagaaaaggctggagggggagattaggttcttgcaggccatgtgaagagtttcttttctttttattctaagctcatagtaatcatagaaggatttgaagcagaggtggttatgtgtatgttactcatggggagggcattatgctcaatttgacatttacaagagatctttccaacaatggccttgagaattgatggagggtgcaaaagtggatgtggcaaaaccagttaaggagcttttgcaatggtcccagtaagaaatcatgctggatagagtgagagaagtaacagtggagataagaaggacaacatggtttgagatatttagcaggtaaaattagcaggacttgatgatggattgaatgtagctgtgaggaaaagaaagatgtgaagcataagccccaggtttctgggtgcataagtgggaatggccctgccattcgctaagctaaaaataaacagtagaaggtgaacaggtttggagaggaagatctgatctgaatttgaacacactgcactagaggtgccttttagacatctgggtatggatattccatgcccatggccaccaagggtaggccacaatggccttaggatgccccgagaaatstgacccagatccagcctctctgggggtcagccttgtttggtagctggcctgaggactcatggtttgcttcccacccttgtggttctatttccttaccagagtatcctgaaaagggagaattcagcctaagaaggaacaggaacagtctggggagagactctgctgctttaggggaaacaatttagatattgatgcatgttgtttgagatgtttttccaaatctgtgattgagatatttgtgtttgacatgtgtgcttttatttattaagatatttgctattaatatatatctactatatggtagacacaatgtcaagtcagaaaggacccgtggtacttcagaagcgacagccccagaacccatctggctttgctgttcttgtgattttagagaatactaaatctctaggatgctgagctgctgacttttcatcaagggaacctgtccttgagttcagggggttggcttgtcaggggcttcttctgcagctgcaactcttcaatctgtctttgggggcctctcttctgcagtctccctagacagtaactacatcagttctccactttgaacagggctcagctgggcactctgagccaccccaccttaccactgctatgtgttctggtttgttgcctgaaagcaactctttgtgtccaggttagcaggtgagggtgagagaagtgtcagaggaggtttcgtgtccttctgtagaacagcagaggagagctggactggcgggcaggaagggggtggtgggcagaggtgtgactcatccagccctggcaccatgtgataggatctgtgaatacccatgtgaaatagatacatgctttaagaacatttgccttgtgaaaatctaaactcacaagccacatgaatttggaaccgcgattaccatcacaaaagggagctggtatcctttaaaatatcctgtagtgtatctaaaatacagtgcagtgagtgatgaaatatttatgccagtttaggcactcaggggaagctggcattctctatgtcagtggaacaaagaacttcttataactggagcagatggtgagcccctgtcagggcagatgttcctgcagaggccaggtgaccacatgtcaggtgggacagagggactgcttcccatggtggactgagaatcgcagctttaagattctctgattcttggctttgctttctgtcttgaaaagtaagtctgccttaggcaaatctgccaaggacagatgtgtccttgaagtcagaaggacctaggctaaatctcagctccacctcttctagctatgtaaattaggcaggtggctctctgaacctccctcttctagtctataaaattaggtttataataccttgcagagttttgtgtgtgagggtcaaatgagttaagtccaggagccaacacctcaggatgtgaggtggggagaaggcttcggagcctctgatcagctggcagccctgtggcatgtgcgcgtggatggtgtgcacatggcttgagtttgcatgctctgcacagggagaacattcattgctccacagaacacaaattcagggcatgtgtcagctcactggcagcctggggtaggctgggacacgctgtcctttttctgcctgaggactgacaccagctcagcaaacagcccacccatcttaagtttccccaaagaactcagtcttcgttacagagaaatcctttcaggtgctgagagtggcatgtttcttgcaatctgacccctggaagaattctgactgtgtccctttcccatgccaactctttactaaagccgattttatgaggaattatttttctaatgtgttggataaaatcctaaagtgtgtctctgatggtgtcttaggaggttcacaatgtttttattttcatggggagcattaagaggatacagactaggtttttgttggggcaagcatagtcattgtaaactagaggctgcttgctgcctgcaaaatccttgacacccaaggcaaaattctggcttcatatgtcaccatctagcatacctgaaccactccaacttgaagacatttgtccctgttcagggtatccatcatagtcatcacggttccatctgtgtacacaataaagctctgtatttaccagttattttatctgcctagcctccctgtgggctctgtagggcagggttcttggcccttttattcagattaagagaacatggctctgcaaggtgcaatagtttgtcttaggtcacccaactaattattggcagggctgtttttcaaatcctggtcttctaaggggcagcctgacataatgtaaacaccatccagcatttacatcccaccaatggcactcatgagctgtatgaccttgtgcaagctagttattataagtagttattgatattaataattagagtagaatttacaaagcacctggcatggtagtaggtgctctacaccgtatctcgttttcattctcacactagacctgtgagaggggttttattattatcggttttacagataagcatcctgaaattcagagtgctaaagtagctttccctgtctgagccccagtttctctataaaataagaatattaatatctccctgggagggtgatgataagggctgaatgagataatgtgtgtaaactgcccagcacagagcctggaatagaggaggtgctcagtcaatacttgtttcctttccctagttcctcctctgacttctaatctagtggtctttctactgcaccccactaaatacatttggaagctaaggtcatgcttaagtcctctccatagctctctctatcacactcttccctactgyccagaggccacttcaagtctctctgtcagataccgcctgtttagttttatgccagttcaggaaacatcatccttccctggcatgctgcacccctgacatttgccccagggctgtgttctggaccgctaaagcctaccctggcctctctagccacagggctttcttctttcctagctttctctaaggcaaaaacaggttgcttcccttactttgacattttacctggactctttcgtgttgttatgttgtgcttcatgagaggccacatatggcacccaggtcttctgacttctagtgttgtgcatgccctgaaggttactatcttcgtctatttggtgattgtatcaaggaatacctaagactgggtaatttataaagaaaagaggtttattggccaggcacggtggctcacgcctgtaatcccagcactttgggaggccgaggcgggtgaatcacaaggtcacgagttcaagaccagcctgaccaacatagtgaaacccccccatctctattaaaaatacaaaaattagccgggcgtggtggcagcacacacctgtgatcccagatactcaggaggctgaggcaggagaaccgcttgaacccgggaagcagaggttgctgtgagccaagacagtgccacactgtactccagcttgggcgacagagcaagactctgtctcaaaaaaaaaaaaaaaaagaaagaggtttacttggcttatagttctgcaggctgtataagaagcatggcgccggcttctgcttggtttatggtgagggcctcaggctgcttccactcatgacagaagacaaaggggagccaacatatgcagagatcacatggtgagacaggaagcaagagagaggggaggtgccaggctctttttaacaagtagctctcccaggaactaatagagtgacaactcactccccacagagggcatccaactattcgttagggatctgtccccctttacccaaacatcacacttcaggcctgtacctccaatattgggatcaaatttcaacatgaggtttaggggaactcattcatttggctttcaataaatattcatttatttatcacttactcagccagaccctgtgttagacaaaatagtaagtgctgtagtactcaattagtatagatcaaattaatagctagtttcagctcctaaacttggggatgggggtgtggggtgtggtaaggaagaagagaagggtattacctggcagtgggtggacgtcagaggtaatagacctgactgccaggatgtacctccataaatttgagggactatagatagcggctagttcttatacctctaaaagatagcttggagaagtgaaaaggggagctatttctgaatgattcattcattcagcagtcttttagcaagtactttatctgtggctggtgttctgctggtggtgaataagatagggctctgttcttttggactccccttgtctctggagaggtaaacttgtagataggtgaatctcagtgagtggtataatggcaaagaagagtccagggaaggtgggaacttcgaaggacgggacttacttttcataggggaagtaagggaaagtttcatagagaaactgcacctcagaaggggattaggcaagagagcattccagaaaagggaataacacttgaaaaggcccagaatccttaaggaaaggagtatattcaagaaacagaaaacaagacagtgtgtttaggagatatgcactgatgtgttacattattggttgtaccatgaaggtctttgtgtggcatgttgagggtactggacttaatcctttaggcatcaggaaccaatagaggtcttaaagctatagtctagttgatggaaagaaaatagctgttctattgaatactaaccaatcaaatccccattttctactgagtctggatgcagcctcagaaatattctcatgaaggaggcatgaaagtatgaggctttcaagtaagcccagtccagtagaccttgagtggatgcccttggcccatatacctgtagtgatccagtaaatgcaaggccttcttgcccaatggacattggtccttttctccaggaagctcttctgaacagaaagtctagctcttttgaagaggataaaatgtgctgggctaaggaatcaggaagtagctattagtctgtaacctcactggtggctgtgattgtctttgccagctctgtatccctagaatccagcacaaaacttggcacatggtatgtgctcagtgatgtttgctgaataaataacaaggaaaagaaactaatcaactctctacctaaccagtcaaccatccaacctgggttctaattccagctcttaaattttcattctctcagctatacaaccacctggttgttctctaaggcctttcacaccctaggattgtaggatgatgaatagttcagagcaagcccagttatcatttataattctaatatgcctcaaatttaatcagaataaaatatcaaaaccagcactactttacaacatttcagatatgccgtctaaaaacagaacctgcatctgtctcagagttgtgaagaaaatgtattaagttatattaaacagcaagattgtcctttttgtaggaaaaaaataaattaaatcttgtcttcctgactggggattttaattgggatttgagtcaatttgatccaaatttgagcatccatccagagaacatttattgacatctgctatgagcaaggttttgtgctaggcatgagggagataggaaaatgaataagatacaggtccttccaggcaggaattgatggtgtagttagggagatataacatatacatgcttgactctgacccagatggacagagaataagcagagacagtccagatccaggggtaggagtgtcggaggaggaaatcccttccaagtacaccatatatgtaggaagtctgcctcttaccaccaccctagggctcagaatttagacggagctattgtggctatgaggatgtgctctgtggattgtgctctgtgccatgcaactgcctggagcttacagtcatcctcagccatcaagttgagcacctcagcccaaaccggtattggcaacgaaaatcatcttaggccttaatgaacagtgtgcacatactacactgccaagcttggtagcatctttttgtggcttgtatccttggagttgatttccagaaaaagttgttcactgtaacaggaatttgtatttcttgttttataagactggaaactattaataatatttgtccaatgtgtgctcttctctgccttggctgccactgaaattcaggacctagctaaaatgggatcatccactttcccaacatttatccaacaattatttgttaagtgattctctgtgcaaggccctgtgctaagtgggtaggagacacacacaggctatgctctcaaggagctgacaaaagatgtgtgaaccaggccgaggggaaccgaaataccagctgagagaagtactagagggatcagagcagaaaaagtttgattttagcctatgggcacaaagagaaaaacgtaaaagagatccatgtgatttggacctcaaaaaggtaggaatagtacacattgaaataggtgtagtaggatttctaaaataaaataatgaccaaagtattgaggaagcaaaaaacttcaggcttgtttaggaaagtaggaatacttcagtttggctaaggggaacaggcttagaaaaggttaggatcagatcatcacagagggcctcctcctcagatgttccagggtaaagcatttatatatttaattctatgggcaaaaagatgcctgcttaaaaacttaataagtttaataagtttttaagcaggtgtgagttggaaaaatcctagagttggaaaggattttggatataacctagttcagcctccatctgtattagtacgttttcatgctgctgataaagatatacccgagactgagcaatttacacaagaaggaggtttagttggacttaacagtttcatgtgactgaggaagcctcacaatcatgatggaaggcaaggaggagcacctcacatcttacgtgggtggtagacaggcaaaaaaatgagagagcttgtgcaggggaacacctctttttaaaaccatcagatcttatgggacttattcactatcatgagaacagcatgggaaagacttgcccccctgattcaattacctcccaccaggtccttgtcacaacacgtgggaattcaagatgagatttggatggggacacggagctaaaccatatcatttcaccctggcccctcccaaatctcatgtgtcctcacatttcaaaaccaatcatgccttcccaacagtcccccaaagtcttaactcattttagcattaactcagaagtccacagtccagagtctcatccgagaccaggcaagtcccttctgcctatgagtctgtaaaatctaaagcaaattagttacttcctggataccatggggttacaggcattgggtaaatacagtcattccaaatgggagaaattggccaaaacaaagggctacaggccccatgcaagtccagaatccagcggggcagtcaaatcttaaagctccaaaatgatctcctttgacactgtgtctcacatccaggtcacttgatgcaagaggtaggttcccatagtcctgagcagctccacccctgtggatttgcagggtaccgcctccctcttggttattttcacgggctggggttgagtgtctgcagcttttccaagcacacagtgcaagctgtcattggatccaccattctgggttctggaggatggtggccgtcttctcacagctctactaggcagtgccccagtagggactctgtgtggggaatcccaccccacattttccttctgcactgccctagcagaggtgctctatgaggaccccacccctacagcaaacttctgcctgggcatccaggcttttctatacacttctgaaatctagacgaaggttcccaaaccccagttcttgacttctgtgcacttgcaagctcaacaccatgtggaagctgccaaggtttgaggttcgcaccctctgaagccacggcccaagctctacgttggcccctttcagccagtgctgacaaagagcaccaagtccctaggctgcacacagcacagggaccctgctcccagcccacaaaataatattttcctcctagaccttctggcctatgatggaaggggctgctctgacatgccctggagacatttttcccccttgtcttggggattaacatttggctcctcgttacttatgcaaatttctgcagctggcttgaatttctcctcagaaaatgagattttcttttgtagtgcattgtcaggctggaaaatgtcaggtgttttccaaacttttgtgcttggcttcccttataaagctgaatgattttaacaacacccaagtcacctcttgaatgtttgctgcttagaaatttcttccgccagataccctaaatcatctctttccaaagtttcacaaatctctagggcagggacaaaataccgccaatctctttgttaaaacataacaagagtcacttttgctccagttcccaacaaattcttcatctccatctgagaccacctcagcctggatttcatgtccatatcattatcagcattttgatcatagccatccagcaagtctccaagaagtctctagggagttccaaactttccccacattttcctgtcttcttctgagccctccaaactgttccaacctctgcctgatacccagttccaaagtcacttccactttttcgggtatcttcagcagcagcccactctactggtaccagtttactgtattagtccattttcacactgctaataaacacatacctgaaactgagcagtttaccaaagaaagaggttaaattggacttacagttccacgtggctggggaggcctcacaatcatggcggaaggcaaggakgagcaactcacatgttatgtgcatggttgcaggcaaaaaatgagagagcttgtgcaggggaatgcctctttttaaaaccatcagatctcatgagacttaytgactatcatgacaacagcacgagaatgatttgcccccatgattcagttacctcccaccaggtccctcccacaacgtatgggaattcaagatgagagttggatggggacacagccaaaccatatcgccatctcacacataatgacagaatcccaaaaggggaagttgctaacccaaggtcagacaactagttaatgatgktgctggagctggggccagaaccagatcttctagcttcagatatagtggactttttacactctgtgatgaaacctatgctctggggagattaatgaggctttctaggggaggtagtttgaaggagaggcaagagtcagggagagccttgagatgtttttacagttcagatgaaaggtaatgcacaaggtctttaattagggctttggaagtgggctgatgaagaaggggctgatgggagagaacatagaggtccagtcagcaggacttggatgtggaagacagacaagagggaaacttaccctgtcttcagttattgttctttactgaattgtccatttggtaggctatctcaaagtggaaaagaaagggtatasagccaagataaatacatcaaacacttccagtatttccccaaatgagcctctttgcaattgttgttgttgttcctcttccctagaaggcctaattcttttccagaacctggccttccagctcttaagtcctcagaaatgggatccatttgccagctactattctggcttcatgattttactcatgggctcttggaactgccctcattgtctgagtgtgtccctggttttggctttgccaccaggccccatgaaagtgccatacatgtgacttgcctcccatcctgtgactctaggtttgaaaccaaagccctgagacaacctgcaacccgtgctgacctccagaataggccaggcacccagcctgaaggagagtgctggactggactttaattgtgtaggggtcttgccccaggtctgtagaccacttgcatcagaatcacctggggaatattaaaatgtgggtttctgggctctatctcatcctgctgaatcagaatctctggaggtaggtgacaggaacttgtagttttgacaagtgcaccaagtgatttttatttacctaaagtttgattctgccttagatagttttttttcctggacctcagtttccttgttttaaaataggaaaattatatattcagtttaccgtgaaaatagaaaagtactttgggaagatgctaaaagtttatacatatttacttatcacatattattaagtttacagtcttgagataaagaaaatttgaaatatttcttagactgaaatacactgaaaaccrgtaaatggtctgagtactcacacttagaaaatgtatgcttactaagtgatacggtttgaatgtttgtcccctccaaaattcatgttaaaacttggtcattataacagcattaagaggtgggacgtgtaagaggtgtttaggtctgcccttatgaatggactaatgctgttatggagggagtcggttcatcctgacttactcttgcatgtacatgtgctctctctctctctctctctctctctctctctctctctccctccctctccctccctctttccctctctctctctctctctctctctccacctctctctctctccccatctctctccctctcttcctctctctctccctctctcttcctctctctcactctcttgccatctaccatgttacgatgcatcaggaaggccctcaccagatgctggcactttgatattagacatctcagcctccagaactataaaccaataaacgtctattatttataaattatccagtctgtgctattctgttatagcagcacaaaatgtactaagacaccaagtgagtgaatatatgaatgaatagctccaggaaaggcaaaccctgaagaaaggtcattaactttttcttcaacatcccctacttcatgcattcaatcagcattattcactgagtgcctaatatgtgccagggcactatgccaggctgagaatataaataggatgtggtccttgaccttaagggattggagatcaatgtgagtgttcaatacagtgtgataagcactggccccaggatgggtagagaggtgggtattagtgctttggcaaccagagcagaaatcacctctatctgagcctgtcaggaaaggtgtcaccaaggagttggccttggagtataggattgttccaagaaggaggaaagccctttttacagtccttgtcactggcttccttcttccattccattaaattctgtcatcaatttcctctcctcctccatcaaactaatctcaggaactcaatgtttatgtgttttttgttttctttttcaacctacccaaatctgcttttatactcaaaaccaacacttaggtttagtcataaacacttggtcttaaaacartgcttttttgaggatcagggtagtttacattgtcacccctaaaagttttcatctgaaatagttttaagctctattagggattttgtttgtaggtttactttttcacagctgataggaggagtgttgcagtttgttggttagtagttgttggatttttttttgggtggtgtggggagaggattggtgacaactggtttaccccagctcctgttattttactagataaataatcactattttgcttacccataaagaatcaagggttaattcatggtcttctttgtgttttaaggtaaaacgataatggttaatgaatcagactttaaagtggcatagccctttacaacttacaacatgtcttgactgttcatgttcttcttttctggtcaaaaggtggtccacaaaccagaggcagggagggagacgctaattagaaatggagaacctcaggtactacctaagacctgctgaatcggaatctgcactttagcagtattccctggtaatttttatgcacaataaagtttgcaagagactataaagttagtggtttgtccgatttattgattaggacattgaagtctggagagattagggaacttacccaaggtcacgtaacaagtagcagagccaggcctcaagccctggtctatctgattccagttcagcactttgtcactgtcctactaggtttctttgtgccatattaactggaaaacacttcctctgtgattgattcatggttgtgaagaaggaagaaagtaacaatttttcaaagtataaatgtatcttcttgggagttgcaagggactagaagagttaacggggagctcacaggctgaaccctgactttatgccagacacttggacaattatacacaggaagccttgttcccattttacggatggtaagaaccctcagtattttcctgaccttgatgagcctgtagggactctcggggaagcaggggttgaatgtcrtatttaaagctcaggcactaggactttctgggttggaggtgaaggaatcagatgttggacatttcttttcatccttaaaataagattctcttctggtatgaggctttgactaatcaggttgggtggctgcccacttcttctggagtcaggaacttaggctttggccaccaggaactcctcttgatttatgaacaactctgtcttgtagagtaaaagcggttttcccaaagaggaaaaaatagcttaaaagaaggccttgaagaatcaagatgacaaaatgtattatttataaggacctaaaataagtgccagatcctccacttgaagtgagcaggcgacasccgtgcgctgtgtggagtagagcccagctgactccagctggatccacacggcagggctggtcagccacagctctgctcactattccaaggctcttctcggaaagactcctgctgccggtgcaggccatctgtggagctcacatgaatgcgtmccggcttacaagcttaaagagaaaattcttgaaggaagctggaggaaatgcagtgagaatctgtggattggtagaaagaggccacaaacacacactcatacctgtaacacacacgcatgtaagattacatcaacttcccgacttactcactcaaggatacagacacgttttgagagtgaggagtccaggcagcacacagtagatacggggtatctcaactccgccttcactagcccctagctccctagtggaacttgcagctgcaggtaacaccatccatgcagaatagagttctgttgcatccaggaatcagccccttcttgctgcatcacaggcctttttcactcaaggcttgtctcatcattcttgaagaacttagtgctgctatgttttcctttaagagaatgttcacaaacatttcttatacaaaaagctcttccactttttgaagcaaactaatggtcagcaagtctacatctttatccagtggggaaaaatayagattcagtgtctaggagtctctgatcaatagccagcattgcagaaaacccatttccttgccactcatcctttcactctggcctaatacctttgttatctggaagttcrtgatactgagttagacctgaggatcatttcccaaatctgtttttctggagggcaagattcagtgatgcggcgagaggtaactgaagagtaggaggtgatgccgagggatttctgagggcacccaaggcaagtaggagattgtgctgcagctccagaactgttacaagtcttaccaacagaacaataggctaggatttgaacatacactgcagatttcagagccttctcaccgaactctaattattcctgtgtcattgtctttctcttcctcttcaaaatttctcttctgggatatggtgactacactgtggggagaaatgcttttagtagctctttctgtatttggagcttactttgtgttctctgttggctgatggctccctccccagccataggagctgattatgatccagcggccctgatgcagtcccctggcagcatcaacctggttttgcctctggttctgatctcaaggaccctccagtttcctcttatcataatggttgcccctagagggcaggattcaataggctgagaggtttacctacatgccctggcagtacagggagccttcaagaagatggatatctgacctttctaccccctacatcccaattcagaataataaaatctcaggcttgagataaattttcggcattttaaaatccaggcatctatttaatatttgaacgagaggcggcgtggtatagaagaaagaacactggctgaattcaaatcccatcttcaccactttctagctgtgtgatcctgggctggtcacctgatccttataagcaaggaatgccttgcagggccctgctggagaataaagataatctaggtaaagtcctgacatatatgatatgcttcataagtagtaagtaccattgtcctgtaaaccagagctttcaaactttttccttcagaacacttaaattctttcacatattctctatcatatatgatgtttagattcctcacagccctggttactttatttgttattattattactattgttacttttattgtaaaatatatatgacataaatttattattttaaccattttaagcatgcagtctagtggcattaaatacattcacattgttgtgaaaccattattaccatccatctccagaacatttttattctcccatactgaaatgttgtacctattaaacagtaactcccactccccatccgtgcagcctgggcactctattttgaatagcatgctccaaattcctcagtgtctttcttcccattgcaaatggaggttaaaaagagcctcttggaagggtttgagttcttcaaactcccactggggagcccgagaattaaaagtctataccagttgcggcaaacttttgggattgcagatggttacaaaattagtgtcaatatagctgctttgcatggagtggatctggcaaagaggcttctaagcactgatacattcctttcagaaatatcaaaggatatggcttggcatagctttggggagaaaccaacagttttcgaattcttgaatagcatctaccttatggtgaagattaaatgatataattcatgtcaagtgtataatacagtgcttggcacagatcaggcccttatatgtaggcttttgttaccataattgcactatggcagagattacatatatgttttggtagttaattcccatgataggtagacaccattttcatcttatctgaggaaactgagtctctgggctgctaaagcccccaaaattacagagctagtaagttatagagtagcagagctgggattcaaacccatactctttctcttataagatgctgcctgttgtgatacaccaagaaaggaaccctgtgagtgaggtgtactgacttcatcttgatgtttcatctttytgtataccctggcccttttctagggtcataccatcttgctgtttcttattcttaaaatcatacacctaatgtccaagcttcagagctttctgtatttaccagtccccattctctctgtgagtgaagtgatctctcacagtcttccataagctctaaagtaggaaaccaaaagcatgtgtgcaaaccatggaactctctggctttattcaatgagtatctaagagctaatgaactgcacatagaatttagaggaacgttgactaggatttgatcagaaaatggtactttccaggacattcagggcacccacaaacactaggtagagtttgttcagaaaagaaaatgcttacatttgacttctgtgagtgattgggattcattttcctttcagaaaacaagaaccaagtcacgctctcttgctctttcatggttgctaggaagctaaagccaacctggatgctcaatttcggcatgtatataagctcctagggctggcatttggatacgcctcctttccatggttttgaatttccgcttgtattttatttactgtattataggaataccctttcaaaggagatgagcttagagtaagtaaatcaataaaaactataagcccctagaggtcaaggaccattttcatttactttagtgtccccagcacataactcagtatctggcgtatagtagatgctcagtaaatgtttgtcagttgaatggatgaaagtgattaatgaatcagcattcaaaatgacttaagaatgccatctctggtaccttcctttggactttcagataacaaggccatcaaggtggaagctttagaaggtgttccttggattttggaggtctatcattaagaaagtgtgtgcacattgctagacatcggaaataatattggcttagacaagacagaagcattttctctcactgttatggactgaattgtttctccccaaaattcgtagattaaatccctaacccccaatgtgactgtatttggagataaggtatttaaggaggtaatgaaggttaagtgaggtcttaaggatggagccctaatctaatatgacatatcattatgagatgcagaagagacactaggaattgctctccctttacatgcagaggaaaggccatgtgaggacacagcaagaaggcagccatctgcaggccagggagagacttgctagaaaccaactctgatggcaccttgattrtagacgtctagcttctagaactgtgagaaaattaatttctgttgtttcagctacccagtctgtggtattttttgttatggcagcccaagcagactaatacattcacgcatgacaggtctgatgatatccccccacaagattgctataatagttctacagatatcaagggccctaattatttctatctctctgtttcactatccttaacataggcctttgtcttcaagattttctcaaggtccaagatggytgctagcaatattcagccagatagaagggagaaaggacaaagagaggcctttttttttttttgagacggtgtctcgctctgtcacccaggctggagtgcagtggtgcgatcttggctcactgcaagctccgcctcctgggttcacgccattctcctgcctcagcctcctgagtagctaggactacaggcgcccgccaccaygcccggctaattttttgtatttttagtagagacggggtttcaccgtgttagccaggatggtctcaatctcctgatgtcgtgatccgcccgcctcggcctcccaaagtgctgggattacaggcatgagccaccgcgcccggccaaaaagaggcccttttaaggcactttccctgaagtggtaccaagcaatgtcaactaaaaactggccagagcctagttacatagccaaacctgtyatgagggctgggaagtgagacttttagctgggcatatgtttatcctgaataaaatttgaagtctgttaccaggaaagaagaggagaatggataataagtaggtaaccagcaatctatgcctcaaagagcaggagaattgtggggaataaaggaagctggaagtcagcatctcactcataaaacagtcccacttctcagcacctgagcagtaccctgagtgccctaagcaaggtgatgagaggagatggctctcacctacagattagtccaagccccgtgcttgactgtagggcactactcagtttgggcctagccaccctccccgccttctcttcccctgtttgccaataccttgcccccagccctgttccccagatatgcctgcacttacctacattgcagttccctctacttgggatgtcctttgacactttaatatcttattattctttcaggctccatccaaactgttcctcctgggagcacctaacttgctttcaaagagtagagcatggaaaggggttgggggagggggatgagtgaggaatagccttacagtggagaaacctggcaaacactaccttgcccaggtgaccaaggttaacatcatcagtgataaatcatgttgatagtatataacttttatatagtgtgatgataaggacacttcacctctgtggtcttcctcctccaagcccataatcccagtctaactatgagtaaaacatcagaaaaactcaattgagggacatcctacaaaatacctgctagtactcaaaactgtcaagatcatcaaaaacaaagttggagaaaccgtagcagaccagaggagactaaggagacatgatggctaaatgtaatacggtatcctggagcagagaaaggacattagggagaaactagcaaaatctaaatacaatatgacgtttggctaatagtaatgtaccagtgctggtcccttagttgtaacagatgtaccacagtaatataagatgttgacaatgggggaaactcggggagggatatttgggaacttagtactatctttaaaacttttctgtaaacctaaagctattctaaaattaagagtttattaaatgaaatctctgtgctcctcctcactgatggtatgacttgggcaagtcacttgacccctctaggctcggttcttcgatgtaaaatgggggtgacgyaccttcactgcaggataggaaaaaaacttcagtgagacagtgtgcctgatggcactttggaatcagtgagccttggcccttgggatggctttgggtgcttcacacgttattgttcaaatgcagattccactcctgcctctctgaaactccacacagggagccgctccagaggtttccccaaaggctgcagttgctggtacctagcaaaaccctgccctgtccccatttggagttctttttcatccagaatttctgtgtgggtaacttccccttcacctctcttgatagcttgctcttatagactaagattgcatttttattttcatatttcacttcatttttcccccttgaatttagtttttctctttaggaatcagcatatgactcaaactgccagttctaaatttagtatcgcctgtgatacggagaatgcatttagtgctgcctgggatatgtatttggaaataatggttttatttatccacatccagtaattctgctgcctgcctgctgggttctttcaggaaagagtttgtcatctcctttcctcctaatgatgaaatgttgcttgctcaagtcccagaggcccagcctgagccagatgctggtgacttgagtctctgtttaattaaacaataccattcccaggattctgcagtcataaggttctgtctatggcttctgtttagagggagtttggaaataggtctagaaggggctcatggactctttggatcctgtaggcttatttctgggcctcagrctggtaagatttaccccttttttggggagaattgccctttcagtgctgaaatatgtggaaggagggggaagctctacgtgtatgtagctgtgtcctatgttgtggatgctgaggacttagaagcagtaaatcacattactctcttgccctctgagaagctcttctcttttgagtgagatggacacatatacacatgattagagtgcaatgtaagaactgctgtattacagcaatgtacttggcacggaattaatatagagagattaatctatgtgataaggaaaggcatgcagagaagaggtgatatctcagtagagttttgaaggataattttataggtgtttgtaagggaatgaggagggcattctaggcagagggaatagcatatgcaaagacatggaggcatgacatagcatattatgtttgaggaactgcaattaattcatttatttaaaaaaatgtatggagcacctaccgtctacctggtgccatgctaatcattagggttttgataatgaccaagttagataaggttccattctcccaaagcttgcattcttgtaacrtagtttgtatgagggagatgaggggtgatacatgataagttaaggagataggcagtgtgtattagcataataatatgaataattattagtattcgtaacctaaaaattattagtctcccataataaagtaccacaatctgtgtggtttatgataggaatttattctctcatatttatgctctcacttctggaggccagatgtccaaaatcaaggtgtcagcagggccatgctccctctggaggctctaggagagacagttctcttgactcttccatcttctggtgtttccaggcattccttggcttgtggctgcaaaaaccctgaccctgcctctgtcttcacgtggccttctctgtgtgatgcatcttttcttctttctcttataaagaagagagattgcactcattccaaggtctttaacttggttacatctgcagagagtctgtgggctctaggggagaatctgttctttgacccttccagcttctggtggctgctgccattccttgacttgtggccacatcactccagtccctgcctccatggtcacactgcctcctcctcttttgtctgtgtgtcagatttccctctgcttttctcttgtgatgacatttaggctcactcagataatctaggacaagcttcttatttcaaaatccttaacttaattatatgtgcaaagaccctttttccataaaaggtcacattcacaagttctgggggttaaggcattgactaacatcttttggaggaccattgttcaacccactatacagtccaagattgtaaggtctttgtatattcaccttatgaggtaggttttatcatcctcatttttcagatgaagacactgagactcagagaaattaagtgatttgcccaaggtaattcaaaaaggaagtagcagaaccagtgattgcaacctggctttgtccgactttgaagcccattctcttcctcccatggcacactgaccagaattgtttagaagtctgtcctttggcttaatacacaagtgtccagttgagggggttgcagggagccacacctagctattaccaggcagtatgaccttagtgggagctagtttgagagaactgttagaggatcgagagcaggctgcagtggatatgggcaggaagtttgggggagggagggcagtggggatgggggtgacaatgaagagaaggggcttggagttcaggacaagggcaggaatacccaccaaatgagggaaatagcacttaaaggaaaagtagggccaggtgcagtggctcatgcctataatcccagcactttgggaggctgaggcaggaggatcatttgagcccaggagctcgagagcagccaggacaacatagtgaaaccccgcctctacaaaaaaaaatttttttttaattagccaagtgtggtggtgtgcacttttagtcccagctcccctggaggctgtcggggaggatcgcttgagcctgggaggttgaggctgcattgagctttgatagtgccactgcactccagcctgggcaatagagtgagaccctatctcaacaacaacaacaacaaaaaagcaaaagtgggccatgctttaccatcgtagagttttgcccagcacctctggttctttgatgtgtgaggggctcctatgcttgcctacaactgggaaggtctctgactggggtggatataagctggagggcctgagatgtgtagagaaggactctctgggtttgtattattcattcctcctgagcattgccatgagtgagcactggaaattcagagatgaacatgttttggtcctgcaccggaggcagagtggcagagtagaaaaagatcaagaaccaaatccctgctctgcctctcattcaccgtgtgacctcagatgaggcactttagctttccaagcctctgttttgttatctgaagaatacagatttttttgagctttgaaggagataaaaatgaaaagtgagtggcacacccctggaatataatagggtcaatgaatgttactttcatttaatcaaaaaactctcttgctgagcagagcaattgtttccaaactggaggttctgcagccttggagtcctcagagtctataacacatacacctacatgcaccattgttttcaaatattgtagatggcatggtgttgactaaaatacagttgcatttataggctttactgaattaatggtgactcttggttattaagtattgctttgattggtgtatatgaagatcctgaaattctttgatattaaaaaggagtcttcagactcaaatatgttggcaaccactggcgtaccatggaagatagagatataaactgacaaataagattatgggtgaatagtgttattacagagctattgcagaagcatagaggaaagctagacagctgcctgaagaaatctgggaaggaggaggtgatacttaggctaggctttcaaagatgagtaggagtttccctcctttggagagagggccttgcaagtatagggaacagcaggttcaaagtctaggtggcaaggacttcagttttggtgggaggtggagtgggagacaggccagaaaaggagctaggagcagggtcaggaccaggccttgaatgccatgctatagagtttaagatcaccttaggcaggggaaatcaggggcggagtttagatagaggagtaatagtgtttgaccttttagaaagatcattgcctttgcagcttggagagtagagctggagagacctgtgaaaaggaggcagttgtggaggagcagagtgggactcacagcagagcactaaagcacaaagtctcaggcagtatataccctgggcctaaatcctagctgtactccttaacagctaagtgatccaattactcagtctctcagttcctcaattttcttatctgtgtgatggatataataatgtatctatctcatgggatttttgtggaatataaataaggtacatatgtatggagcccggcacactgtaggtacttagtagatattttctgtaaaatttcctacttcatttttttcttataatcaccctaaaaaggaaaatatatttgcttgttttcttgttttacagacaagcaaattgaaactcttagagattaagaaacttgcctaaatccccccaggtagtgtggctcagaggtctgagttcctctgagcctttgccctttccactgggagatgctgtttcccgtgtctcactcaatcctgattacaagtaagttcacttatgcctggggcagagcggacacccagaaaaccgtaactgtatagtgtccatgaactctaacaaagaagtgtacacgtggtcatagcaggctggctctcccaatcctcaagtctgtccgtcttagggaaagatgggatatgcatagagtggtttggaaacctcgctcatccaaagtcacctgctggaagagccttcctgatggctgagggcatccatttctggttctgtggcctttcaacccagaggacaaatgaagtcaactggcctccctgagtttaggttggagtggttataacatcatccttaccaaggagagcttgagaaagggtgcagcctttgggttgaatacttaaattgccccttattagctatgtgatcttagcagagtgctcaaacctcagtttcctcaaccaaaccagcattaataacactaaccttgcagagttgttatttggattaaatgatacagagccaggctgtctgggtttgaatcccagctctaccacttactagctttgttatattgatcaaataatttaatctttgtgtgtcttggcattcttgtctgtaaaatgggtgtaatgatagatcctaattcaaagagttgtggtgaatattaatgagttaatacatggaggccaggcgtggtggctcatgcctgtaatcccagcactttgggaggctgaggcaggcagatcacgaggtcaggggatcgacaccatcctggctaacatggtgaaaccccgtctctactaaaaatacaaaaaaaattagccaggcatggtggtgggcgcctgtaatctcagctatttgggaggctgaggcaggagaatggcatgaacccgggaggcggaacttgcagtgagccaagatcgcgccactgcattctccagcctgggcgacagagcgagactccatctcaaaaaaaaaaaaaaaaatacatggaaagtgcttagagtaatagtatctaatagtaatacattgtaagttctcagtaaatgttagttattgttattattatcatgagctttttcctctcatagaccctagcagctgtgtaaacatgcaggcaactctttttgacagagcaacaccagcagcagaggagaggagagatctctggtctttaggcagatacagagacaatgtgcctgtctggacaggcttctagggcaagtagcactcttccatgtccttgaaggaccatttggtatatcacatataaggctgcttccctatggagagggttgagatctgatctgaaggtgaagtcatttgtctgtcaccacattccagccccattacctgaagaggaagcagcactctcagaccagaacccagaaatgaagggggttggctcaggccagagccagagctgattctggatcttgtctcaggccacaagagacaagactctgcaggacagatttcccaaccaggataccaagacraggatcgcctcagcactttggggtggctggccaggactgagctagcaggagcaagtggtgtcagactgcacgcttacctttccatttacctatgtgccaaacttcagtattttttatgtgaccttaaacacrttggggagtactgttctgggaggccatgcctttgaggcaataagcaagatagtgaccaagtggaaactgctgaaagttcaaatggcaggaagcttagcaaaagctgctgcagatgttatgttccagccctttggagagagaagagttattaaagagtcacaaacctcatcttggcagccctgcttgcttatagatatgtttggattcctgtgattatttccttttcattccccctagcatttagtaaacttcctcttgcaaataccgccctgtctcagctgcactaatgggaactgaggaaagagggtttcatccatccttagactagagttattattcagaaaaacaatactccccctttctcaggagacaccatggtgctgagagacttctggatcaggaaaggggagctggaagaggcagaatgagggctgcttgttcatttgctctacctgagcacagccccttttagggctcattattcaagcagagtgcagtcttcccactttccaacagtagcccaatggaaacaatctatagcctggatttgccttcaggaggaagaccactcattaactagcaaaaacattatcttccccttagtatttgagggtcagtgttttttgtttgtttgtttgttgttgttatttgagatggagtctcactgtcgccaggctggagtgcagtggcgcaatctgggatcactgcaacctctgcctcctgggttcaagcgattctcctgcctcagcctcccgagtagctgagactacaggcacctgccaccacgcccagctaatttttgtatttttagtagggacgaggtttcaccatgttggccaggatggtctcgatctcttgacctcgtgatccacccacctcggcctcccaaagtgctgggattacaggtgtgagctaccaagcccggccggtttttgttttgttttgttttgttttgagatggagtctcgctctgtcacccaggctggagtgcagtggcacaatcttggctcactgcaacttccgcctcctgagttcaagcgattcttctgcctcagcctctggagtagctgggactacaggcatgtgccaccacgcccggctaatctttgtatttttttttttttttttttttagtagagatggggtttcacgatgtttaccaggctggtctggaactcctgacctcaggtgatctgcctgcctcggcctccgaaagtgctaggattacaggcgtgagccaccatgcccggccaggtcagtttttaaaagtgatgaaaccccgaagtatttatatagatcaaaaccctaaatccagaaacagatcccaggtaagaatgtagatcataacctaaagactgtaatttttgttttttgttttcttaagagatggatctcattctgtcacccaggctggactgtggtggcccgatggtagctcactgcagccttgcactcttgggctcaaaggatcctactgcctcagcttcccaagtagctagaactacaggctcatgccaccacacctggctaattttttaattttttatctttgtagagacaaggtcttgctgygtagtccaggctggtctcaaactcctgggctcaagcgatcctcccacctcagcctcccaaagcactaggattataggcctgagcgcacctagccatcctgaagactatgttttgtaaaagcaggtcatcctgcttgaatgagcmaaattgttcatactcctagttccctttggtgttaactgcatccccaaggagaaggagaactcagaggaatcagcaacattatttgctttggccaggaattctgtcccagagttcttaagagaaattccacttcctcacagacctagggtgatacatgggctttggaatcatagttagcaagctttggtttcctcatgtgcaaacaagcatcaaaatagcaaaacctacctccaagggtcatttggaggatgaaattaggtaaattagatgaaagcatcccatcccatgtgtattcatcagggttccccagagaagcagacccaataagttaaatctctacctctacctccatctcagagaaagagagggagaaagataaagagagagtgccattgatttgaaggaattggctcacacagtagtgggggctagtaagtctaaaatccatagtagagattcaggtaagaattgagtccaaaggctggaaactcaggcaaaatttctctgttgcagtctggagatagaattacttctccaataaacctcagtctttgcttttagagcctttaactggatgaggcccacccacattatggaaggtaatctgctttacttaaaatcaattcactgtaatatgttagtcacatctaaaaaatacctttacagaaacatctacactagtgtttgatcaaacaactggtttccataattgacacaaaattaaccatcataccatgtaagggttagagttctcaacaaagacatttccttccaacttcccttcctccctcctttttaaagtcattgctgaggtttgaagaggtttcacttaatgctgtctctggcatgtaggcccacaagctgttagaacctaagcagtggggtctgtgtgtcccttctgtctctctcagatctgyttctgctgagtttacatctcagggaagcagtgtccccacttcctgagtcaagccctgggatagctttagtggttttccattgaacctgtgctccaggcacagatatacagataacgagttttcctcyatatcctgtacacattgttttcaatctgcttctctaatgtttgcggtgttgcattccttatttttgtttctgaggtttgatcagaagatgtgggctctgccacagtgagaatatttcagctaccaggatgacctttctggcacaggttagttagcagtgactgagagactgtaaggaaagatttttgtgggggagtaagagttaactccctgcctagaatgtttcaggtggcattctgcctggaagtagagagctggactccattccatgacagagatttatactctgcaggtgatccaaaatgcttctcattktaatggaatgtggaattgcttttgccaaagttgaagaatgttttagatgggatctctaaggtagcaaaaggttgtgaaaagagctctggaccaagaattagaagactggaaccctgctttgccactgtctccycacatgatcatgagcaagtcacctcatgagcttaggcctcagctacctttttataagattctggaaacaaaactccacctcatctttgcacagacaccacttggctgctttcagagcacttttaccattcatcatctctggtcctcacaccagcttcgtgaggtagacaggatactggtatggaaattggtacttctgtttttcaagcaaggccactaaggttcaaagagattaaatgacttgcctaaatttacacagatggaagtgataaggctgggactgaatccaggatccttagtctagcttgttttagggtacccttctgaatacggtgatgtccatggaacagtagggaagagcacacagtcctgttggcagaaaagtagtgagcagatctgatgtcggagaggaggtgacattgccttcacgctctccaagcacccgaggctttggagggaaatgatagtctgagtggactcccataaaccagaaggaggttggtctccagctactcagattaacatgttttctcatgctgttgattcaattcagaaaacatttattgaggctttatcatatgccaggctctctactgggggcagagtaagtaagcagtataatgaaaagtagactggtaagttttgtatttgaaatgtaaacagagggctttgggtttacagtcaaaggtacaattaagtcatyctggagagatgaaggcaaacacagctgagccctgaaggatgaagcaggattgaacaggaggagaatggagaaaagtgatccctgccctactcttcctgcttggcccctgtgccacagccacccctgctatgaactgccattctacatgaagccagcagcagacagcctgtttgctgcagaacctgccagatctaaccctggtggagctttaccattgcttgtcagatttgatgcaatgccctgaagcatatactgcaaagcaagaggaattctgcctggcagctcttagaggagtatacagcaggaggggaggcccatgggcccctggcagagaaatgggcaggttggaaggaggtacttttcttagtgattgtgcctacccctcttaaggggctgagaggcaggagctgttgctttgcatgtgtgattttagactgagagtgttttgtgtctttattttaaaactggtttctcagtctyccgtgcagttttctgtcagctcgttgccatggagaagtgggttggggctggaagctctgtccttctctgtcagcatttctggacccaccagctgcctcctgccccttctrcagatggaggggggcaggaccacatttggtgggcagaccttttctctgcaagcactggaactgcacctcagttccctttgggatgctagtttcattcacccatgcattgactcagcaactctacattgagtgtcttttatgtgccaggcattgtgctgtgctctgcaagtacagaaatgactttggctggtggcacgtacatctgtggtggaccctgccagcctgttctgttacaacatccctgtctgttactgttcctcaacctcattcttttcagaatttgaaggactgaatttgtttctcttccaatctttataactgctcatttaggagctccctggaagttacctacttagtctctccactcctggatcgtattcttcgcctccggagcgcccagcacagtgcctggggcaaaggagggacttggccaggaagtgtatatctgatggaattctttgtcaaacctctcagaatgtctgtctgtcctgtctttcttcctccacgctgagcctagatgcagcatgtctggaagcatgagctaatgggaaaygacgggtttttgaactagataaatctgtgcttgatatgatctgacaagcaagtggcttcttagcttggagccttagtcaaacccattattttctctaaacctgcatcacaagtctatcagcaattgagttttgacaatttaaaaagcagtgtagaaattcttggtggccatttaatcctaccagctgctctcctggctacgtccatgtgggacccagatgagaaaagttgtcctgcagagaaccctgggttgggatcaagagacatggaactgtgtcctggctgtaaccctaatgtactgtgtgactttgatcaagtctctttccttaccaagacctcaagttccctatctgaaacatttaggaattgggttaggtgatcttggagggttcttttagttccccagatctgaagattcagctttgaaagaaaaatcttctctcagctgcttccaccaccattaccagtgtccctaggctggaggctgacctcagcatgaccccttctgccagcctctggaagctgctctcccaagaggctccgggctagaacactgatactggatgcagaaatctctttcggatgtaaaagtctcctttgaatgtatcatctctgttctcacccccagtccrgtggctaggcttggcttgcatcccagaacagagaagaattgctggaaggaggtttttggtggtggttttttttttttttcttcacctgtatcctgcttttcctcaggacctgttaccttcctgagtctttggctattaaggattctatttcctgagccacctgtgacccagggctctgtgctaagcacagtggaggataaagagatacaaaagtcatcgtcctcacagacagtctcacaatctgtgacatggacaggtgaaataaagaactacaaagttcatgggaagctcatcaagggaatgctatggacttgggttctaggcatagcccttattctgtcttctccaggccccagttttctgttcggtagaattttgagggttgggccaatgatctgtagatkcccttgctgctctgaaatttaactatagytcagtgtaggcatgattgttgtagacattttagaggaaggaggacttgagctgagccttgaaggctaggctaggatttggattagcccaggataagggcattcctgattgcgggatggggaggtgtgaggatagacagatcccaggctgagggcagagtgtgggaagcccttctgaccagagcacagggtttgtgtgggatacaagaagtgagagaaatatcagagcaggcagctgttgccttccatctgagggccctaatcctcaggggcttggggccaccccagtgatacctaaggacagagaaataaggcaggttagaaccagggcattytccctaaatggggaccctagtctgatgcatatcatgacagaagacctccaccaagaatacactagggtcaaagaaagagaggccacttctctccaggtcctttccttctcactccaaccagcaggtactaggttggtaggagcagggcacagtgtgggagaataaatcttcctgggacagctgcccttgtttcatggtctgttcctccccaaatgttttcctgaactcagggtgacaagggatattttggccatatccttggggttggattctagattcatctaccaggactgtgaatcaaggaatcacatatcctagacctggttgcgacttccatcctcctagtctcctggctaaggctatctgactcctctcacccctctgtacccacagcttcacagatgccaagtcctcttggtcccacctctttgctttctctccgtcctgccctcttctgcgtcccactgccactgagacagctcaggctttgtttgtcctcctcctcttagactttgcctccacctccaaatgatctcccttagaccctccttcccactcagtctaagtgtttagaaaagtgcctggcatcgtgtgagtgcatcctaaatgtgatctgtcatgatggcaagaacaatattgatgattgttattatgccagattttgcctctgaggcacagatctgattctgctactctgttgtccaaaagccttagtggcttccaattggctatgaaataaagtccaaaatctttagtcaggctttttgaggattatatttcttgagccatctgccatatgccccgtacttatcatcccaaatttctttccttctgctatgttttgcaccacgtcttcttccaccaagtggaactaccaccattatctttgcaatcccctccttcccccagctaggtctttgttcccactgttctatctacttagaatgctctttcttccctctcccctaamttttcttcttcctccaggaagtctcttctgatccctcagattatttattccttgctagcmggtgccatgaatggttcattttatatcccttatgatatctaccaagtaagacaaaatagacattttatgaatgactggaaagaccgggtttagccccctattttcaaggaacctagagtttgaattagggagttgtcaggacttgtccagccaaaccccaatacctatatattcctttggagagatccagaagttctctaatggacaagtattcagttagctggctccacatggtcatgaccctataaagtgtatacaagccaattggctcctcttacagcaaactggcaggaaagggtagaaatatggggaatactagctacgaagttggcccctgctgggttgagatagggatcagtcatacaaggtgtaggggcctatattatcctggaaatgtcactatcctggagggcccatttgtgaccaggggtctgacagcaagcgtcttaaggtaattatcattgggtgacatggcttggatgtttgtcccctccaaatctygtgttgaaatgtgatttccaatgttggaggtggggcctgttggcaagtgattggatcatgagggcagatccctcttgagtggttttgtatcatctccttggttataagtgagttctctttctgagttcatgtgtgatttggttgtttaaaagcgcatggcacttccccctgctcgctcttttgctcctgctttcaccatgcaatgtgcctgctccccctttgccttccaccatgattggaagcttcctgaggccctcaccagaaacagatgctggcaccacgcttcctgtagagcctgcagaactgtgagccaattaaacctcttttctttataaattatccagcctcaggcatttctttgtagcgacacaagcacggactaatacattgcacattcacattccaaggggcccaagccaggcagcaacttggaggacagataagaagttcaggcccttggtagtgggatgtcaggagagcctaggcagagtgtgagggtcctgctcagccagtaagagtttgactcaggcctttagccccaagaaactctcagattaggggacactaatcttgtggctgcacatwctagggggtcagcagggctatcaaagggaaatgggctctcttcctgggtcaggactgacttagaaattggcatgttctcaatttggaaacaccttgttctggtcttcatttcccttaagtgggcaggactgggggaggcaatggctgccatatagctaggctcagatatgagtcctgcctcccctcctggttcacagcctggcttaccaggcccttgcttccatttcaaagtcaagtcatgatcatgccaccctgtaggccaccatttggaaaggccaatcccaggctgacactcattgcctgtaaatgacgtggaattagggtaatcagtggctcctaattccccaacaaatgcaagtgctgtgctaattgccagggtccacgccggcagatccctggttggcggcatcaaacaagagaagtggtaatttgggggctggagttggggacagcctgcttcgttggctgagccagctaaaaaccgcattaccccctgggtgagccacagtgcagacagccagggcctggcttccttatcagtaaagggaccaggtgagtggcccaaagtatgtttataggagctgaaccttggcaccagtgctcagcagttgcttgtccatyaatgggttgtgttgttgttgcatgggttttggtgaattttttttgggggggggagttctttgaggaagattccacaagcagcctggcatggcactgccggggcagctcatcagggataaagcattccgaaccttggtctgctgttaccatggcagcatcacatgtccggacattccaggcaacccttactggcatctgctactgtgacagattcagatggagaaggaacactgctcttctccattataaacagagcaagttgtggagacaggggagccattcaccaaggaccagggtcttaaagaaaatgctattccatcgagttgggggcttcttgatgaaatagtatttgagtggttgttaaagcttttctgttgggggagagatgcggcatcagaagagacctcctggaggagagaagtaaggggaggtgggggcagcatgaacaaagtcctggctcaggggtggggtggtaaatagagtgtgtagatggggtacacaattgagtttggtgggagaacagaccttgttggaggtaggcagatgttagccatacctctctgaatcctgctggtttgagccctgtctggcaaaagtcatcacgccacccagattctacctgatgctttcctctcctgaggaacgggaagtgacggcctcacctcacttcaagtgggcacttctccctttctcttttgggtcacagttgtttgtgatatttctcgtgcccattagaataattgaatctctacatttcagatgggaagatgcttgcctaaggtcacccagcaatacagaggctgtggaactaggagttacaaatttaggatctggacaggctgacgttggtttgagtcctggctccaccacttagttttcagctgagcctgagcctcagctaagcctcagcttcttcaagggtaaaatagtgatccagaacattcctgccctcttggcttattgtgggtgtgaaatgagataacagaaatagtacagcatagttcttgatatatggtaagagctcaggaaatgttcattattaaatgttagttattttccacataaatggaccatcgtattcatctttgctccttcctccttctctttccttgcatacataaggtacccaaatatcactttatctagaattgatattagaggaatgtttgttgactagttgaatgtgcgaatgatgggaacaaggaaccatccatgttgctgggctctatacttctgtctagtgttttcasctttggtgcagtttagtctccatagggtgggagccaggccaagcttacagtctgtcctgtgtagctcagcttgcaagtcaagtgacttgctcattcaggtttcatatccagctgccctgtggcccaggacttaaacttcccagggctttgggtttcttgaaggacaaatgggatggattcctycctacctttgggcccaataaatggtattcatggtaactgacatctaactttataacatacaaaaggtttccattcactcttccatgagcctcaccacagcactggaattgtcagaacaatagccccatgttatggataaagacactgagtctcagtaatagggagtggctggtccagaagcacacacaggagagcaggaagaggggatcgcacccatcttttgactctaacactggtggtctttccacygcatgaagcttttagggtctgtagttcttttaggatatgatcccaatgaggtaaagaatactaggcttggagttgaaataccttgattttggtcatgaccctgtcacttacaagtttgcagctctgaaatgagccacctctcttcccaaggtgcttattctctgaccttcttgcttcagggttgtggtggggctgatggagctttggaaggtctaaaactycacatgagtgactgaggagaagagcactgtatccatgagccaccgtgagctcagcaaggctgtacgcccagcacagccagataggctgtagaattacagcctgggtatattgggaaagttacacttcattgtctggaacatcaaccatcagatccgggagggcccttgcagatcaccatagctggtgctttcagtttataggtgcagaaactgagaccctgtgagaggtagtgactcacccaagaccacgtgttgagttaatggcagagctgagacttagagcccaggtctgacactcagccccacactgccatggagccatgtggctgttaggaagggaaaattttgcattttctcttgcctgagtatctcatttgaattcatttkaaactgttagataaagagtttctcagagaactgtgtgcatcagacagtattttcaacagtctttgttttccaaactttttttgttatgaaagtaatatatgatcatggaagtaaattgggataatagagaaatgttctatttagaagacatcaaattgagggatattcttagccctcagaaaagatattttttagatggaggcttttagaccaatggttctccaaaccctgcaacaccttctggaagtttagttacagacagtaggagagtaacagtccattgaggcctctgaggacttaacttagttctatagacttgagatagttagatataccactaatggtagtaataataatagttgttggcatttatttgcagagtctcttccaggtaacaaacaactttttcataggtggtctcatgattatttgattgttagaagaatccagtaaagtagggaaaacaaatactatgcttccattttacaaaggagaaatctgagcccaagagagattaagtaatagtagtggagctactgacttcaaacaaatacttggcgtaaagaaggaaggcacctaacaaatatttgtgaataaatgaatgattgaatgaatgctgacttctcttctagggaagcctctagaaatcattttgtccagtggttcccaaactatggtctgggaagctgtaggattccatggagccagttgggagtagtgggaggctgagtggatagggctctgagcctttcatccctgctccagtcagaataacttcagtgctgcctgtttcatgcactgggagattgaaaacaatttagcgagtctaactcctacagcagtggttctcaaactctgttgtgcgtcacagctctgagggagattctgacagttggtataggatgggcatcaggactctgattgtttaccagcacagatggtcatcgggccactgtttgaaaaatagtgtcctacttctgagagttggagattgcaagacccagggagaagcaggaattagccttggtcatacaatcctgtaggaacataggccccactaggtgtctgatccttgggtacctcttccactgcccttcccccggtaccacaactgcaaccgtgccagaaaacaaatgacacagcagagaagaacaaaatggtttccatagcaatgcttagtggcttgtgcctgtcagaatgcctcagacaaacagtaatctgaaccctcggctagaacttgtgtcaaatgttacctacttgttccatgcaaggggtccatggagatgggaagaaggagaagggatgacacaattttgccatgtgcccctgtattggacggttttcccagattcactaatagctggcctcaagatacaccagatcgaggaaggctgagaagtagatcctgggcaggagatgtgggcaatcccaacagcagaggggaagatggggaagggaacaagtgtccagtgagcgtgtgtcacgtgatggagtctgtgctgggcactttacatattcgtttagaaaaaggcaaggaaaagaygattgttcttatttacmgatgaagaaaccaagaattaggtatatacagtaggtgacagaggcaagatcaaatccaagcctgtctggctccaaaactactgagcagcaacaactctctcccagttctctgacccactgggtgaggacttgagatatatactgcccagctggctttccttcatctcagaaagcagagggtcagcctacatgcagatggatgggtgctcatttgaagggctgggatggactaggctaggctaggcctgccaggacagggttgatcctagagttggaggtggtctgttcaacctctagctctgataactcccttcctccataactgaggctgcagccaccctacagaatgcctttagcatgggctaccctgactgccctgccacatgtgtgggtgtgcacacacaatatagcagttgcttcagattggtgatcccagtagatggtctgcccagcactttgatttgggttcccctcaagggaatgagcccctcctggggcaagtgacaactcttcattgctaaaacaaatatttattgagcaccttttatatactcataccttttctaagtgctggagatacagcagttgaataaaatgaaatgtttgctctcatagagcttttcattctggtggggaaacagacaaacaaaagtatatgatagggtattacgtgctgggaaggaaaattaagcagtataaagagaatgaamggatgaaattgggtgatcagggaaggccctctgagaaagtgccatttgaatgatgccctgattgaagggagggagggagggagccatatggttatctggggaggaaggttccgggcagagggaacagctggtgcaaaggctaaagctggaagcatgactggccagttggaggaagagcaaggagaccagtgtggctgaagaggagtggattaggaaaggtgaggacgcgagtggcagcagtgggtatcagagaggtagctgggatcagatggtataggaccttataggctaaggtccagacttggtattttcttctgagctagaatgccatttgaaagattcacactctgagacaaatgtgcctcgcctcagcctcaaagtctctagcccccttgtctgggaggggaatctgccactaggggctgagcccacaggaggctgagtagtcccaggtggagacatgtatagtcatgcagggagggagcccagtggaactcactgggcttccttatcttcatttgtgtatttattcttagaaccaatgtttaagggtctttcagggctgcctcatttttgggtggcctcatactacctggaaattagatgtcccaaagagagtctggctgcagggtctcatgcaaacactgcatcctctgggaatgccactgctcctgctgacaccctgcttcaggagaggagctctgtgcctgggtttcccagcgcagcagtcctggcagctcagcagggttagagaagaatgctacttccaatgggaccagtaggagaacttgggtcggtggttataatgatctgaaatggtaattttcctttcaaatattatgtgtttttttatgaaacagggacattcacaaaggtaatttatattattagcccatgtagtatgtatgcatcccagtcaagcacttcattcaagaaaaaacaaaaacaggagctataatttagagtgatgaaggcaccaaattaggccccatcgaaccataagcacagtgttacctcttgagctgcccgctgctcacctggtagctcctacaatttgttattcacacggtttcccaggtctcaggtttatcatctcttaggctcaccagaggtctgtatttggggaatacattcattcattcatgtctaataggcacttacatcttaaaatgtccaaaacagaactcttgattttctcccccaagcctatctctcctccaggcctcctcaacttcataaatagcactaccatccactcattgctcaaggaatcagttttaattcctatctctctgtatatataatgtatcagcaggtcctagaaatcctatatccaaaacagtttataaatccatttatctccgtccccactgctaccagcctactttgagccaccttcctgcactgcctggttctctgcaatgcagtagcctcctaaatctgctccctgcattttgcctttgtaatccagccttcagagagcagccttttcaaatgtaaatcagaatttgtcattccctgcttaaaaccctctctagcttctcagcattctcaaacttctaactcctcacctggcatcccaaggccctgcttccccttgaatttttttttctttctttttttttttttttgagacggagtctcgctctttcgcccaggccggagtgcagtggcgctatctcggctcactgcaagctccgcctcccaggttcacgccgttctcctgcctcagcctcccgagtagctgggactacaggcgcccaccaccacgcccggctaattttttgtatttttagtagagacrggctttcaccgtgttagccaggatggtcttgatctcctgacctcgtgatccacccgcctcggcctcccaaagtgctgggattacaggtgtgagccaccgtgcccggccttccccttcaattttaaggcctgcctctcccttggctcacttggccccagacacacgtggtcaccctccttgctatatctggaactggcaaaatgccttcctccttccagcctttgtattgtcatttcttctgcctgccaagttcttcccacagatatggctggctccttcttgtcctacaggtcgcaactcaggggccacattattggggaggacttcccaactacctgcccttctaaatcatatactgtttttttataactcatattactagctgcattctgttgaattgtatgactacttgcttgttgtttctcccattagagtataagccccttgaggacagggaccttgtgtgttgtttggtgctatattctctgcaactgcttgaatattattggcactctataactattcttccactcatttattctgcaactctggcagatgaaaagataaataagtatgcaaaacacagaggatttttagggcagcaaaactattcartatgaccttataattaggtggatccatgtcattatacatttgtcaaacccgtataatgtacaacaccaagatcatccataatgtaaaccacccactttgagcgccaatggtgtgtcagtggtgcgggatgttggtggggaaggctatgaagtaagtagaggcaggaagtattatgggaactgtccatactttctgcttaattttactatgaacctacattttctcttaaaaaatagtctatttaaaaggaaaaaaattcattaatatatattaaaagtattaacccattagttttctcctattttgtattgtaataatttttattgacaagaagtttaataaaattttactgtttagaaaaaaaaagataaataagagaaagactctcttcccttcggggtttgatccatctcaggaattagccactgcctggtcttcctgagcaaatctttccaggacctcatctccctgtgctgtcactgtgggatggacgctcagctctctaacccagcasttgggctttgtgggagcctagttgatgtgtacaaaatgaattgaactgaattgggcatagcaccagacacggaccagatactaagtaggtacaatatttattcagtgattggaacttctagggagaattctgtctcagatttgtgtcatccgtccccatgtgaactctagtaccctaatcttcctgcatgtggattcttctggacctgccactggattccagagcagaccttcttactaccacctccactattgcccyaattccctagcttcctcttctgcacactggtgattcccaaacaggcttgaggagagcaaggtaaggaggctctggtggtgaccaggcttcaggaatggcaacagtgcagctgctcctggtcccagaatggcatccattcctccacccctctgctagtgcccctcggagattggcatgttcatttaataagatgacttttaatggaaacaacctgaaagtyccagccaggtctaaaccaccagcatacgggccaggccaggtaagagataggagaacaagtcctccagaaactgtttaagagtttttgcaggccgcgggttcagcaaggggaagyggacttggcctccaaagcagcgaatgtggcctcaggctaagctaacagaggtggaaccttggggactatgtgtgcatcttggtgggcccttcatctctggacctcagccagctctgggtaccatacttctagagggatgatgatgactgagaatctgctgagggggccctggtaggcaatggggacaagctaccaggtcatacagagggaggaggtatcaccaggattgaagaaatcttggaggacaggagagcaacacctgaagggattcagatccgaaggtgctgtgtgcatgcccttgctgctccatctgccagggccacctttcttttggcagcaccaggctccacagcagacctgctggtccacagcctcactcttgtaccacatcacagggtgtgcttgcttctggacctctcccagcctgtttcctcatccacagagtgtgaccaaaatatcttcttcccagagctgttaaatgagatgggtgatacaaaagcccataacgccatatgtgatcatagtaggccctcaagagggttagtttctctttctgccccctctcgcaaggcagccaataagcccagaaagccagcagttctgagagaacacagaattcagaaagacagtctgtagggaggatttcagttgtttataaaacaggccaacaygtttccaccttgtaagttctaaatccgtcatcatagctccctagatctaagaatagtcacccactggagccaacgtgccacagcacgctctcactgcaggtgactgaggaaatgtgtccacagcagcctcagcagcctcctactcctggggctgggggtggggagggctggcctctgcctgtcccagcttggctgtttctgaaccgcacccaaatgcagttttctcttccatgcagtgttgatccaatacgtgcctcactgggctgctgtcagatgaggtgcctgcagtgatgccagggggtggttgagaggagcggggaggtaggccagtggggacctttgcatggcattgccccactgtgggcctcagtttcctcctatgtagagggaaagtgattgacagagagaactgggcaaccttttgagcaagggggttctagaagaggttccagagcagtcctagccttgcagcttagaacccatcaattcaacacacttatttatcacttgagccaaggcctttcttttgtctggtttgaaggagccagcctggggagcgtgtatctgcccactctcctcttctgtgtccaccttccttctctttcttacacacttccatatccacacacaccaccacacaaattctccaggattggaaggacttttggtttgtctcagcccagcctctgcccactgtgggactgtcctgggggctcaggacctgtggcagagcaccagctatgttccagagcagtcttccagtcattgcagcgttcttcctgatagcgagctacaattgccgtgcccatggctgctgctttccacatccatgggttcccttttggccctctaagagagaagaagcagctccattctctcactgccattcattcatttgtcctttcattcacacaacagcattgagcgctaacctatgccaagcactgtttcaggtactgggatatagcagcaaacaaaacagagtacctaactctcaaagagcttgtgttttgttaggagagagagatcataaaataaataaactgtaaaaaaaaaatgaagaaaaatagagcaggtgaagagataagacgggagtaggggtagactgctatttcatataaagttgtcagggaaggcctctcaaataaggtgggactctcacaaatacctgaacaacatgaaggaatgaacctgtggctgtcagggccaagagcattccagatagcaggaacaataagtgcaaaggtcctgaggcaagtactgtttgaggaacagtaagaaagtcagtgtcactatggtgatgttagcagagtggatcatgatagaacatgatgtyagagaaggagctggagacccgctgttgtttattctgagtaacaggagaagccactgaaggattctaaacagtgcagtgccttgtctgacataggttttaacacaatcactcaagttgctgtgtggagaatagaacatacagggaaacagaggcagcagagagaccagttgggcagcccttgaggggtgatggcactggtgagaagtggccagatcctggctgtattttgcacattaccttccccaaaccctttttccacaggccctgcccttttcttacctggtggacagycacagcctccttgctggcctccttgcctccaaccctcaccccccatctactcctctcacctcattctcagggctgctgtggatcttggtgtgaaggggaccctaggcctgtctgttttcccacatacagccttctctgaagcaatgtgggccacaaacccgaaacatccccagagtaatcctgtgggtgaacagccccacttttgattctggagtagcttctttctgctgcctcagctcctgcctcgagggtatccttggccctggagagtgatggatggactaattcctgaaagggcctgttttagtccatgttttgctgctataacagaataccacagactgggtaatttataaagaaaagagatttatttagctcaataaatggttctggagactgggaagtccaagatcacagggccacatctggggaagaccttcttgctgcatcataacatggcaaaagggcaagcaaacattcaagaaagagagaaaaagagaccaaactcccacgataattaacccattcccacagtgacagcattcatccattcatgagggcagagccctcatgacctgattgcctcttaaaggtcccgcttctcaacactgttgcattggggattaagtttccaacacctgtacttttgggaacacattcaaaccatagcagggcccaacactgacagtgcctgtgtcctctgccaggcccaataggaccatcatcctcatagccattctcatggccattctctgcatggcctcctgggtcagtgtctcctaggtcatcctctcctctttgctacctctgtccctggaaatactattatttttaaaatcatctctgtgttactgctttttaaaatatttgaacgaaatgaaaatgagggtcacccttcccccatttctccctgtctttgtcagagactgttctcaatttgggatgtattcttttccatttgtacatataaaaatatataggggctttgcataactttatgttaaaaaaaagttttaatatgtaaggatcctagtctgaagggggccgtggctttttgaaatcatcttctactggtgaatgttcttgaagccccccagtcttttgcagttgcaaacagtgctacagtaaacaccactgtccatgccccttgtgtacacatgccatcatttcccataactgtcttttcccatggctgtcttcctcagtggatggggaccctgagggcacaaaatgaattttcctcttctctgggtcttgtgtgcagcacaagtcctaaaccagaaaaggcacccacatgatgaaataaatggactcaaggttgggcaagagcatggcaatgtgaacagcctgggtgaattcggggagccgacagcaagcctgtggggctggaacactgagttggggaacaggggtgatgagagacagactactcagggccttgggagccagctaaggggcctggacttggtctcataggtgctgtggagacaggaaattttccatgggaggacctagaccaggctgtgtttctgcctgatttctcccacccaggccagcagcctcagcataaaggatagggcaagggacgtgaggacctgatcccctttttccatcctgctgttgccatctagacccaaagcactttaggaggcccacttcagggattcctcactccccattccttgctcacagcaggaccctagggacagttctaccagttgctgccaaaaggatgggatccctatgagcttgggtggctaaacactcagaagtgtctcccaaacttaccctgctccaaggcccgccccatccttcctgacatgtaccagaatccagagccctcctctctatgagggcgctcaaacctcacccctcctctccgtcagcctggtagtgcagaagagcagtcctgactgttggtctaggcctatgcgtgctcttagacaggaggagacaacatggaccattcgctacctaatttcttgtgcctatctctccctcctcttcccactgcccagcagatgcagaagggggcagggcctcagccccagcgctcacagggctcagggagatttctgctcctctgcacagtatctttctctcgccagctggagttcttgccttccattacttcctgygttcccataggtggactgttactctgtaccttttcttaattacctgggaagcaacgtttttgctagagagaacagtataatattaaatagaagagggcctggagccagactgtctgggttcgaatccagctctgcctcttgtttccttgcacagttcacgtcatctctctgcaaaatggggataatattagattgcacttcacaagtttgttgtgaggattcggtgaatgaatatttgcaaagtgcttatcacagggcctggcatataccaagtattcaatgattctgttaccattttcacatggtttggaactagtgaaggcgcctgagatttgggagtcctggattctagtcctgactagaatagctgtgtggctatagacaaattactttacctctctgagcctggttcttcatctgtaaaatggamgtagtagtacctccgagggttgccgtggaaattaaggtgacatttttatgaaactgagaagcaccatccctaggtcgcagccctcatgctcatggtcagaggtagtggctacaactccagctatcgcatccacattcccagtgacaggatgcaagagggacaaagaagaaggagcaaagagtgtatgccatctgtcttttaaggaaaagtcccataagcaattacagaacatttcagcttgaccctcactgatcacacctagctagctgcaagaaaggttgggaaatgtctttattctgtggttcaagagacaaccaggaggctctgcacacatgctcaggtgtttattcctccttggcaacgtcctccagcagaaatgctgccccctccctagcactgggctgcagtcccagcaccataaggccctatgaggacttagttgccaagaagctcgggcaggtgccacagacctgaacagatttgggtattgtgtccagcttgtgccagggaccctgccagtcctgaggttccgttgcctgcagggctcttaggctgacgcaagtgtggtgggctgtgagctccatcactcgtcacagcctagattgagccctgtgagcaggaggcctgaactccaagggcctagggaatccctctgtaaatatggggctctccacccaagkctcagccatgtgccccaggaccagcaaagcagatctccgtcaaccaggtgggattctggtgtcttcgargacctgacaagtgccaagcacactgcagagagccctctgtaaagccagggatcgtcctctaacttacctgttttgaaaactggacgttccatgttccatgtcgcttagggagaggctttctgtaggccactctccttcctcttacttctgtgtgagaacagcctgcatagtagcatcttgctgagtctggagggccttgccagcttcattgtgcccctgaaaaggtggccctaagtgaggttagggggtgaatgaaacctattctaaaatgctggaggagcttattactgaaagatgtcctgctgcaagtccttctgttaaggggataaccaatcctttgcttttctgagttcagcatcctggctttttttttcctataggcttgtttaaagtgtttggaaaccccaaacttcctatcattctactttagaccttctcatctgctgctgcccctccatctcctctttgctgtttgccactggtgtggctttccttgccttttcctcctattcccatgatctgctttccacatgggtttgagctgtcactgtgtcaggcatggtgctggggcattgctcctcctcatggcaaccctatgaagtcagtggggacctacgtaccattatcacacagttgtgtggtaaggtgggaccaggacagcatagcgtagtccataggccatagtctataatatgtgtggagcaggggatggcaaactatgaccaaatttgacttgtagcctctttgtgtgtgatgctgcaagctaagaatggtttttaaagggttatcaaaaagaatacatgacagagacctaacatggccctcaaacctaaagtatttcctatctgccccttatagaataagcttgacaagccctgggatgtaacatgcagacttcagcacagattctggagccatcctgcctggattctagagcctctgttttattctctctaaaatgagaataatctgtaaattgtggctgcctcacatggttcttagaattaaatgagataaagtacacagagcacctaacccaaagtccagctttctttggaagtactgcggggggatattactgggcctttaccaggcttctcgacccagtgggcatgaaaatcctggctctagtcctttggctaccccggtcccaggcgtagcttcctcagagtgtgttccctttggctggaggagaggcacctgccagcttcccactgtgctgtgtcctgctggtaggtcagctctgccttcctcccacccccatccctgctgacggtcagctggtgccactcaccagggccgggcacaaagcccataccaggtgccgaactaggcgcaaaggtaccaagcctcttccactctccctacctcgtgcctcagctcaacctggctggaactcctgcttaactgtaggagatgtggcctggggttcatcctctctgtatgcgcttccgcatttgtgggccaaacaggcagacatctgtgtttccctaaacccaagcttttggccagtgattgccttcctactaagggaaagggaagggaagggtaatcccggggcccagccagctaccctcttgatagagtggtctgcaaaacaagttttcagtggataatgagttaaatgtaaagaagatttaaaaattcaaatccttgaactatcaaaaagaagtttttactgcgtagaaccatacacttatcaaaagactgaaaacaaaattttaagtcaaactgaggaaaaaaaagtaatgctaaatatagcagagaaagaactaatattcttaaaatcaaagtctttcaaacaacaaagctcttaataggtgacaacaacaataacaaacatttatgtagtactatgtgccaggcgccattctgagtcttttgcatatactatacttactcatttaacccttgtaaacaactctaataaggtattactgtccccattgaacagatgagagaactgagatatagaaatgctaagtaacttgcttgaagcggcacaactagtaagtggcgaagctgggatttgaacccagttcatctggctcttgggcctgagttctaaactcttctgtactaaccaggaaaaagatataagcagatagtacacaaaggaggaaatataaatatctgataaacattgtaattatttttctgtttcaatggtagtccaaaaagtacatattaaaacaagagataccatttttgtcttcaaattaggaagatctttcaacattataatactattaaaaacttgcagtcctagagtaagacagagattctcacagattgctgaagttatatgcaagtagcctttctgaaaagtattctggcagtactcaaaacagtactcaggcatttcaaaaatgcctatactctttgaccaggaattcccattctaagaatctaatttgagaaaataattagagagacagacaaagactcatgcataaagatgttcatagcaatgctatataaaataatgacaaattggaaacaacctatggatctgataatagaatgcaggttaagtaaattgtttaatcttcataataggtaattaggcagccattataagtaaatgtgtataacaaaagacaccataaaccaagtgaagagacacaccacagacttctggaagaagatacttccaaatgcacataacaacaaagaatcatagaaacaaaatmatacacaaagaatacttgcaaatcaataaggaaaaggcaaacaaccaaagaacaaaacagagaatgtatatagacaattcacagaagaggcaacttaaacgggtaatcaacagaaagcgctactgctccatctcactagtagtcagggaaatgcaaactaattgaacgtactcatgagaatggcaagagtctaaaggtaagatctaaggaaacaaattcatatctattgttgatgagaatataaatgtctagtcattggagagatatttggccacacttactaaacataaacatgcttacatatacatgcatgactcatatactcccagggatcaccctgtacaaataccagtttgtacaaggagatatgttcaaagactttcattgcaatactgtctataatagcaaccatattagtattgttgttgcataatactatatattttccattgttatataataaaacagcaacaatgatattattaaataactagccatcagaagggacatgggtaagtgaaatatgatttatacataatgggatactatgcacagttaaaattaaaataactgaactagatctgtaactaccagctcagataaatttcgaaaacaatgatgagtgtaaagagcaacttgcagaaaaaaaaaaaaatatgtgaatgattctatttgtgtaagtctttaaaacaaactaaacagatcacaatatttaaggacacatctatgtagaaaaatatgaaaccatgcaaatgatgtgcaccaacttcaaatagtggttacttgtgggaaggagggttggatagagggacaagaatgggaggtggggcataaactgtatctttaagattttttttaagagaagggttgaagcaaatatggcaaaatgctagctaatgttcttaatctgggtggagatctgcgtctttctattaaattattttctgttctttaatgcatcttgagaagaaaattatttttaatttacttttttgtttgtttgtttttgagacaaagtctcgctctgtcacccggggtggagtgcaatggcacaatctcagctcactgcaacctctgcctcctaggttcaggtggttctcctgtctcagcctcctgagtagctgggattacaggcatgcaccaccatgtctggctaattttaatttactttttgaatactttacaatccatggagaaatatttgtgctacaatgttaaaaagcaggacaaacatatatacaaatatttataaatttcacaaattaaagggttgaaagagatatccaaaatattcctagtagtggcaagggcaagattctgcaagtttgcttttccttacacatccatattgtccattgtttcttttcttttcttttgtcatgaagatgtattatttttatgtccagaagattttttttaaacgaccacagaaaaacatgaatgagtttagacctaggacagtgtctaaaacctaggaagacgtgttatgatgggtggactgttggagttacctgggcatgaatgttggcttggccactttctggctgtatgaatttgttcatttttgtatctattcagtraacacctgttgagcaccaactgtgtaccaggcactgtcctagagatacagcagtgaagaaagtatacacgcttcttccctcaccacagagtgcagtctagtgaagaggggacagtaaacacatcaccacacaaatcatccctcactacagagtgccagatcctcatgagggaagaatacaagggcagtcatgagaatctgatttggattgggtggtcagggaccctggcctctgagcgacaactggaatggaaaacatgaagaggtctggaagcccagtaaactgagggctttgagagataggaaggccctactggacatacttaaggaacagaaaacaagccagggttctgcatgcaaagagggagggcaagagttgtgcagggtgaggacaccaagatagttaggagccagatcactcaggcctcacaggccaagggaaggcctccttaaggaccatggaaaggcactgaagggttttaagcagcagagtgacacgtgattagatttgcagttgtcgaagattgtcttgatgctctttgaagatcagggtggatggagtgagcagctgggttagttagttggctattggcatggcccaggtaagagaaatggtggcctggatgaggctggagctggctgaggagatggaaaaatatggggaaagatttgagatgtttttggaggcagagtcagtaggtctggtgatggattatatgtggtggtgacagtagggaagggccgaggaggaaagccacgcttggaacatgagcagtcatgagttttgtgggaatgggaagcatgcctcaggggcaggagggcagctgccctcaggggaagggaaggaagtagggatggggaggatgccgccatgtgtccttaagctttggcgtcttcctgagtgaactggggtttatgatgatacctgtaccctcagggtgaatgtttcagccctattatccaaaacctcttctacagcagtcttccctctccttcacaggtggagtgtgttactcttggggctggaatgagcatggcatgtgcggagatggcactgaagccaacgtctgggccccaaagccggtgcaggctctgctgtcatcgtcaggactccttgtgggctgtggggctggccactccttggccctctgccagctgccagctcaccctgcattggtccaggaccccaaggtcacctacctttccccagatgccatcgaggacactgaatctcagraagccatggacaaagagagaaactggaaggaaagacaatcagaaacttcaacccaaagccaatctgactggtccagaaatggggractgtgatagagaatctttaataaagtggcttttcccaccaaaagccttcccagagaattgttttgttgggctgtggggttggccgaagaagggctcaggaggcagtgatggttaggctgaccacaaaccagaatgatggcaggctgcttgcctagtgcctggggctcaaggagacagacatgctttctactcagcagaggagaatgaggggttaggtcttcactaaagatatggaaagctaacacaccagtaggaagtctccagcctgtcgctgcctggtggagatagaaaacccagttctaggtccttcattattttggcccagcagccttcaattcagcaaaacaaagggttcctgggccatgcctagagcagcccctcctggggttttatttttaaggcccagagcacatggttttctagttcaaggatatcgaggtaccctgatcagatgactggatacttaaacaggaaagagctcttatcttggtgactgcgggtgagggagaaggttctggagtaggggtggaggggaatagagaggcgtatgtggaggaagagtcaagacttccgggaagacccagtagaggaaaaccctaggacagcaagagaggctagaaccgacgaaactctcagatttttcttcatctgagtcagccaaggcgctggagcttgtttgtgtgactatacttgctaaaatatactgtttcagatgagggacaggccacagcatgtgaaggggagtctgtagggatagcaacgtcaaagactctgacccctgaccgtctgcccctcaagccttagcctgtacaggaagagggccctcgggtaagatggagaccaggccagatccccattccctgacttccctgtggctctgggggacataggacctttctctctgctgtgactcgcagcaagccttttgccggaggacctcagagaatggactttttctggagaaccatgtggcagtatcaccagctaggcagcccaggtctgtgacccatcccacgctgcctccttgtgactcagaatgagtctgtgagggctgggctgcagtggcttcaagttacaaaatcccaggataccaaagctagaggcccttgaaagaccatccagcctagtggccgtcacgctgcatcctttagagccctgggagtctcctgagaactcagtggccaccttgtgggtcaaggaggccaggtagatagaggtccaggttcccccgacccccgccccccaacacatcttattccaagcagctttagtttttctctatattgggcttcacataacatttcgtttgacaagaggtccttgagaaagtttaaaaaccactgattttattcaacattttcatttgttcatgtgggaaaatggaggccaaaaggggggaagggaccatctcaaggtcataaacctcactaccaggccagggtcctgattgggaagtgacccagctaagtccttgagtgagacaagggtttgatggagagtagccctgggaccaggagtgagttcagctcaggagaggaggatgaggacaatcttgagcttcccaggcctgaacatagagaccactgacagccacaggctgaccttgaacatcgtgcatggagtcctctcaatattgtaccctagaaacatggctgccctggccagcaaatcccttggttccccacctctcaggaccaatagaggccagtacagtctccaagaacttgaggaatgggaagaaggatatctccatgcactcggagcttgacttgccaaggtgaccaaacaaaccacagagatggagcagtcagatggcccagaggtgatccatatgggagcaagcccaaggacactggcccaccacccactgtcctaaaggcctgtatcagacacacaggccagaaagcaatcccacaccggatagcactcaggcccgtactgcctgaacagttactactcacaaagaaccaacgcactctctctcacaaggttccagttcagagctccctcctacctctttcagcacctgctggaagaaaccaaaatcccaaggcctctgctgctgagtcctaatgcctctcccatgacctccttgtgagcaccaaaaagaagtgtctcagagttccttcccagcctgaaacaggatcaggtggtgcattagcccgagccctttgatgcagaacctcagactctcagaactgagtcaaacccttcttagaagcagacaggtgcagataatccacatgtggaaggatgaatggctgttggcactagaagacatcatagaccatcccatcaccttgagttcctccatttttgcctttcccgacagcagtgttgggcagatgggcgctctccatgctccttcactggctgaatctgatgagtgtctgaaagcactcatcagataatgagtgaggaggtgttgacaatgtctcccagattttttttctgcaccctttgattgctattggttattctcagactttgtagatgtccaagcccctcattcctaatagcctgtgagctctttgagagcaagagaccaggtcttggtcaattttggaacccctttgccaaggaggggtcctggaatggaggaagtgcccaataaatgcccatgaattaattcatcagtacaccccacccaccgtaggggggaggttaaatgagtgggctctctgatcctctcgtcactattcatcctttacttttagcccttttacaaatatcataaccatttgacagtcaatttacgacaacatcattcacctggtaagctaatgtgctgtaagaactgtggctatttgagaaaatactcatttttaaaaactacttttcttcagtgaactaagtgaatcagtcttcatattcctcctgtgtgagaaggaagggaaagaggggagcaggccccattctgtgctccctggtcgttggcctggcccctggagtgatggttgaaggtcaagcacagaccagatgttggtgggacgtctccctccctaactaccatactcaccctcccctcctgaacacaagtaccccatcatcccttgacacccccaccacccttggccctggtgggttgtgagggccatgagatcagccttgggtgagattgtgcttaggaatggtgaatccaggcctagggctcaggcttaaagccttctcatcagccccaggcatccaccacttctgggtgaagtgacttcgtgatcaattgaaactgggagttagggagttagttaggggtgggggtgatagagggagggcgcgggtccgtgcaactgctacaagttcagaatttcagagtgactgcagtgcggagggaggagggaggagcggctggtgaggcagtgggctttgccagctagttgaaggagctgaaactccaatcttagggcaacgaggtgtttaagcaggagagtgaggttggccagctgtgtgtcggggaggcttggggcacgatcagaagtggctccctcctgtcacattcatggcacttcatgaagtagggcaggaggccaggtcctgaggtcctgggatttaggaccagccactctagtgttcctatcatttccacccctaatggccagcccctgaaggcctcaagtagcttgagacagttgtaacttgagctctggattccgaccacctgggttaaaaccctggctttgtcacacattggctctgtggctttgggccattattttacctctctgcaccttgtttcacctgtaaaatgggactgttaggtgattgtgagctgtcattagataacgtgtgtaagatgcccgcatgtagtagatactcagttcatgttaattccctttccccattagctgctgtgtccctggaaacccatattcctaacggctttttgctgagtcccactttgagtccaccagggcacttctttgcttgtggatccctaagtagagtggatattaccctccctgcagcagcggaggctacttggcttgtgcatcctgatgcttatgaatggtggtggcagccctggtaggggccccgggcagaggcctgacagtactcactactccacggaccccaaccccttgtttcctggactgcatggggcatcaggaagttgaggccaatgcttggagatgatgaaaaactgttagatgagaatttcatacacacttgaagcttcccacccacccatctgatcatggactcatgccatgctgggaggcatcaagggaaaaaaaatcaggggaagactgacacctacttgtctgtggccctgggcagatccctctcttctctgggcctcatttcctcatctggaaaatgctcatagattgactctcatgaccattatggacgctttccacctgaacattcctgaagtctctaatggatagaaaagaattggaaccccaaacctccactttgccaccaaaaccaagtgaacaacccaagacagtcacgatccctaggagagggctttacccctcccaagatgcctccaggccgagagaggggtatgtgatgagggcatccctcagacttgtcctggcaagggttctgctgggtagggcacccagatctgacagtcaaaccctacctctggcttcatcagagtcaagaatggccctagaagtgaggtgaccacggtctgcataaggggctgggagctctaacatggcccgattcaaggacccatcagtatggcatgattcatggagaagtttcctggtcaggtgaaccccctagaggaattgctggtcttaggtccttataagccctgtgcctttgaaagctgcctccctcccctgacccaacaggatctgcagcccaaggggccaccctgcccaaccaatctgcagaggacaactttttccttagggcctgactttcccccagcaagaggacaagcaccttaagggtggatccttgagaccagagcagccagggcccaggtttacccccagcccagccacaggggaccagaggcccagaccagaatcacgacactgcctgaaggcaataaaaacccaaattcatgcttcatctcaaaagtcagttttttattattgggggccagggcccagggaggggaggttgttgagctaaagcatcattgctctctttccaggaaatgttgtgagctgcagtgaaagcttgagatgttgcatttttttcaactcaagcatgtgtttttcaaaaatatcatccttcccccccaccccactaattttagaatcagaccaaagccaagctactgtcctctgtttctgttgggaaaatactatatttattcgagatgcagaagtgtgtctctgcaaacctccgactgcttcaggaaaacaaatctgctttagactatacagaaaccatgatacaaaatttatttcatgctagaatcgctttgcataacattgggcatgcaggtttttactctgaagtactaaattgcatacaatgccaggttgtgccttagtaaaggtggaggaggctgctcctcccgtggtcctgatcttttggtgctctacatcctggttttaatggaacacttggaaaatccatacggtggtgattatttactatgaacaatttgttatgaaagttggtcacactggatctacacaccgataagatgagagaatcaacctagactagctgctgtcaggggtcttggggagacatccgctgggtcacaagcatgccaaacggggaagaaggcagccgtgcgagtttccacaattctatttggagcaaagttctcagtttccacgtgagagatgaactatgaaggtgaggtcaatatgaccgatgactgaccgactgccctttttggaagctttcctcttgatcttgtgtacaaaaaggaagcaatccattccccatctctgtccctcctcccctcgcccctcacccccagaaatgtacaggtttctactgaacgccgttacagtttggctccaacaacgtgtgtgaaagtcaagagctttgaaagaaaatagagggctttgatgtttttcttttcattattgttgttcagggtaatcatacagtt

SEQ ID NO: 96195 - DNA, 13884 bp, Homo sapiens
ggtggagggttccgtgctgtgtgtctgctggttactgccggctgaggccaggacacccacacgtggctgcttcctccgagcaagtgcaccagagccgctagtgtccacatcaaggctgagaacacccaggaccgaaacaagccccggtccgcgcacgtcccctgggtctgcagtctgccttgtcctgagactttgtggccttggcccccagacctggggctccgttcccctttctgagtgcccttctgtgtccctgcctctcacccgctgtcccccaggctctcggtgcccgccggcttcctgctggccaccatccttgggaccgcctgcctggccattgcgagcggcatctacctactggtgagtggcgccctctgaggtcggccccggccacccccatccccagcccctgccctgacaccctcggacacgcatggcccttgaagccggctctgtaggctgagccaaggctgggagcaagtgtgagcctgggcgtgtgctcacagcacggcggggacgcagcggttgctgctgccatttttggcgtgtctagtgtgtcgggtcatttccttgcatttcctcattaacccgcaccacagccctgggaggggtactggggtccccactttacagacaaagatgcggaggctcagggaggtgctgtgactggcctggggtcacgcagccggccgaagaccgtgcctgcgcttgggtcccattatcaggcttttctcacctaaaccctattcgcgctgattcatgggcggtgccaggacgcagacattttcttaaactgccgacacctgcgtttggtttatgactgctgcaccctgttagaaggctgcccatcccatgggatacagtgatctctctgagaggccagggatgggtgggaggacagggcgcagcctggccaggccttgggtgaaatgccctctgcctgccctgggctccggaacagacggctgcaggccacctctcactgcgggggtctctgggtggacagagccctcagactttgcttatttaaatccttttgtccatagagccaagtccctcctgcccgcagaggcaactgccctccccttgctgtgcgtcttctagtgtgtgtgcgtgggaaaggtgcagcactttctgtgtacgccttccgcgtatggaagtggagttctgtttcaagcctcactgacctgccaccggcagaactctcctttagaaccccttcctgttgccaagtgctcatctgggctgttgctttgttttccgggggccacccgcatcccccccgtctccctgctgccacgcacagctagtggctcctggagacctcgggaggaattccttgtgctaaacccagagaggaattgctgggtcaggcatcagcctctgcaccgttcaccctgccgggctcagctgctccccagcagacaacccaccaccagccatgtggccccatctctcccaccatgcactaggctttctcccacgcttgccagtttcacagcacgagctggccgtgtggagcttggactcgcccttctctgactgtggatttgagctgttggagtttcttctcccttgagttgcctgttcaaatcctttgcccatttttctattgtggtttttgtatttttctttttcttcttttttttttgagatggagtctcgcgccatcgcccaggctggagtgcagtggcgtgatctcggctcactgcaaccttcgcctcctgggttcaagcaattctcctgcctcagcctcccgagtagctgggactacaggcacgtgccaccatgcctggctaatttttggtatttttagtagagacggggtttcaccgcgttagccaggatggtctggatctccttgaccttgtgatccgcccgcctcggcctcccaaagtgctgggattacaggcgtgagccaccgcgcccggcctgattgtctttttcttaagttgcaggaagtccacatatattttagctatttagcctttgtaacctttaaacactggggatgccttcatgctttctggtgagggtctgttaacttggcgcgtggagtccttcactgcacggaagagcagaggtttccctgttcacctgctctatggtctgtgctttgtgaaaacacctttccctggccctgggtcctgccttcacgttcctgccttttcttctatcagccttctagttttgcttttcagaatggaatgtttccgttttggagtcaggtaggatcacacatgtccagtttctctttctgttcatgacgtatatgatgtgacatatttttccaccagatattatgggatagaagatgaaaagcacacactcccaggtccacttgacctgttgcagtggaacctccgggcatgggcccaggagtctgtatttttagtaaaagccagtggaatcccgtggtcttcaagctctccccccaccacccccatgtgcagaaatgcctgggcacccttggggggctgccggccagcgtgggtgaatggcgcccaccagacggagcagggcctgctactctcctgggccacccctcctgctggacctcgggcctgcctccctgccttccctgcccttggcaccttgagaggagaatttgagtactagaatttgcatctgggagtgtccaccacgggatcttccagaagcccaggggttcgggccccactcctggcatgaagaaatagcttgggctggtgtcaggccgacccaggtcctggctgtgtggcctcgggcgcgtcacttaacctctctgagtggcagtcacaccatcctgcgtgggattcagacttgagcctgtcccagggcccctagcggggtgggcctccggggagggagggagggagggagggcgggcgctggggcgcggctcaacccttcagtgccccgcaggcggctgtgcgtggcgagcagtggacgcccatcgagcccaagccccgggagcggccgcagatcggaggcaccatcaagcagccgcccagcaaccccccgccgcggcccccggccgaggcccgcaagaagcccagcgaggaggaggctgcggcggcggcggggggacccccgggaggtccccaggtcaaccccatcccggtgaccgacgaggtcgtgtgacctcgccccggacctgccctcccgccaggtgcacccacctgcaataaatgcagcgaagccgggagcgcgtgagcctctgcctggggccggtgggcggggctggggtagcgatggttcccgaggcctgggcaggcaccccgtttcctgccagccgggccgcattccagtttcattaacatcagcatcgccttccttctcagcagcacacgaaatcccgggtaccgtatattccacgaaatatagtacctggattccaggtgtgtgcctccctagaaaggtcctcccgggcctggaggaggcagcagagtcctcccttgacagctcctgcaggccctgcaggccctccacacctaacgcctccctaaggggcttggattccagaggaggccgctggcgttaagtgaaaagggaacagggtcggagccacgtggtgagcctctaccctgcgcctcttttccgtagaagctggggtgaagctggtggcggatgtggccttgtttgcccccacactgatgctggggggccccccagctgcccaggacgctcaggccaagttgcaggggcttctggccaccccttcccctcacttgtgcggaggctgtggctggctgcacacacacctgcccacaggtcctcaccaccaccccagcccggtgcccccaaagctttgcccggcgtcagccacgtcccccacctttgggctctcgccaaggcacccactcccctgaggccggagaagcccttgcctgctgcttgtccacctgctctcccagcaactcacacttcagagccagggtcctctgttcctgggggccttcagaatccaccccccaccagccaacactcggcaccatacagacgtctcaatccagcctcatctcagccgtccccccaggtcaccaagcttcaggtcacccttgaaacccccacaccccacatccaatcctggcccaaatccagaccccagctacatgggccatccccacccaggccacctgccgcctcccgctctgccctcatcccctgaaaccatcctgatgctgccattgaaacccaaagcctcaccccagtgcctccggctcagaatccgcaggctcagaacccacaggctcagctacctccagtgacagccacaagcttctgatggccccagggcagacatgatctgcacccccagcgccctgccctgcccctgcggtccccctctcacctggcatcagccacgcaggccactctctgacccttggacacacgcagcatgtgtcttctcagggcctttgcatgggctcttcctgctgcctggagctgttccctgcatggctgcctggctccttcctcctccccttcaggtcttcgaggcctccctgaccctctgcttagaactgcagccccttggccgggcgcggtggctcacgcctgtaatcccagcactttgggaggccgaggcgggcagatcatgaggtcaggagatcgagaccatcctggctaacacggtgaaaccccgtctctactaaaaatacaaaaaattagccgggcgtggtggcgggcgcctgtagtcccagctactcaggaggctgaggcaggagaatggcgtgaacccgggaggcggagcttgcagtgagccgagatcgcaccattgcactccagcctgggccagagcgagactcctcaaaaaaaaaaaaaagaactgcagcccctcccccagagcctctgtcctggactcactcacagactacacaccacttgtttcattagtcaccgtggaggcaggaagggttttcaccattttgttctcggcctgttcccagtgccaggtgcttagtagaaactcatatggctgggtgcggtggctcacgcctgtaatcccagcactctgggaggccgaggtgggaggatcacttgagctcaggagttcgagaccaacctggccaacatggcgaaaccccgcctccactaaaaatacaaatatgagttgggtgtggtggtgcacgcctgtactgggaagctgagctgggaggatcgcttgaactcagaaggtgggggtggcagtgagctgaagtcataccacactgcactccagcctgggcaacagagcgagaccctttttcaagaaagaaaagaaactcaataaatgtgttgaatgaaaattccatctcctggacaagggccaccacctccaggaagtcttccctgaggcctcttgctttgggagtctgagtggagtccttgttcttctgtgcagcacccccacccccatctccaggcacctggacgcagtaggtgggtgagccagggggccaggcaggggaggggctaacaactgcccagcagccccatggcaatgtcagcccttggggccgggggcctagagactgagaccctgagactgtcacaggcctgggccccctttccacgactggggctgctccccccggggccccttaactaaaatctccaacagagcctgggtcccgaagcgtggctagttcaccatcagggagggcgcttggccttggatgttgatccgaaccacgaaggctgggggccctgccttgagccgacagccctgcagttcatcctcagagacttgccttgggggccgagagggtgcccctaggcgctcacatcattacaaagcatagggctcaaggcactgcttgaggaaggaggctggttcctgttcccaggggtgtcctcaggggagacactgtgtgggcagagcagggacacctgtgacccccccgtgctacagctcagtcccacctgcatgcactgctcgcggctgcgtagacctttctggaaggacaccccagaattgggtccatggctggcctggaccagggctgaacgggagaatgtcgcattgaatgttggcctctggggatgtgttcatcagtttaataatacacgtacacttaaataattgtttaagaaacaggggtacttccaaggaggttgggaagaggcagcctgcgggggcctgaggccagtgatagggtaagggaagccgggagcaggacagggagccaaggtacaggcagccgtgtgacaccttttctgcagctttaagggctggaagaggtgctgagctccttctacccccaactactgaggctggagatgaggagaacagtggggggctgtcctccagacacggggaatgcccagaccccaagggtagtgttgggggaggcatataaataacaataaatacacataaatagggggtgccctctggggagcacacgtgtccagtctaggggccccayggcctcggcggtcacacygaacggggcagcacgcaggtgcagccgacggggacgtggatgaactcggtgtggaaggcaaaggccccaggtgtggggagccccgagccgtcgcgggagcagggccggcggcgcagcaccagcaggctctggagcagccgcacrgagttgagcgcagctgtctcgcggcccgtccgtgcatcgatacagcctctgcacaggcactcggcgaaggccagcttctgtggatagcggtcctcatccgtgtccacactgcgggacggggtgcacagtgagtctctggccctaccctgtcctcctggaggcccctctcccctcagggcccctctccgtgtactcaggataggacctgaggcagcgagggctgagccacacgggcttggggtgcagtcgggctcacatgtggtggtaatccacgtctccccagggccctccaagagcacagagcagggtccggaggcctctaggagcctcccttccacttcatcacccagccccacttctgcaggagctcaggtgamgggcccagaatttccccaggggaccctggccacctaggacagtggsaggcagggcacggccagccgcaagcagcagctcagccgtccaggtcaggagggccggagggagggagctcaggtggccacgcccacttgacaggtgagaaccrccaaggcccagagagctctccgggcagtcagggccccgccaggggaggggcagccccacgccacagcggaatccccaggtcctcaccggtatctccagggtgagatggagcgctggtgggtgtctgcctccaacacctcctccggccgcagcaccgggcactgggtcgtagctgagggcctctcgtgcctccccctgtggcttgctgcctccaggctggacaccagggctacaggcaaagcctgcccccacttggcacctcgagccagcaggtgtgggggggcctggccgaggggcagttcctcagccgagtagcagtgtggggtaccgtgactgtgggggtgcccccygagggaggggtcatggtgggccaggcatgtgtgcagccaggtcagaaacaggaggccggggaggagctggtgaaacaggcaggtgggtggttaggaggtgcccagggcagggggcacctcacttccacctcagctttccttgttcccagcggaaagatggagtacagccctccctctatagatggggaaactgaagcccagagaggctagcccttcagcccaagacacccagcatgccagcgctccgaggatctgcagctgcctcccctacccccagactgaggggtttcccagaccccatcccaacaccctcctcccaggctcagagaaccccagcccttccatgccaggctgcacatccaagcagcatccatccgagcggcatgtggagaggctcaccgtcatggtggcggcagcggggcaggctgggcttggagcggcctgcacacctggcggcaatcccacaggtgcacctggccatgcacctggcagcagccgctcttatacctgaggccacacctgggggaaattccggcaccacttcctcctcgggaagtgcccagctggggcgcttcttccttctctggtccccgcagcccccgcctgctgtgcatcaggacacagacatgcaaggaggccccgggaggcgctgtcctgttacccccctcccccgagagagactccgcccaacctgagcacctacacagggtgctgccttgtctgacattctcaaactttttttttttttttgagacagggtcttgctgtcacccgagctggagggaaatggtgctgtcccagctcactgcaacctccacatcccaggttcaagcgattctcctgcctcaggcttccgagtagctgggattacaggcaccccccaccatgcctggctaatttttgtatttttagtacagacagggttttgccatatcggccaggctggtctgaggctcctgacctcaagtgatctgctcgccttggcctcccaaagtgctgggattacaggagtgagccactgcgcccagccttgaacctcctataagagggtttctgcttgcgtatccgtcagcaccttgctgattcaacttgtaggttttcatctggacctgatggtggcggggcgcttttgcaccctatacagttcttctccgtctgctgctggtgggtgccaagggtggttcagtgttttagctgagatggtcaagatcaggtgaggctcacgtgcccccttcacccaggtgggagaggtcccggagatgggggaggcaggcacgtcttcaggtctctgttgggtttctgtgttgtttttttttttgttgtttttttgaggcggagtctgactctgtcgcccaggcggggagtacagtggtgcgatctcggctcactacaagctcagcttcctgggttcacgccattctcctgcctcagcctgccgggtagctgggactacaggcgcccgccaccacacctggctaatttttttgtatttttagtagagacggggtttcaccatgttagccaggatggtctcgatctcctgacctcgtgatctgcccacctcggcctcgcaaagtgctgggatcacaggcatgagtcactgcacccggcctgggcttctgtggttttattgagaaaaaagttcaagctaaaaagtctgagttggaggtgtgaggagtgaggtgtgaggtgtgagtgaggcatgaggcgtgaggcgtgaggtgtgaggtgtgaccagcacacacaggaagctttatgtaagcggggccgggagctgcctttggcctccttgatcggtgaggctggctgggggtgggggcgctggaggtgcctttgtttccccggaaagggacagctgcagccagaacttgggaaggtttgaatgccgggggtttgacgtcatcctgaggagggttgtcctggagtccccagggcccctggccacatcagaggtgggggaatctgtccgccctggtcccctcagcttcggggtgagggcgggagggagggtgcttgtgtgcccccagcctttcctcccctgccgcggtgcagatgtgttccacggaggtgtcctctaagctgaaaacctcagtctctctgaacacaaaagctcccaagtcgggtggggctgaggcagcactgggacccctgggccctccagcacctcctcttggccgctgtgtggctctcagcttgtctgctgtgggcctctgggggtgaaggaggctgtgccccagggttaacagtctgggaggaatcaaagacagattgctggagtccccagggctgctcctcccgacagtgcccctgcccacccaccctctgcttgcatacctcctgtgacggggagctcactatccgtgctggtttcctagggctgtgctaaccatgcaacacaaactggggggtgtgaaatgggagaagtttattccacgaggccgtggagctgggcgtgttcagggctgggtcctcctggaggctcttccagccctcagtttcccgggctggcggctcctcccgtggcctctctgctgcacccgccttttcctcttctgtggtttataaggacactggttgttggatgtagggcccagtctaaaagataatccctccccccttctcaggacgtgggacctgccttaacccaggatgagccatctcaagatcctttccctaattacatcaaagcaaaagccccttttccaaatgagcgcgcgttcacaggttgggttagggtgtgggtagagccttttccaggacacagcagaacccactgcatccccagcaggacaggtgctcctgtgtgggttggccctgccttaggctgggctgatacaggcctctctgcacgggcgcttggctgtctcagaaaaattccagcccctcacggccctccccaaaaggcggcctgagcgccttgagggccacgtctgtggcagccccatctgtgtacccagggttgagagtagtgcagggcatacaggagggtgctctgtaaataacacagaatggaaaaaggagggaggagagcggctctccccatgggtacagtgggatgatagcagctccagtgccagggctgccctgaggcgcattagcatcacctgcctggctcaggtggtcgcaggccgcagcacctgccgccaggaggctgacaagcactcttactgttgggagacagggcggcggcagtggggcaggggtgtttgtcttttctccagagtccactcagccattcttctggggacaaaaactcaagaccccccgcaatctctgcatgccaagcacagcctgggggtagggggctgggcccctccctggctccggagtctctgggggcctcccctgggttgagacctacgaagcagccccggggtcccttctgccacagagaggggcccaggggagcctcattggaaacgtcccgaggggcctgcagctgggtgctcaagatgttttgtggaaaccctgacgagtcaccgggctcagcatggccgggcctggcctccccagtgctctgcccaacctgcccagctgcggcttggggctagggctgcaggccaggccgggtggggaatcttgaggaggggaggagggtgccttcgtgcagggttagggaacgcacagtgttgggagggaaagacaaattgatgtcagtcctcgtcctctgctgggagtccttgtgcagtgcacgacctgctcaaccatacccaagaaagagaggaagggggagggaataggagccagagggaatggaggaaaacgccaggaaaagacggggagagcgagaagccccccacctcggcctagtgccctcgtcccccatcccccggtggagccagtgaccctccctcctggcatggggaacaggtctgtccacacgtgggtcacacacgccgttccctcgggcaggacctggtcggcctgatgagggcagccagtgcctgaggaggtaaatggccgagtggaaaagttcggcaggagggagtgagcagaagaagccggagccctcgggcacaggagtgtcctccccggcctccctccctcggctgggcgcccccgcatcctgcgccccgcccaggggaggatggaagaaggcagccccaccgcggactccgctccgcccccgcctccttcctcctccgacccggggctgccttctccccagcggccgccgccccatctcccgctttgctctggttctgaggtgggacggccggactcccaggcacaggctgcaccgcgagaacggcgccagggacccggccagcgccgcgcgtctccccaccttccgcgtgttctcagcgctgtcccgggggtcgcagggccaggaagacacgcccggggggacctgcgggacctgcggactgggcggggcccggggtcctgtgggcgcagaggacgggaggacgaagggcggcctgcgctcctgcgggtggctgaggcaagcgcagaaataccgggttgggcaagactggaaaagcggcggcaggaaggctggagggcgacccggaggcggaggcccagacaggccgagcggctctcaaaccacaacccgggcccgcccccagcagaccacgcccccggaccctggtccggagatgcggaacgaggggcttcagacaaacgcagggccgggcgggtcagaggcagcgcgggggacgccccccagacgcagcgaaggacggacccacggtcaggagcccttcagcgccctgagcgggcctgcgggaagaggggtgaggcagggagggcactggacagggcggaaggaagcgctctctgcagggtctcccccctacatcaaggcgcaggtgcacagtgggtcacgcgctgccggctgcccacaacgcaggtgtgtccagccgagggcactgctggcgggggtgcaaaatcgtcatgggacgttggctgggacagcagagggcccctccctgcggcgcggccgcccccaccccctcatgggttttccccggcaggagtggtctcgtgtgtctcggccttttccccatctgtggatccctctagggccaccgcctccaagcagggtctacgtctgcctgcccacccaaagcccagccgaacgggtgggtggaagcgtggctgtgggggaggagctgcgggcagagggcagaggccctggggcaccccctgggaggggctggcgggcggatgccgttgccagaatcccacacaggctttctagtcactgcatggggagcgaggagaacgtgagtgccaaccacctggagcaggacgtccctggagggcgtggacgcccatcgatgcctgtcacacagcaaggccgtccttcccagctgcctgaccaaacatcctctccactagaccacatgggggcagtcaccctcctaggacaggcccctctgcaccagtgtccaagagccagagggatgggtagccacacctggggtccactgccacccggtgcgagttcaaacccagctccagactgaggtgcctagggctgtggccgggggctgagcagccgcagaggggacctcgcctggtcccagtccacaggtgagctgtggtgggttcacctgtctgctcctggccgttgagctgtggtgggctcacctgtccgctcctggccgtaaagagacagtcactgcagatgctagcttgaggtgccccacactgggggcacagagcgccatttcctggcctccagccctcatggtgcagctcacaaatgacaggctgcaggctggcacccagggtggcctggactccagctctgtggccttgaaggccacccttttcagagaatgggaattcccttgcacctggctttgacctgatggcaaatcggataagcctcaaaaaactgtggccggacgcggtggctcacgcctgtcatcccagcactttgagaggccgagacgggtggatcacgaggtcaggagatcgagaccatcctggctaacatggtgaaaccccgtctctactaaaaatacaaaaaattagctgggcgtagtggcggccgcctgtagtcccagctactcgggaggctgaggcaggagaatggtgtgaacccgggtggcggagcttgcagtgagccgagatcgtgccactgccctccagcctgggcgacagagtgagactcagtctcaggaaaaaaaaaaaaaaaaaaagaaaagaaaaaattgctgagacacatgatccaggccgctgggacacaagatgaactgcatggcctgcgctatcggagggaggtggacataaaatgggaaacagtcccctcaggagtgcacaggcggtccccctgtggtgctcgctcacgcccagctcctctgcctacactctaattgtcatttaatccaggggaagagtggcatggacgcaggtcatgctgggagcagaagcacgggatgctgcctccctggggctcagctcgcggccccgtgggagggagctctctcttggaggtctca

SEQ ID NO: 96196 - DNA, 166740 bp, Homo sapiens
  misc_feature (1)...(166740): n = A,T,C or G
aaaacaacacaagttcattgtctcagggtcccacagattggaagaccagtaggctaggctcccttcttcgttctgggtctcaccaggctgacatcaagatgtcacctgccctggctcttatctggaggctctaagtaagaatctgcttctaggcttattcaggttgttgaaagaattcagaattaagacgggggttgctattttcttgctggcttccagaggttgcctgtattccctggcctgtggcctcttccccttcaaaaccaggggcaaaaatcatgagggccaacatcctgcctaccacagtatacattcctagttattttgtttactatccatttccccatctagaatctatgtggacagggatttctgtttggtatcccaaaacctagaccactgcctggcacataggcatggaaagatgtgttgaatgaatgaatgaagactgggtaattagcctttctcttctttttaaaaagctgtcagtgactttcattttaacctgattttaccaccagtgtgcttttccctggctccacatgccactggttacggctttgctagttaaggggattactaacaggataatgtcatatttttatgttacctcctagtgacacagagacacatcctggacaggaggtacagagtggggtcacaaaatggactgaagctcagaggccagcacaggccagggagcctcatgcaccccagttaactaagtgtccaatcatttcttggaataaaactcttcagggatagtaaaactagtcatggaaatgtgttaagcattgttttgctcagaaaaaaaattgaagacttagtctgcacatgttaattactcaatgaaaatttcacaaacgatttaatcatctggatgtctcgaaatattctgttgcttaatattatgtagacagcctaaatcctagggtcatagagatctgagcttgtgtgaaaagcttgaaacacgtacaagtaacagatttgctatttgggttatggtgtggaaaaaaatctctggaaacagatttatgtattagtttttcactttgccaccagatgtccttcatgagtaggaaaatatgatgacttgaatgatattttgaagtgtgaatgcccagcatttttgagtagacagtgaaagcggagtgtgactgaatgtaaatgttaccacagacttttggatgagacaggtcttttgaaggctgtcttacaggtgtagctttcagaagcaatacttatttcacttgcaaattttcatttctcatactttacaaccatttatctattttcttttcactcaactctaaatcgatattttaaaaatttgatcgaattattatactttgaaattaacattaagaagtactcaggtccttatgctaatagtaaagataaaaagttggtctttggagtggaacgtctcaataattcaaggaggctagacctcagtcttttaaacatgacagctacacagtttacaagattttttttttttttttttgagacagggtcttgctgtcacccaggctggagtgcagtggtgtgatctggtgatctgggctcactgtaacctccacctccctggctcaagcgatcctcccacctcaacctcctgaggagctggaactacaggcgtgcaccaccacacccggctaatttttgtattttttttttttttttttttttgtagaaacaaggtcttactaggttgcccagcctgatctcgagctcctgggctcaagtgatctgcctgcctcagcctctcaaagtgttgctattacatacctggccaagatatttttattaagttaattctaaaagcagcaacttacatcttcaggaaatgcagttgaaagggaccaatgtaaaatttaatataaaatccaagactgaagttgcagtttattgctaataaggtaatatagaatatgtgtttaatatgtcaaattaataaacagcatgtttacaaaatagaagctatttggtcaagtgtgttataaatgtataacagaaaccctcagaatatataaggaacaaggacaactacaggtttaaaggatttgttgcgtgaattacatggtgccttaataaacacttggagacagaattcccgtcctattcccactatcactggaagtatgggatgaacctgtgctttctggtgagggctcctcatttcttcattaagtggggcagggagatgggacaggcaacgtattgccagaaaactgaaggccatctgcatgaaatgtcagccaagcaaccagatgtttgattggattggctcccacatccggcttcttgatcgaattcctcctctttccacccagatgttttagaaacacagagaacttcatgaagcttgttccgggcccgcagaggaaggggcggtaatattttggtgtcctgcagggggcgaagttacctctaattttatcaagtcggttcatacattccagcggacttcaaagcccagatctgctcctgtccctccaactccacccaccccatgcctcctcctcttgaatcacatgtggacgttgtctagctccctgtcctgaggcttccaggggagcactcgggctgtctaatggggaagggtcccagaagcagggagtagacaaggtgggggttaggggatttttatccacctagaggtccaactggcttggagaaagagtagtcccaatttcaaggttattaaaatcctagaactgtatctcttcctgtcccctttgtcccaatggatacaagggcttgcctgcatgtgtcccgcaaacatgatgtgcacatgttgggagccatagtggacagaagaggagcacatcctcagttggatgtcactgtccttatgatcattgtaatgtctcactgcacagtttttttaggagcttcttctggctcttaagggagatgtgcgttctcatgttcatcacctggaggtactctcgacacctcctcattctagccccattcgacagaaactgagaatccatcttggtggagtgaggagcctgcaacagacctgaatcagagttgctgctcagatgtttagttgatagtcactttagactcatgtcacatgaacccatctacttcttagtgtctaaggaaagggagagatggcgtgcgtgtgtgtgcatgtgtgtgtgtgtcttctgcactaggtccaccccatagatgcatacacaagttgagtatcccttatccaaagtgcttgggaccagaagtatttcaaatttcagatttttagattttggaatatttgcatatacataatgagataccttagggatgggatccaagtctaaacatgaaattcatttatgtttcgtatatatctcatatacatagtctgaaggtaatttaatacaatatttcaaatgattttgtggatgaaaattttgactgtgttttgaccatgtcccatcctatgaggtcaggtgtggaattttccatctgaggcatcatgtcagctctcagaaatctttagattttggagcattttggatgtcagatttttgggttagggatgctcaacctctacaataggtgggtcacccctcgattttgtgttttaaatgacatagccccaccaaggtgccctcatccatgcttgaaatgttgagtttcctgtgtcttccccactgccctcgtaggtagaaagtcttttactctgcctgcatctcaccagaagtcttatgaggaaggtgcaactaggtttaaaaaaggaggctcttggcaggaagcctaggtgtatttgctggaatttcagatcttctgagcagagctcttggctgctgtggggcactgcagtgaatttatgtccctaacatgttccctacagaaaaaagaagtgacagggctcttgaattctgagggtccgggcatcccagacaaagtatcgtattatcttttcggatggaagaaatccctgtagagatggttaaagactggcattcacataagttttgtgccctgaaattcatagctatcagatatttgtagaaataaagactcttctaaatgaccacttgtgtctgggccaaggcagaactagaaagaaggactcagtgggtagttggagtcagtggtggtctctatttacccatgagaaatagattcttggaaataggataggaatgcttataagatttggaccaacagaaagcctatgatctcataaattcatgaatcccacagtctataatctatttgacttcactctcaaatgcctaggaccatttggactaaggctggcaagtcagaaaattgcagtttttattttcaactccacacaattttcaccaagtaaaaaaccttcatgttttacgtgaatttgcttctacgatccatagatgactggatgttctcgggcggggtaaaggcaaatgaatttgtgtcctcattggcaaatggtgttggtggtggtgttatcttgtctaaaatccacaggaacctgtgtttcaggaccctgtctattgtcctgaccattcagaatgcatgccaagcccctgctcttcctggagttatctttatcacctctcctcaagttttatcttgcaccatataagtcacattgtatttcaatattaaaatgcaacattaatagataagctggagaatcaagacatttccaagaagacaggggacgccttttctaatatatcgtctgattacaccctctttcttttgggtgctagcttaagaagccaaaccaaagcacaaatgaacagagaagtcaacacatccgaccccaaaccctcaggacgctggcttgggttacatgtggccctctctgtggtcagtttgtgagtagcctccccggagggtgtgtcccaacttccagcagctgccgtggaaagccacgtgtccgctaaacgcctacattacatcaataagagaaactaaggaagggatggaaaagctatcatttttcttttcttcctcagttctggcagtatagtgatttaatcgctgttattatttttatttagttaaagcatcaacttaggccttttaaatgatggtaaaagagaaagcttcagatcggggtattggtcagatcattcttactagcgatgacctcttcgcctttggcacctcgcggctcttcgcatgcctccaagaattcccgggtcttgaaacctacgcgcggcggaggcgacgcctctcgggagagggagggtgaaagaaggggcggggctatttaaatagcccgcgagcttcgcgtccccattggctgccagcctgtcggttaccgcggggcggggagtcccggggctggagtgaggtacctgagccgggcgcgcagcagaaagcccacgttggccgctgcggggagcgcggcgtggagaggcgggagaccgaattccggcgccgccgccgcggccgctgctcggtgcactagcccccttccttcccatcctttctgcgagcgggtttgctgggcagccgggcgaccgccgaacggaaagcaagatcctcgccgcctccgcttgaggaggcgtgcggcgcgcggagattttgagtgggagcgacggtgcccgagagctcaggggcgcggagttcgtgagcgagaaggaagttaaacctcgcggaatagactggcatttcgggacgccttgtcgccgcagcctgggccctgcaacggggtaaacttcatggtggccctgcgatctggggaggggcgtgcgccacggtgatgccgggcatctcccgcagctcgtgagcggccccgctccccgctgccccgggtcccactcagtcgccagggagagcgcggggcagcgcacgtgtgcggccagcgaggcccagagtgaccgcgccgcgactcgcaggagccagggcgcaggctgcagtgcagcccggactcagacgcacctggcctggaccgcgcgcctctagagacctgcgcgaggctgtgaggctccccttcctcccctccaagcggttctcctggtgatcgccccttcgccacctctctagcctgggcaactgggggcgccccggacgaccatgagagataaggactgagggccaggaaggggaagcgagcccgccgagaggtggcggggactgctcacgccaagggccacagcggccgcgctccggcctcgctccgccgctccacgcctcgcgggatccgcgggggcagcccggccgggcggggatgccggggctggggcggagggcgcagtggctgtgctggtggtgggggctgctgtgcagctgctgcgggcccccgccgctgcggccgcccttgcccgctgccgcggccgccgccgccggggggcagctgctgggggacggcgggagccccggccgcacggagcagccgccgccgtcgccgcagtcctcctcgggcttcctgtaccggcggctcaagacgcaggagaagcgggagatgcagaaggagatcttgtcggtgctggggctcccgcaccggccccggcccctgcacggcctccaacagccgcagcccccggcgctccggcagcaggaggagcagcagcagcagcagcagctgcctcgcggagagccccctcccgggcgactgaagtccgcgcccctcttcatgctggatctgtacaacgccctgtccgccgacaacgacgaggacggggcgtcggagggggagaggcagcagtcctggccccacgaagcagccagctcgtcccagcgtcggcagccgcccccgggcgccgcgcacccgctcaaccgcaagagccttctggcccccggatctggcagcggcggcgcgtccccactgaccagcgcgcaggacagcgccttcctcaacgacgcggacatggtcatgagctttgtgaacctgggtaaggatttggggtaacgtaatgacgagaacatttcccccttttcagtgtcccgggcccaggggatggagtgagggggtggaggagctcccggcgcgcgggtcccgcctggtgcgccagagaacgcggggacaggcaggctgtgctcccgccacctgcgcggcggtgggcggcacatgcgctcccccgcgccgcgggcagggctgcgcgccgaggcccccagaggcggctggccggccgggccgcggggctccgggagcgctgtccccagcgggcgtgtatttgcggactccctgagcacgttccgcgctttttttcacttctgcccagctctggccaggttaactcaactgcagcagragagtccagcccgagtgtggccatcctgggaagagggctcttcagtacgattttcccctctaaactgccgccttttgccccctaacttggagtgcagttttcccaccgagacttttagggaatccgacagcggctgggaactttgaaaacttggcatgagtatgtttagaggtatccacggcactaggggaggttgcagagggaagtcccaaaagsaccgcggaaggcgctcggatcccggccgggcggggctcgcttctgtttggggcgggatgaaagctcaactggggtaatccatcctgtgccccggctcacatgcccttggccattgtccccaaaggctgaacctttgatcaatgcagcccaagctgcacgggcagagaaagggtgcggggtaggggccggggttgggcgctgagctcctctgaaccggttgccaggcaacagaatggaaattcacgggcggctaaatggagctccgccacaaatgttctgtggcaaacccggacccagtcacatcgccctttctcccccctcccaccccactgagttttctcatctgtaaatgagaagggtgcagagaagactcttttcttcggagtcagtgcctccggtttgcactgcttttcattcataagctgacttagtttagcgcagacataggatggagggacgcgctgtcagcggacagatcatgggtgcactggctacgcccgggatggttgcagctgcgcggcggggtggggcttcacgggcctccttcccatgtgagacggtggttgtgcccaggccctgaagtgggtgagcagacactcgccaaaggagcacacgggtctcccagccacgtcaaagacgctcatcttttaacggcattacttactggaatgattcccgcgtagactatctgggtgatttctttaccagcctatctatgattcccaactccactgagctttgagggagagaacatggggggtaagagccaagggagggtgtggaggcagggcgattggcatccaagtggtgcagaaatcctcctgggaaattcgtgaaacagaatctcacaggagtccaggctcagggcctgccaatctggctgcttgcactgcccggggttctgattggacaagaattttcacaatttattggaaccaaatccaaggttgagccacctccaggaagcattctaaggaaattctcatgccagtcaataaaatttgtagtgggtgggggccagggtggcagaggaccagcgctgttccttattctaacttttctgctscttctgacttagtaaattcctccccttgctctcttcctctcctctccttccaccctcaccccccgcccccaccccgcctccaggtttcctggcagctctggggaaatgttttattgcctnttgggggtagtcctaacctggacaaaggggaggaagactggcgctcctggctacttcacagagaatcgtgttacagtccctgggaaaacaattcctgggcttgaaccgaggttctcagcattagctgccctgtagtatcacccgggggacttagagttctagggttattagggccgcttcgtgggcccagatcagttaggtcagaatcttttgagggtggggcacaggcatcattttttttaagtaccttaggtttttctaatatgctaccgtggtcaggaaacactggcacaggagatcccaatgtctgaaggaaatggatacattgtcccagtaagagatgaagagcaaagctttcaaacattgctacacattagaatcacgtgggtgttacgtgggaggtaggggggaacgccttaaaaaaacccagatgcccaggtggcactccatatcaaatcagaatgtgtggaggtggaaaccaggtagcagtatttttttgttcaaaaataaagaggatctcccaacgttgcccaggctggactcaaaactcctggcctcaagcaatccccctgcctcagcctcctgagttgctgggaagatagaagtgtgccaccatgcccagcagtgtcattgttttgtcaagatctcaggtgatgtcagtgtttggaaaccactgccttagatggtatttgaaatttcaagagctgggcctaaggcgaatttgtaaagtatagtcatatttactgtatttagtgaccctccaaattccccttattccttgcttctctgacttttcgtgggctacagggacacactgcctctgagtcacactgcttaaagctggctgtcagctaatccttgctagggtgatggtttaacatagtatctccctagggatattgacatttttcgtaaaggattttgaaagatctaaaaaaatcmcctaaaaatttttaagagaactcacccagtagtgcaattccaggccccaagacaggctgacacagaactgaaagagaattctaggatgggaattctatcccaagcccctcatattcctatcactgggctccttgtacaagttatagctactgtaggtccacttctggactctatactgatagtgtgaagagaaaaccttttgcgggtaagtagaatccaagcagcaagccatgccacctgccaatgaagcaattctatttcatcttaatccatktagcartaggaaaggggtatttcatcatcagaggctagaatggggtaaaatctgattgccatgactctgaacataggaaggacagttcatttgaacaaagttattgcgtaccartgttggattctctatatagggatactagagaattacagatttcctaattgctgtcaatgccatgttaactgccacattacctgactcatctattaaagaatctacagaaagataaacatgacagcgctgcgttttaaagtacgcttatacctactaggttaagtaaattacacactggaagtacaagggaaagtattacatagttgtaaacatccgacttccctgggactgggggaataatttactcatgaaatacatttgaaacaccccgagccttgtaagccagccggactatcaggaagtgtgaatcaacaggataaatttctctctcatagcgcaagtgctggtcatccaaccagctcattgttgtttatgttgactgtttcaaactctttctgggtgaataggctgggatgtgtcaccttctaaatgctaaccgtctgctgcctgggctgctggtgtgcagagtgcctgggtgagcgagctcgtgaacttgcattcactcagggccacagatgccattttctatttgttttctaatgctaaaaatgtcttggcagcctagtcagcatccctgccaatttggtgaccttggagaggtatccttcaggtcttagcttaaaattcacctaagagagaccttctctgccactctatataaactggtcatgcctccatcccacccacttctgtaccatgacagcactctgcttatttccttccttgtacttatcacaagtttttcttttttcttgttaaatttgcttactcatttgtttgtctcccctgtaggatgtcagcctccaaaggcggaaaccacgctaacccaccacagtagcccaagtgcctaacataatgctgaccacatggaagatgctttgaaaaggctgaattagtgaacatatagacatagcccatgcttcaaattcatatttcactgatttggaagatttgattatttagaaagggtatacctgatttttattgagtaaaatgtttacagtgaagacatttaggacagggaggttcacagtatttgaggtaaatcatcgtgctttattaatacaccttttttattagtcacccatatgtatattaatttgtaatatgcattacatttgagagtagtaaaaacatttaattaaatatctgcatttcagatttcacttgtttatttgaattcacgaggtatttatctccaaatgctaggattaaatggcaatttaaaaaactcaaattgtgttcagaaaagggaatcagtatatattagtacaagcagcaagaaacttgtgctaaaaatactggcaattttctgaacaaaattactcttgggaaacataaataagaagaaaaatggaatactccctacttgtatttgtaactagatataatgcgctatctctttctcctaaacatagcatcagtagtactgtttttcatttaagctacctgtacttaagaagatttttgttagcagaaaataaatccatgcctgcaagctactcacagcaaaaacagtttggagaatttggttgcaagagtgtgattcaaagaagcagtagatgttcttctaaagagattacaaagagtaaatttgaaattcagtggcatttcaacaaaaaaaagttgtacaaagtgttcttaaactaagatcaaagggcaagcagatactattgttcagacctcagatggtgtttcctctgggtgtccttctaagaatgggtataaatcctttttaaatgtgctgaatcatggttagttcctctatttgagagcttacctctgatcagcttggaggagggcttccctgggataagaatctgtttaaatacaaaaacaatgctcagtgcttgctttagcatataatttgttgcctctctgtgtcttcagagagtaactactttatatgttggatttcaaattgatattttacttgactatgaatactggctaaatactggctatcaaatgtagtatatcaaacgtagtatatcaaacgtagcaaactaaaagatagcagctctgctgtctttgcctcactcctatttacgaaggtgagttagacaaggaaaatgaagagggtacaatgtcttgcatcatgaagcagctttctgtaactttttcacaaaccaatccttcactttctgcttcccatcttatatcaaaaatgaactattctagggaatgatttttttttttttttaagacagtatctttttctgtcacccaggctggagtgcagtggcgagatctcggctcactgcaacctctccgtctcctgggttcaatcaattctcctgtgtcagcctccagagtagctgggattacaggtctccgccaccacacctggctaatattttttttttgtatttttagtggagctggggtttcaccatgttggccaggctagtctcaaactcctgacatcaagtgatctgcctgccttggccacccaaagtgctgggattacaggctcacgccactgcgtccggccaggaatgactattgtttaacttagcacaacgtcgttacagttttaatttttctacttcgatctttattctatttttcttcctcttctgttcagaattttagtcattttgccatctttggtgcttccagtagtgggaagaaaagtagacaatattttaattagacaattttgtttttcactagttttcataaatatatgagtaaaaggagtagaaatcaccgcagaaactccctaagataggaatagacaatttaccaaggccccattcacgtaaacagctgttacacattaaccatcctgtccccccctccctaggccacagcataacccagccatgtgcccagcagctgggctgctccagccgcagggtgtcacctggggggcagatatagggcatagctggcatcttctcttgtgttccccgcaaggaaccagtgcattatgttgttcttatttccctgttttcatcacgacagcggagttaactttattcaaatacactttcttttctgatcatacccttaccttctcttcaacaccctcactcccatctctgatccagcttttacccactggaaacgtgtgagtcggaaaacggcactagtctctcctggaatatatgaaagtggtgatagttgtatgaaggggaaggaaagccatcaccacttcggtgaaaattagagttaactctaatttttcagtgccattaacctctgaagtttcgagagtaccagaaattctcagaacctgcattccccctgttcaccttttactacaagcattagaaatcagtaacacattgtgggtcactgaaatttatcagattttgtgttcagtcactagtgttttgaagattttgttgtctatactttttttccaatgtgaatatgtagtatttcagcaccctatgcataaagttaagggtctgaagccaggctgggaacacagctaccatccctaacatggtttttctggggacacgtatgccccagcaacagaaaacccatttggggtttattggttaaatgagtttgggataactggtgaatgtatgttcgccatagatcatagaatttagagcttgaaaagttctcgcatatcatctaatctgtttgttcgcagttaaatttgttagatgttttcaccaccattttctctttactgctgttacctcttaagattgagggacaatccatgaaaacacacagagatcctagtgcatcagagcaatagggctgttggccaggctggagtggataatgaaggagaaattacaaaagcaggcaagagcacaaccctggaagagccgaggaaacccaaatctggaattgttggggttttctcttagtggatagcatcttctccaagaactctacttttagaaaagaaaatgctatgtatatctataaatgtccaaaggactgttgactccaaagaattgttttctgctccgaaattgagttgaaaaccacgttgctctgagtggcattgttccactgatatccactgattctcttcctgcccttcccatctccattattaaggagattgggaccataatagagatgatatctaaattacatcagttaattccttgatgggtccccacggtctcgttatctcaagcacagtcccagatgactgggtcgaagaatctccttcaaacatttttgcaggatgaggttctggttccaagtgggagagccttcctgactttcagatttataggcatacgcccttgatgactgatcctcctgctggccaggtcaggattgtcctaggcctaaaatgtccttgccacacagtgccgattatatgttcagattgttttcatatcaccaaagagctcagctggccacggggggaagtggagtggagtggattcacagggcgcagaaaacagtgcccctcggaggcagagccccggagcccgctccaccctgacctccgatatccgccacgggccttattatcactctcctgccgcttgccctttcaccgtccagaacgtctgcgtttgttgattgttgttgctgtgtttacagtcctgttggtttcctgtacgtgaacatgggctggaaaaaaaattctgatttgtgtctcagcagagcatgagtgaaccatatcattggtaagagctgattaggccaggagatttcttataatattagccttgcttattctctgagaccagttattttccctccctccttttgaatctatgaattacatttaaatagtccaaagactgagttttgtaaactacaaaattaaggactaaaagtttttacttaattttgatttttattcagattttatttgtagactcccatatcggaataagttaacracggagaagctgtacattttttagaaagagagggtttttttttaagatcagtttgaggttcacagcaaaactgagcaaaattttgcagagatttcccaggtaccccctgccccacaggtgcacagactcctccattatcacccagcagaatttggtatctttgttgcaattgatgaacttatatggacacatcattgtcacctaaagtctgtagttacatcccggttcactcgtagtgttgcagattctgtggatttggacaaatgtgtaatgatgttatccaccgctatagtatcatgccgaggagttgtgaaactactctgccctacaaatcctctgtggagaagctgtacattaaacaaggaaaaacaagtcaatgaaagtataaaaattcaaaatacgcagagttcggggaaagaattataaaatacctcagttgaagaatattttgtttctggggttttactaaagtggtccctaaggaagtaattttgatagtctatgacaatgtgggatttattttatagtgcttctatgtgttgacaacaaatccatcagaaatctttcttttttctttctttgtttttaagtctaggagtttaaaaatcttttttcctccgcatagtttsactgaggtgtctgtcaccatagtacctagacaatccctcaggcagagatatgagtgattaaatttctccctggcttgtgccctgtttgatccatgctaggcaggatttgggggagtaaaataaagaagcctgaagaatgaacaagaattataggaattttgtgcttgtgaattattaaaatttgggggggttattaggggagaggttaaatatttttcctttctgaaaacttacattaaaacttaatgtgactttagaattgagaaactgacaaaatatcgtactggccctaagggcaggatcagaggactttaaaaggcttcctyaggagagactatttagatcagagtaaaactaaattaacagagactccatcaattcagaggtctttgtaagtgatatatcgaataggcttatttgcctttggactgttttctatgacaaagctacacaggttaatggtaaataaatatgagaatacaataatggagacagaaatgtggtaactgaagagcagttcgtttgagggatattaggggtttgtgtttattcctttacaaatattgtgcaggtgagacatttagtgaattctctccatctctcttcacgtcagttactcattgtagtggggtattactgaattccagctaatttgcccgcccgttatctcccaccctattctgctcccttacagaggaaacctcttaaaaatggggaagagggccgggcgcagtggctcacacctgtaatcccagcactttgggaggccsaggacggtggatcacttgaggtcaggagttcaagaccggcctggccaacatggcaaaaccctgtctctactaaaaatacaaaaaytagccaggcgtgggagcacacctgtaatcccagctacttgggaggctgaagcaggagaatcgcttgaacccgggaggcagagatttcagtgagccaggactgcaccactgcactccagccggagtgacaaagcgagactccatctcaaaaaaaaaaaagagcttggggccatggcactgtcactgggcttgagaaattcagccttgtctcataacatctgacttaggatgtcctgtggtttaatacttctctgtgggaggataggtgtttaatggagcaaaaagagaagtgatatccatgggcaggactaaggtgtatgaagggaagagtaagaaagccataggtgcctggagccaaagatatctggagagttgcctttccccccatggagaaaggccatgcatggagcaggcctttgcatttttatggggtctgtttagggcagagccttctaacaccaactcttgatttgttgagattgtttgaccctgttgttatgcatgcacatacctgtcatcgtaggatgatcccacgtrgctgcaggggtgaaggaggtatccagtggatgttagagtccctttctgtcttgctttccctttttttttttctcttcttttcctcccattaataaaattggcaactccattgcacttatttccactttcgtatgtgctcttacctatagttttggagcctttgctatggatctagcagagcagattatacacgtccatggagtctgggagttttctaccacagaaatgactcattttcacccactgcaatggttaagtagctggttttcttgacagtgctggaagatgcttatgatcggtttattatagaggaaagagaactggattaatatccaggaggcttgaatttgggctctagttcttagtattattcttttttgtaatattttcttcttttttttttcttcttttttgtaatatcttgttcaagccacttaaccaaatttctaggtctccttccttgtctggaaactgtattggctagatcagcatttttcaaaaagttactacttttccaaaatgttctgcaagaaaaggccgtagaagcactttctattctattcctctctttgaggtttacaaayctttctcctgttaatgccctgacaaggccagaagtaaagaagcctgctaacttggttcagcagagtttgaactgacttttactctctaaccccttttggctgaaacccccttgtgtcagacccaggcctctctgcccccacacccactcctgaaccttctcctgttgtcctcatagatcaggggagggacccyaggaggctgcgtttccagctgctctgctcttctgtggctccagctctctctggtccccatcttatgctagggaccccttggctctcctccctccttcataagagggaacgtggcttcctgcagttgccaatccatgggctgcctcaccacgacctgcttggccgtgtagccctcccgcttctgtgccaccagatccctgcattaaatcccctctgttgtaaactcttgcagaaggttctctgttccaggttggaccctcattgctaaaggctcttaattccctggaacacagttgagaaaccccaggctagataattcccaagacgattctttttaaattttttgktaatgcagcttaatttgacacattgacrtataaggaacagcttaaagtgtacagttcgataaacttagacataggtaggcatggctgcaaccatcatggcagggaagatggtgaacacattctgagctacactttaaagcatctcctgtgctagggaatgaaatcatcactcccaacacacaggaagtgctgtgcaaagtcccatctttcatcgacaccttggctcttcttgcttttctcttaygggctttgtacatccttaagaatggaatttgctgaagatcctcatggcttgttttcttggatcagagaaccatggggtcaaatcttcatagggtcaagcctgctcttggcaactgtgattgacctttaccctatgtctcactttccacattgattttgggaaataataataaaaataggcagacttcttttctaattttggaakcaagtgtctgggggtagttttgcgttgtggtgaccctgtcagcattttgtttctaaagactgwaatttagaagatttgatcctgccggaacacagcacaaagatgcttccctgtgtttctgttttaaatttgggcaatttgggtagggcacaaatccaagaactctaggaaagtagactccaatttacccctgacattttccctatgctcatccttctccaaatattctggaagcttaaatagaaactgcatttttttctgcacaaaaatacaagtactgtatttctttatggccttttgccttaaagaatggctgatgtcacttattatcctattatctcagcaaggcaaatacttacacttttacagctgcagatacataaaagttcttacttttacagtaagaactagtagatagtaagataggggagaatttggaggtttttggagaaaactaatatttagagcaatgttaactgaatgttccaaatagcacccagtcatgtaatagaacagttttgtgaaataacttaactgtcccctacctgcccaccatttggggaggttactctttccttcccactgtcttctctgcccttgtggtctgacttccatccccatccatctgctgaaagtgtttcgttgaaggcagctaatgactgtcctgagtcytcatcctcctttccaaaagccttgatcatgttgacgatgcttttttccctactgggctattttttagcgcttctaaaaaatcctctccttagtttctacaacactgcctgctcactcttggttcctttcctgtcttgaagactgctgctgtatttggggatattttctgaaatacaacaaaagattcagaagggttggcctgtggcatgagacctgcacactgggctgagacaggacacaggcagggagctgggcatagggaggaggtcacacccagttgcaggagtaaagagagaacatgtggccataggtcaggatgatgggcaggtaccaggctcccaggtgacctgccaccaaggctcggtggcctggtggtagctgttgggttcagaaagtcagatgcatctgcagagatgtcccccagctgtgagtgcctcctcacgtgtttgccttctctcttatgacccatctgttcagagcatgcsccaagtgtggtcccatcccagactcatgcagcacagcttttctcaaactttgtgcaacaaccacttgtttttcaaattttttagtttttgtggacccatacttttgggtccacgaaaattcattacaartgcattcgtagaaaaatgacatggaaaaaaacccaaaatatgttcaaaatcaagcctcaacttttaatcattagattccatttgtagaaagttgtcagtcagcttgctgttaaaccatctaaacactccatttctgtactctcattgcaagctggtaacaaagtttgtggatcagcacagatctattaacaagcagcttcttggaccccaccctgactcgggggatttgggtgtgggaatctgcacttcgacaagcggtgactgaggtttgggaaccacagtgctagttactcaggcttaacttcaatctttgccctctcgcccacatcaagtcagttgccaggcttagtgatcctgcttttgaaatctcttactcccatcttcccatcatcttttccatctatccctaagttccctgcagaaggtctttataatcgttggccttgacttttgcactggtctctctgctgtgaatccctccctgcatccctgacaggctggcttttctgtggtgcaggtgtgatctgttagtcctcctccatcaccttcattggctcctgtggccactagattaagctgatgtctctgaggtccaccctgtccatctcttctactcatctttccatatgctgttatccagccagcacactctgctctgtgattttgcctatttacctggtgaaactgcccactgccacattctcaattctgttttttaaaccccagttcaaatgccatctygttaagaaaggctttctgaaatttgcttacccatgtgccatggctctttagaagaacatttggggccaaatgacaggggacttgtcctatgcagagaggcatggagcagcattctttattatcwttattattattattatttttgtagagacagggcctctctgtcacccaggctggaatgcagtggtgcgattataggtcactgcaaccttgaactcctgggytcaagtgatcctcccacctcagcctcttgagtagctggactactaggcgtgtaccaccatgcctggctagttgttttaattttttgtagagatggggtctcattatrttgcccagactagtctcaaactcctgggctcaagygatcctcccacctcagcctcttgagtagctggactactaggcgtgtaccaccatgcctggctagttgttttaattttttgtagagatggggtctcattatgttgcccagactagtctcaaactcctgggctcaagcgatcctcctgctttggcctccaaaagtgytgggcttacaggcatgagccaccagacccagcctagagcagcattctaatttctgatgcctgtttgcagctgagctgcatgaggcttcaacgaaggagttggaggtctgaagttccagcgttggctctgctacccctcagctgtgggatttggtgaatcaccttcaacactgacttctctgattcctatcctattaaaatgttttattcatctttgacacatccctcctccccccaagtgcytagcatggtgcctttccttcatcgatacccaataagtgcacattgaataaatgtcagtttctcaaaaataaaactggtgtatgccgtctccttccattctctcattacaaataacatcaagcatttgaacgagagaattayaaactgtgaagcatgtgtgctattataagaaatgcttattaagttctgtatgtggcagtggttataaaaagggaaaagagaagttaccttcttgcagggtttatgttctgtgactttctaaatttttttaaaggctttgggaagaagaaatattattttccttctatctgatgtcattatgactttaataagtatgaatacaagtcagaaagacatgccgctgagtctcaatttaaatttcctggttgtgccaggcagaaagcttcgagctttcatgcatgcaaggaggcacgactcttcacgcaggtgccgttgcagaatacttatcttgtcagcttccacttcaggctggtaggcttggcatacattgtgaaggtgttagacattctgtttacataaggactgaggggtgacataatgtctattgaagcaaagtcacttagctccccgctaggcaacagggagcatttaaaaactgaaaactgatcaaagccatgggcaggattgagatacctttacccagggggcgggtggtctcttggttcgttgcccgaaacagatgtgcattattgcttcactgtatttccagaccattggtgaaatgaatcaggcagaattaaaccctgagtggccaatccggagagcctgcttaagtgggcacaagtgtgtccaaataggttggaaaaaatgtcaaatcagagtaggcgcatacaagatgtgatgtttctctttttatagactgctataaaagttgtttaaaattaaacaacccttcagtacttaaattatgtataatgagacaggtaggtcctggaacagagatctttcccccccttcttatcccacttaaattttgcactccctaccagagtatgtgagatataaacactttcatttccaggatatagtgtagtcttaggatggagcaaagggagagagagagatggcttgacatagaccacagaagtagcaaatatctttcacattttattccatgaacttcaaggatgtagccaagggaaaaatgaaaataatttcagatgcatctgtcctatcaagtggtaatcttctgtattttacacttccaaaatatatgtagatatagaggaaggtgtattctatagtgtatactccctctacccccctcccaaataagtagtttattgctgttttgctttttattttggggggctgtatttaggaacgaacaatagtatataatgttgcattattcagggttgacaaggttaatgtgtcttgacaatcgaaatatctgtgccctttttttccatttggccggcttctgttagaatcatttatcttgtgcctgtaggatgcaatctaactrgggcactgctattctcctctcagtgttggatgacatgagatgctcttttctgaagccaatggattgggcatctctgatttcttgttcacctagaggactttgttttcagggcaggataaatgcttgtttattctcatgcatgcatgctctccctccctctctcattgarcgtgatgttttcgtggccccttggtgcttgagacctggctcataggaagctgaactcagaatcaaaacttctcctgaggtgccacctagcatcactaaccccagagatgaccggggtagccctgttaacactacacaaataaaatatgtcaccagaacatttcactgagatgaggaatttatttccatgattctctaaggttcaactatagtacatgctgctttttcctactgggcagcaaacatgttttactaaactcttacctaagtgctttctgtttacaattccacaatgaattcctgtcttccttcatgttgatttctacaaatattgtgatttacttccacacctttttgaggaagcaaattccaagttgtgatgcatcttttaacttttatcagcattttattgtgaacaaaatttcaacatatggaaaaaggggaaggttttacagcaaatatctgtataccctccacttagattctatgattaacatttactgtatctgctttatcaggtatctattctgtttatccatccattttcccattcagctgtccatcttttttcttttttgatacatttcaaagtaaagttgcagacatcaccggacacggttgctcacgcttgtaatcccagcacttggggaggccgaggggggcggatcacctgaggtcaggactttggtctcaaacatgaagccttgtctctaccaaaaatacaaaaattagcctggtgtggtggcgggtgcctgtagtcccagctactcgggaggttgaggcaggagaatcacttgaacccaggaggccgaggttgcagtgagctgagatcgcaccactgcacttcactctgggcaacagagtgagactccatctcaaaacaaaaagttgcagacatcagtacactgctttctaaataattctgcttgcctgccattaaagttcaatgtttatagatttttgaggtaaaatttctatacaatgaaatgcacatttcttaagcataccatttgatgagttttggtgtgtgtatacaccactgtaacccaaacctctgtcaagatacagaacattactagaaagttccctcaggctgcttgttatctgccctgagcatgggtggtccaggagtcacccagaatttaggaccataactctcttcatctttcctttctgaggttcccttcctttctgggatgccccagatctgttctctgattctccgggcagaaagrctgttggtttcctgttggcattcctgctggccagcctggtgcagaccaggccctccctttaagccagaagtcatgaaattgggaaatacatacagtgctgtttcccgcctccagtatcagtgcccagaatgtgcctagttttggtcaatctccagtgccttcaggtagctgggtgttattttttaaaaatcatttttgccagagtttatgtttctaatctgtgggagggtcagtccaataggatcgtattggccattgccagaaatggaactctgttcattgttttaataattttctgtgtgtggaatgcccaaaagatctatttataaaaggatttcaaatagcctatgaaggaaaaagtgtataggtcctgttgctgcattgtgttatgttctgggagatgcagtgacagtgtgtctctaaaaaaatggcatctaaggactacttgacacaccctgaacaaagagtctcactctgtcacccaggctggagtgcagtggtgcaatcatggctcaaggcggcctcaaactcctgggctcaagcgatcctcccaccctagcctcctgagtagctggggctacaggcgtataccaccacactcagctatttctttttttgtagacatggggtctcactatgttgcccaggctggtgccttaattcctggcctcaagggatcctcctaccttgtctttccaaggcactgagattacaggcgtgagccaccatgctcagccttgaataaaaggtttttaaactcagggagtgtcttcagtgttagacatsacagagttaatttggttgtccagtgtttattggtccctttcaaggcactgtggtgagtactggctgcagtagggagggggcargatgaggatacaaatgacaggaagatgtggcagctggcttgagggaaggaggagatgcacagacagctggcccaaacagagcatgatggtatctatgatagaggtgaaaaaaaaaagaggccgggtgtggtggtgcctgcctgtaatcccagctattcgggaggctgagacaggagaatcacttgaacccaggaggcggaggttgcagtgggccgagattgcgtcactacattccagcctaggtggcaagagcaaaactgtctcaagaaaaaaagagagagagagaatattgagggagcaccaaggaaggtatggttaagttcagggtacatgacattcaggctgagcgtggaaagagaatttggatttcccttggtaggtatagaggcaaaggcattcccgccggaggaatgcrtcaggggcagtgttgattcgatggtgctgcgggagccctgagaggtccgaggtgcctgaatccgagcgtgagtggctactggtgctggcacagtactcggcaggggaagagattgcaaaggtaggctgacgccagatgctgagggataatgaagccagtctaaggagtttggactttattttgtaggcaatgaggaactatttacaactttttagtaagactgtggaatgactgatgtgtgctttgggagataytcctggctgcagtgtggaagaggcctgaaatgggagacgaactggggcatttttgcaattgtctaggtaacatcccccctcccgtttaatctgtatttacagcatttgagggtctttttgaaattttaaaatagtttacattttttctttcctgcaattaaatttagactgtttaaccaagaggggcaattaggtgacaaatttgtgaattgcacccaagagatgaaaacttgtggaaaaagtactaattccagtaactmaaatctgaaaggttacgatttaaatagacatttaaatagacttaacccgatcctcctggaactctttccctcattcctccttacaattaaaaacacacctttgtgagctggttgcttagaattaggagtgtcatctgccgtcacggtgcagacggtattcgcgtctttgaagctagttggcccacgggaaacttcatcagtgagctgggccttgttcacaggtgctcagccacctgaaatgaccagattgaaatccagcttcattttccacctggtttgtctccactctgttggccaactcacacctgttccaggtagcgtgagagagagctgtcatctcctgggggtggggattggtcagtgccagttcaaaccggtgacacactctcctcctttctaccttctgaacgaatcccataaggcctggctcttaagaaagttttatttaccgaggacaatccgcaaaacttcattacctcggttcacaaaaacaagggcagccctgcgtatgggagatgatttagagaagtttagatgttcgatgtcagtgtttgcggtaggcaggattccagccccgtgggcttcgcctcctggtgttacatctgtgaatatgccaccttatatggcaaaagggaattatggttgctgagcagctggccttaaaatagggagattatcctggattattaatcacataggcccttataaacacagaagaggaaggcagaagaatcagagggatttgatggaagaagaggcaagagggactcgaaacatgagcacctttgaagatggaggaaggggtccccaggccgaggaatgcagtggcctctggaagctgggaagggccctgagctgacagccagcaaagaaatggggagcccagctctgtacttgtgaggagctggattctgccaacaacctgaatgagcaaggaaacatatcctccctcttccctccagataggagcacagtcctgctgacacctggttttcagcacagggagacccctgttggacatttttttctttttcagacaaggtcttgctctgttgcccagactggagtgcagcggtacaataatggctcactgtagcctcaacatcccgggctcaagcgatcctctygcctcagcctccccagtagctgagagtacaggcatgcactaccttgactagctaatttttttttttttgtagagatggggtttctccatgttgcccaggctggtcatgaactcctggcctcaagcgatcctcctgcctcagcctcccaaagtgctgggattataggcgtgagccactgtgccaggctatggacttctaacctgcaggcctgtgagagaatacatttgtgttgttctgagctgctcagtttctgaaggcagcaataagaaatgaatacagtgttatttatacagggctttgttcccttggaaccttttaaattggagtgatctgggatgctggcatttgattggcaggtgctggagtcagactgtgtttgaatatgggccttaccccttagagagtgtttggttttcggtgagttttcctctctgtgctccagtttagcactgtgaaatggaaataataaatgcattgggttctcagggtggttgggaggattgagataatacatgtaaagagcctagcccagtggttggtacctcttaagtactcagtagttagaagcttttattagagttgtttgcaataaggggccattaaaaagatcttcctgttccatacctgtcatactatttcagacatcattctcttatgctaagagcaggaaaccatcaaaaagaaaactggaacagtttaggcagygcttactgggtttctgaggtctagaaagcacttatatatgatggaccctctggcacttgagcagctcatgcttatgagagaaacctacsaggctgaagcattatgtcaatgcaggggaaaatgaagtagaacccttgggggctatgccagtttggaggaccacaaataccccgtgaataagctcagttcctacagtcagcttctgactggggcggagaygtttcccattattargcttaccgaggtgaatgatcaagattcattgccagtgtccagataatcatcatgtcctgagaaatatttccaattccttagtcgtgcaatttcagaatgtcatgctcccataatttccatagtcctctaatgctcttgcatctcaccatacccccatctctaggattgtgaatttcctgctatgttatgatgatgtcctaatcctggaatcagtagaggatgaatctgtcaaagcaaaaaatcgagaaatcctgtattatttagcagcatcaggtgtcttggtaaaagaggaaagacctgtagtaccaccattttgatcttccacattgatgctactagtattctacccttcaggacaagagcttagcgctttcctgcagatttccattgtccacagtgtgtttcatctacaaaaggcaatcactgatgaacccttgtacctccaccggggaggggtggagatcaggattccacgtcaccaatatgatttgcagagtatgaagctgtgcttagctcggattgccagtatcaggaaaattcagtatttttctaaccaactgttgttytatcttatgaatattgagactcttataaatgaacatgtttctatattctttggtcacttcaaaagtcagatcaacctctctttatcatrtggtatttagtatcctatattaactgtatcttattttcttgccccattttcccttcaytcctatttccacatatgttcaatgtttattccataaaatggtatttctataagttgtctcagatctattttcagaacgaggcaggagcaaaacgaattactgctcaaaatcaataataaatggtcaaaggaactatagcctgttgtcatgggagccagtaggtcccacacctatctctatggtcatgcctttgggactctcctctgaggatgagcctacaccctgtattatgtcaccatatgtgtggggctggagtcttttgccaagtggttatgtgtcaggcacagccctgagtgcagacgggacaccgtgacattgcctggttgatkcattgtgaaggcatcactaccaggtttgacttgacatttaactttcttaaagtatggttcatggataatgagcatcagaatcaatggaggggcttactcccagagatttcaatttagtatgtctgatctgggaccaaggaatccgcattttaagaagcatcccagatggtttttaatcaagtggttcatgggccagattttgagaagtactgccttaaagggttggtaggatttaaagaggcagaggtgtgcacttcagagtatagaacgggtggaaacagaggcacagattctggcaatgggcacagtgggtgagacaggatgcttaagggtgggtgccatgaaccctgagggtgcttttactcactgtcaatgccatttgtagatctacatcaacattgaaacattcaacgtcaacatttgagcgtgctagctcaaacatttaacatgttgtgtgcccttgaacatctgcgtgcctactgtgtgctggctgatttgccaggtgccaaggatcctgaaatactaaggccacrttcgtctaagagcatgctgttccaaaggagaggctgacgtgtagatacatggaacttccgaactgcagaggtaccatgatagagatatgtttgggggagtatcaatgaggaaacgataagggcaggatgaggaagcagaggagatctgaaactgaaagccgagcagatatttttattctttggagtttctgaaattgtgcagtgcagtgttttagcttaacattctcacagygacttttgcaataacgataacttatttttattggatggtttgcttgtgtgttacctgtctttttgctgcttaattaaatgacctatataaatatagcagccatgactaggtgtatcttgagatttttccagctggttctggaacttgaaattttttttaaaaaagttaaaagtcctctttgactttttattccctagtcttaaaaacaaaatgacctttatttgaaagatttaaaatggcaagattttaaataacttggctattttttatttctttttaagtcaggtttccatggtcatcaaacactttatgactaaatataagataacttcctcactcttgtccacttctgccccattctgagatgtttgagctgtaattctgcccaccttgcttcttgtcctgaactgtattagcagtgatgttggatggatccatctcaggatacagcttaagtgactctaatttagagtgagagctaaaattctcaacctacttatccttggctacaacccaaagtttcaaatgttgttggattactctcttcccggccatattaagctcagtgcctttgatgtagcttcaaggcagacttgaccaagtggtattgcctcccgctgatatttaggtggaagccaacactataaaaatgaacgttttactaagagtactcgctctactacctgcaaacccagccagttgctctgccaaattggtcaaagaaagaactggcttgagaattgcaaagtgtgttcctctggcaaagaaatggagctcagatcaatctcatggggctccctaactaaaatgtagtagacatgtcaaacactttaattggaaacttcccaaaaatacccatcccaaatgcttagtttattataaaagcaattttgttaagaaatgaataacaaggatgaatctttgatatctttttaagccttactttattcttccactagcccatgcacctgaatttctaggatacaatacctaacagtgcagcagatatttcagagtatataattgggttgacacatatattttctgcctcggcattctctataaggttgcagaaagatctggcaatctggattacacagaaacatcattaaattatatttacaaatctctatggaacaaccgtagcatgttaagacctataatggccacagaattagacatggcttctgtccagtggagtcacttcattgggccaattacagatgaactggcaatcagaagatgcccagggatctccttagcctaattttcttagttagaatgtaagatgttttctttgttagtcaagtgagactgtttttcaagaagtctaatctggacctctgagtaattgatgacataaaatgatgcagaatctcagaagttatttaatggtgtacctttgaatggtgtatacatctccttcagcacaattctaagctggggtcctttaagagctgcttaaacgcttccagctacaggaaactcactacttcacaaacacacttcatttgaattttgtactgtgatagttgatagctttctactcagtggaataattttctacctccttaaaacttattggtccttggtcatccttctagagcaggagttggaacatttttcttaaagggcsaaatggtaaatattttcagctttgcaggtgtgatctttgtctcagctactcaactctgtcatggcagtgtggaagcaatacttcaacaaacagacatggctgtattccattgaaacgttatttataaaactaggtggctggctcatgagctgtagcttggtgactctcattttagacctgtgtaatctaggtcctgaaaatgaattactcaaactcttaattccaggtgggttccctgacatataaggggcacttgctctccctttgtataggcttgatgagtgaactaagaaagtctatctaatgccattcaactaatcttatcaaagtttttaaagtcctagtagaaatgcatttgtaactggaattatctgtggttctaaatacgtacctcatgttattatggagttcaacataggttttttttttttttttttgctttttagaaggaggtcattttaatgctatataatttgttgtgtgtgccagaaagccataacttcaggaaggtgcttttagtgttccatcattgagctttctgggatgggaggtggcaatctggaggtgagaaagatacaggtgaacaaaaatctttgccctaaaagtgtagactatttttatggttctgaatacagccctcctttcagatccgtggattataatttagatatcagcacagaatagctatctgaagcattgctcatgtgttttcccccttttctcttggctcttctgtagggctgtggtagtgccagcttattatctgctgggcataataaacacctacacctagcctccagggatcaagaaactgggtcagccaggagtcagcctatcatgctgcagaagctggtaatattaagcccagaaccagcctcattttaagattttacattatataatggtaagagcaatgctgatgttaaaaaaaaaatactggttggagtccaaagtaattttagacattaaagaaaggtttcagaacattttaagtaatgtttattaaagctagccctgacctcaatcaagcacctgctacttaattgatcaaatggtcactggtaagccctgtctcttctaaagtgacttcgccccaagtcatccactgacctttgctcagcactttctccagagacgagagagtgcacaagaggaaatgaaaaaacagatttggtgggaattgttgttcctggttgaaatgaaatgtatgtatccctgctacccaaatgtggtctgtggaccagcagcagctgccccactagggagcgtgtcagaaatgcagcatcccaggcacctttagattagaaacctgcatttacaagacccctaggtgattcataggcacagtaaggttcgagaagcactgatccaacccacagccctccttctgcacagcggtaacccagcagggccatctttgtttcagaagcacccatattacaaagagcttgagttattctggggaggtaaggtaaaggagagaagtcatacttcaatggcagtgagactttgcctagaaatctacaaaataacattactctgagtgctagaactgtaagtacttccatcactctgctatacagccttttctaaataagcattaaaggatataggttttcgtctaacatcaattttttttgatatgttgtgctttctatttgcattcagctcaaaatatttttaaaattcccctcgtgatttcttctttgacctgtggattatttagaagtatgctgtttaatttcgaaatatttggggatttactgatttctagtttaattccgttgtaatgagagaacactgtatgatatcaatcatttttaattttggtcttrttttagggccataatatggttgatcttggtggatgcttcctgtgcccttcaaaagaatatgtgttctgttgttattgggtagagtgttcaataaatggcggttaggtcaagttagttgatagtgttgttctttattgtctttttttctttctttctttttgaaacagagtcttcatgtgtcatccaggctgcagtgcagtggtgcaatcacagctcactgcagcctctccctcctgggctcaagcgatcctcccatctcagcctcccgagtagctgggactacaggcacgtgccaccatgcctaatttttgtgtctttggaaagatcaggtctctccatgttgcctaggtctcaaactcctgagctcaagcgatctgccctcctcggcttcccaaagcgctgggattagaggcatgagccaccacgcccagcccaaatctttactggctttctttgtacttgctctatcaattactggatgttgaaatctccaactataattaaggatttgtctacttcttttttcagttctgtcatttatttttccccttcctgtgttttgaagccctgttcctgggaaatccacatttaggactgttatgtctctggatgaacttgattattctctttgtccttrataatagtctttgttcagtagtcatctttgtctgaaattaatatgaccactctagctttcttttcatttgtgtgcacacggcataatgttctaaccttttttgttgttgttgtttgtttgtttgagacagagtctcgctctattgcccaggctggagtgcagtggtgcgatctcggctcactgcaagctccgccccccaggttcaagccattctcctacctcagccccctgagtagctgggattacaggcacttgccaccacgcccggctaatttttttgtatttttagtagagaccgggtttcaccgtgttctccaggatgatctccatctcatgacctcgtgatctgcctgcctyggcctcccaaagtgctgggattacaggcgtgagccaccgcgcccggactaattttctaacctttttaacttttaacttatctgtgtctttagtctttatatataaagtgggtttctcataaataacatagagttaggtcttgtttatttcttgaagcaacctaacaatttctgccttttaattggtgtgtttagaatatttacatttaatgtgattattgatgtgtctgggtgtaaatctaccatcttgctmtttgttttctatttgtcccatctgttctttgttcccttcccccctttttctgccttcttttggattgtgtattttttgtgattttattttatttccactactggtttagacctttatgttttatttatttttagtagttgctctaaggtttatagtatatgtgcttaacttaccacagtctgtttttaaatattttaccacttcacgtagaatgtaagaattttacaacagtatacttcaatttccttcttctgttctttgtactattgttttcatatattttatttctgtttatgttacaaagccyataataccctgttagtgtttgcatcaagcagtcaatcacgttttaaataaattaaaaatgagaaaaagtctcttacgtatacccacctatttaccatttctcacactctttattcctttttgtagatcaacatttttttttaatctagaatcatgttccttctgcttgaagaacttctgttaacttttcatgtaatacttgtctactggtgataaatcccctcagcttttatttatctgaaaaaattctctatctgtgttgtggaaagatattcactgggtctrtaatttgagattgacagtatttatttcccttgcagcactttatagacagtgttttactgacttctaccctggatggcctgatgacatcttggttcctttgtacataaattgtcttctgttatatggctgatttttaagattttctctttatcactggttttcagaaatggttttatcatgtgccttggtgttgttttatttaggtttcttctgcttgaggctctttgagtttctatctgtgagtttatagttttatttaaattcagaaaaatttggtcattacttcttcaagtcactttttggctttcctctttcgtcacctccttctgggtttcaaattacccataggctggacttctttatatctcacgcttcagtgttttgttttgttttgtttcctctctgtgttgtctcatttgggcaagtttctattgctaagacatcaagttcactaatattttctttttcagtatctaaactgctgttaataccatctaatgcatttttcatttgactaaaagtttcatttacttattttgtgtgtctttcatgtatttccttctcatgctcatgcttttctttgtattcttgagcatatatttatgatttataataccaattgtaaggtcctttccttagtcattctatcacctctgttatttctgagtctgtttttatggattgatttttcttttagttatgagttattttcctacatcttcaaatgctcactaatttttgagcatgcaaagatgctgtgtgctggattttgttatattcctttttaaaaagtgagcacgcaaagatgctgtgtgctggattttgttatattcctttttaaaaagttagattttattcttctgtgcaacgaagtaacttgcagatcaatttgatccttttgaactttgctttcaagctttgttatggtggattcagacaggcctttattttaggattaatttatcccctcctaagacacattcttttaagaactctacctaatactccatatattatgaggtgactacattctggttctccagcacgcaaactttccccagccttgtgtaaactggtaattttttttcctgctgctttcccatagttctttccttgccttggaggttttctttgtacacaagcagttcagaactcagccaaaggttagagaagacccctctgtagatctttggagcgctctctctatgtagcactctcttttccagtatttagccctgaaaatttagatgccttggccttcccaaactccaatctctgtcttctaaactcaatgagattgttggaccctatttggtagccctctccctrggctgccacgtaaacatataagtatccttccatttgtaaaatacatagcatagtgtgttagtttcctaaatccgccacaagtggatgactttaaacaacaaagtttattctctcatagttcaggaggctagaagtctgaaaccaaggtgtcagcaggcagtgctccccctgaagactctaggaaggattttgttcatgcctttctctgagcttctggtgttgctggcaatccttgtcttgtagaagcatcacttccatctctacctcggccatcataggacattctccctatgcctgcttatgtgtctctttttcttcccttatgaggacattagtcagattggattaagggcccaccctactccagtatgacctcatcttaattatatcaacaaggatgctatttccaaataatgtcacattctgaggttctgggaaggacgtgaattttggggggacactattcaacctagtacctatggcaactgtgagtcccaaagttgctttgatcccttgataaggaaattctttatgctgagataagactagtttcagatatgctgcctgcatcatttccagactgctctccctacgtctctgcaccctacctggtaatctgtgagtgttctttcrtaattatacaatgtatccacagcttcatcttcatagatcaggaatgcccatttccttgcaggttccctgtctattcctgaacttcagggcagtgagaaaattccatcttgtgtgccactgaatgcccttcgtagcttcagtcataactgttcatcatcactctctcaccctgctaaaatgcccactctgaaagtttgtctatttcagaatcttgcctctaattatcttcacaagtttcctttgtgatgcactgccctagaagtggctcattttccatatcaaagttctgcagatgagaaacagaattatagtagattactcttgctagtagagaagaatgcccctgcatggggaagatgccaatcaaacataacattttccgcaaacgttttgcatattgccttatgttatagtccagcttctttctggaaagatgacagtccatacgggccccagcatctttgtgaattcgtactgagaatgtgaattcgcagattgagtagccaccagacttagacaagtgatctcccagctatccaggcaaggagctggataaagagatgatgatggtcaccaaggtcagaaataactggcagaatcaggaatagattcagtgagttttggctcacaactcaccaccaggcattttttttcaagacaaagaaatccatctgggtttctgttgggtccttgcaggacctgactagatttgtgtttggaaaattgccataccaacaactacggtttgcaaccaagcctatttaaaacaagatcaacaaaacccctctcttccctacagtgccttgtggtatttgagtgttaattttgacttcttttgaatagctgtggtggcagtggctaaagggtgaagctttaagatgccttagaggatcagtcatagaaggcggcttgccaagcctgacaccgaagaaaaacgcagcccttgggtccggctgtgcctcgcaattctggcatccagtcttttctctgacccaaccacaaaccccttcaccctctctccacccccttccacatgctcacacgcacatgaggtgcagccactgtccccttctctgtgtgctcccttgtccacggatgcatttgtggttggaggggagtcggtgcagccatggtagaatagaggtcctcgtgtaagactaacatgagtggtctatttactcatctgtgctgcccactagaccaagagctcctaagagcagagactgtcttattcttgtttatatcttcaatgtccagcacagtgtctgctcaggacagccattgaattatctcctgaatggttagatggtataaggaaggcttcccttaaagartatcttgccgctgtcttgggatttgacattcaatgaatcaggagatgattcttgaagtttcatatccgttaagttcctcattaccatrtatgtatgtatgtatgcttgatactagtaatatcatcaatcttaccaggaacgtggtgtccccaggaaggtcatacattgccacagaatctggccaaatggttccttgagcagttccacgtggaggggacgtctgtgcacatgagtagataaaaaatgcaagcaatgttgttgaaagttagaactcagcttttttccccttgaggtcctcggccaccactcagctgctgaaatccagaacactttggttctagtcctggttctgacatgaatgccctggtgaccttcgattcacttaacctttccagaccctagttttgcctcatcagcaaaacacatgctctttaaggcccttataaccctaaactcttgccttgaacctgctttgagttttaagtaatgaacacatgagactaaacaaatcagattttaaaagcttgagtgaaataaaagaattwaaaaaaaagaagtgaattttaaagactaatttctttcttcttcttttttttttttttttttttttttggagactgaatctcactctgttgcccaggctggagtgcggtggcacaatctcaactcactgcggcctctgcctcccaggttcaagcagttctcctgccttagcctcccaagtagctgggattacaggtgccagccaccatgcctggctaatttttgtatttttagtagagatggggtttcaccacattggccaggctagtctcagaactcctgacctcaggtgatctgcctaccttggcctcccaaagtgctgggattacaggygtgagccactacacctggyctctttcttaattttatctaagaaagcagaatttcacatcttaatttttatttttcaacttttttttttttttttttttagatacaagatctcgctctgtcacccaggctggagtacagcgattatagcttactgcagcctygaactcctggcttcaagtaatcctcccaccccagtctcccaaattgctgggattataggaatgagccagtgtacctgaccttcaagtatattttttgaggtggtatgatagactagtgaaattraaacaggaactgtgaaattataatttatttgttccttttcctaaatacctttgtcagtctgcatgtgaattaaagtaattatttactttatatcagagtagagcaaggaacaccgtctttccaccttgactttgctgctctgggtgactttgggcaagtagtttagctctcttggaccatagttttacttatttatttatttatttgtttctttgagacagagtcttactctgtcacccaggctggagtgcagtggtgcagtctcagctctctgcaaccttcacctcccgggttccagcrattctccctgcctcagcctcccaagtagctgggattacagacgcctgccaccacacccagctaatttttgtatttttagtagagatggggtttcaccatgttagccaggctggtctcaaacttctgacctcaggtgatctgcctgccttagcctcccaaagtgcggggattacaggcgtgagccaccgtgcctggctggaccgtagtgttttaacatgtgaaagtagatgtctggtgaataaaagttaaagtaaagttttgaatgcatcaaaaacgtctctttgaaataagtgctgttatgcggagcctccaaaatgagttttcttcacctcgtgctgtaattagtgagtagaaagtctccagttaattttgtaaaatataagccattacggacattgttctttctccctggattaacaactccagcagatctgaatggcaatagcacatattagttgaacgagggtcagtttggcctttgccttatattcggcattatcgttacaatgcgatacaatatcctcttcaagattcaagctttcttctcttattttatgcttttctatgtcacatttctccaagactatctttggattacttatacacacagctgttttatgagactctgttggagcttatgagtcagattactgttaccaaaatgtttgtgaaatcacttcttaagtcatatatttgcatcatgtacaacctgtttgacaatcaaaacattatgcccttcagcacttggctggttatgatagtaagttttccagtagagtgttccagcagaatataattgggcagtagacagaaggagcacagtatattattttaacatagaattccaagtgcatttctcttcttgtaagattgagaaggacacataatattctgtaatagactcagggtgatcaattaatagcayagagaaattccagtgcagctggggcattaccaagtgcagccctggagccaacaggggtggatggaaggatggaatggccggaacacaagacgcagacatggccactgacacagcactgcctgtctgtgttggtcagtatctcaggcacctgctgacactggctgttctttacctgctcttggccaaccttcaaggcccatctcaaatggtggctccttcaaaaaggcttcattgatatcttcagagtagacttagagactccctttcctcaaagtctttacggcattttctttgtactttctgatcgctcagttgtcatttgtcatttgttattgtctcattgcccccacttgtccgtaacttccttgaggacaaggaatgtgtcttactccccttggatttcttttcttttctttttttgagacggagtctgactctgttgcccaggctggagtgtagtggtgtgatctcmgctcactgcagtggcgtgatctcagctcactgcaayctccactttctgagctcgagcaattctcctgcctcagcctcccgagtagctgggattacaggcgcccgccaccatgtctggctaatttttgtatttttagtagaaatggggtttcaccatggtggccaggctggtctcgaactcctgacctcaaatgatccacctacctcagcctcccaaagtgctrgcattacaggtctgagccactgcacctggccaaccttggatttcttaaaaggaaggggttgtatcttgattaaggtgtgagtggtcaaatgtcaatgcagtgttattatatgtcatttttcaaaggacacatccaaattcagccagtgacatcctgggttgacacttgaaggtctgctttaatgatcttgaaggtttgctttaatgatcttgaaggtttgctttaatagtctttcgcagtagtcctgggcactgacttttgctaaggcatgacgtgggggaattcaaacttytatgcagtcagccttgccctcttggagtttatgatattatcagggacaatatacaaatatataacatatatacatatgtcctaagtgctagctgagtaaaacggcacataaattctatagaaatataagcttcatccccagcttactaaataaatattctttctagctctgaacataattgcatctgtaacaatccttatattctgattaaataaaaagatgcaactcaatgtgcatgtctgagtgtgtgtccacgcattttaagtgtttttccagtgcccataatatgtcttatcaacataytgattttctgtccatattctcgcagttcttctccaggggataggagtatgttgctagaggggatcttaatagttggcttgatgtttaagccgccgkgcgacgcagatgtgcagccagctgaagtccgttttgcaatgacggtatcctgggagtctggaggagaaaccttttaacgactgtgagatgtagccacagcccataaaacrtggcygtgcggcaggcgcccagctctccacctgacctgtaaactcctatgcgcctttgcatccccacactctgctttgcagatactcttatgaattctgcaagtcttggtaaataggttagcttttagaaacctgtgttttaaagtacaaagcatgcatctcagatgcgagtttagaacttggagaaagttctcccgtgttttcagcctccactgtctgcagccaaccccaggggaggaatagtatggaagagaactcaaagaaatgaaagcacaacatayccctttactttgaaacaagaggcctgtaagtattcatgtaaaaagtcatggtaaaattctgtgttcttacagaatgatgatcctcttattttcaaagttgtggggaggcactcttatgggaataaaaagactccaaaaacaaaacaagaagaaaaagtatttttctacacagaaaaacttcaagaaaacatcccatcgccttttatgtcctaggcttttatccttattcttttaaaacacccattaaaaagaaagaggctggcgggtttcatgctaaaagctatttgctacaggggacaatttgccagatatgaaagtgtggtttgtgggtgttgacattcgggtttgtcctatcatggctgggcagaacctctgatggactccactggactatttactgggctgacccctctgagaagtggggacactgcccctccattttaaggaaatggcaggctcagatggtgaatgcaggtgcagtccttggccctgctaaaaggaaagaaaaaaaaatctatagaatgtggagcaaataatacaagtttgccctccatggtgaccttctctctgcccaccctcttggctcacatcaatggcaagttataattggactacaaggaccaatatattgtgtagtctagaggggaaaatgccaaaagaaaaactcygttggatcaagcgtatgtgtcctgcgttcatttctaggtctgtaaacaaacacagctgttgagtgaaggatccgtcttcagaaatggtgaaaaaacagccatgccctgccagtgagagcgcagcaggggagagttgttccagggcttgggaggagcaggcgaggcgcagcagggccgggaccatgtgtctcctccgtattccaggagaggccattctgtgttttcagctgaggctgttggagcatggagaatgatgagtgtgggaagattgggagggaagaggattctgaaatttcatctgctttcctcaaattaaacctttgtttaacatacaagaccttggctgcctttttctggaggtggtggaagggaacttgtatctttttctcgactaattttaaaataatctgcaacttggagcaaaagacattagaaactcacgggtccagcagcttgtatttatatcagttattgctaatttatatcaattactgctaagctgaagttttgggcctcactcctgtctcttttctctctctacagctaaaacttaggtaatatctatattgtgtagagaacgtgctactgcgatggacctgccatttgcacatcagatgttygttctgatggtgttatatggaggtcagatttctgcaccatgatggacctctggcttttggttgcctcccagtccccaattctttttattaaaaaaatttttttaggggcagggtctcgctatgttgcccatgccggattcaaactcttggactcaagacgtcctcccatctcagcctctggagtagctgggactacaggtatgcgcccccatgtccggctgcccttcacatttttattaccggaagtgcaggtccctcagcagtagctgatgcaggacgaggcccaagggagagtaggggagtgaggtcgaggagggatttactttatgcctggagatcttcttagcttggcagttgatggcttgaggcttcccttcatgccttcatttatataatagacattttcataatactctgtgcaggtaattcgttgacttcctggccaaattttttctcgatagtgggagactggtcgaaagtttgaactttggctttttgcagttgtattcctccctgctcccacttgcagtgtcgttttgagtgaatcactgcccaggcatggaccattcccgagacttgtaggcctcgagtttcccagtgattggttgatacttctgccttctgattggttgggtgagttggctggtgcagggatgctratgagcccaggattgtggatttattcccccaaaagtttaaattagtttcccagagagggggaaaccccagtttgaccacatttattattttatttgctgcctcaggattgtaggagggacaatgtaataatgtaataatctaataattggaccaactcagcagtacaggtaaagaacaaaagattcccctcaaaaacaaaacaatacaaagctaggtcaatccttgcttggtgcagttaggtaccttgccccgtgaccacacctgatwttaataagggatgcgtaagtgtatcaaaaacacacattaaccaaggtacatttctcgccatgtcagcagcatcatctcccagggggagggaccaccctgattcctgcttctctatcactmattggcttgacgctcttttagcacatgctrgtagacggcaagcatgtttcttgtggctgctgtcacaaattaccacaaacctagtggcttacaacaatccacggttattctctcacagctgtgtaaagcagaggtctggcatgagcctcactggattaagatcaaggtgccggcagggccgtgttccttctggaggctctaggggagaatccatttcctcgctgtttccagttcytagtaaccgcttgcattccttggcttgtgataccctccttcaagttcagatttctctccgttactcccacttccatcaccacatttccttctctgactctcctgcctcctgcattccctttgtgggcccagctgaataatccagatcctttctccatctcaaaaatcttaccttaagcattcctggaagatattcacagcttccagggatcaggatgaggacatctttttttgagcggcagggaaatggcctttctccatcggccacaataaacttaatgtcttcacaatgactcacagtttttaaaggggagattctttctgcatttagtgtgtgcttccagtttttttttgtttgttttttatttggcagatggaagaaagatcctatgaatgttgaggactgtatcttgtctgctgattttctgagtggctttgcaatctacctctaataatgagctaaataaagtggattataagaaatcactaggctgggtgtggtggcttacacctgtagtcccaacattttgggaggctgaagtggaaggattgcttgagaccaggagtttgaaaaccagcctgggcaacatagtgggaccctgtctctacaaaaatgtttttaaaaaattaaccagatgtggtggtgcacacctgtagtcctagctacttgggaggctgaggcaggagaatcacttgaacctggaagatcaaggctgcagtgagccaagatcgtgccactgcactccagcctgggcatcagagtgagatcttgtctcataaaaaataaaataaataaataaaaagaaaacactaattagaaggtatgtaattcatagacaatttccttgctcctaagtgtagacttgttttaaagaatagcctacatcattaaataaaatcagttatatattttgaaggcctatcttctatgtcttcatggtacatgtgaagacattttagctatcattcctatcctattggtgaatttattgctctatttcaaaaaagtcaaacaaaatcaaaaagaatcaaataccttcagacacttaggattggcccagtaaggtrtaaatcaaatggatatggaatmgtataatttttatttttattttttatttatttatttatttttttaaatgatagtttgtttgttttttttttgagacggagtctcgctctgtcacccaggctggggtgcagtggcgcgatctcggtgcactgcaagctccacctcccgggttcacgccattctcctgcctcagctctccgagtagctgggactacaggtgccggccaccacacccggctaattttttgtatttttaggagagacggggtttcaccgcggtctcgatctcctgacctcrtgatccacccgccttggcctcccaaagtgctgggattacaagcatgagtcacagcgcctggcggaatagtataatttttaaagatgttttatgcttattgtgctttttataaaagatagcaacaatcttccaatgaggtcattcatttctgttggtacagttagaatgtgtgtctctgggttggtctctttgagtttcttttggcatagagcagtattctcaccctgcatgatcatcagagcacctgagatgcttcgtaaagtgtaggtctgagccccaccacggagatttggatacagtaggttatgaggggggagcgtcgagcttctcaggaaacctagttctcagctgtttttctccagatacaaatctgtaactttttgtatttatcttagggtgaagctttcatactgtgagctcattcaagccagagataatttcttatccaggaaccagttggcaaatcttttgtacctgcagttagtcctacttattttaatttcctgatttgataattccaacagccctgctacgtctgagtctgcttttggtgcttgctgtgtctcttgtgttttttgctcttagtgtgccttgtaatttttgttgagagctggacatgatatcctaggtgaaaggaactgctgtagctaggcctttggtgaagtggaggtaaggtgttgtggaggggaagccctctgtggtctatgattaggtctgggtctctaatgagcctgtgccctggtctcagcttttttctttaatgaccctgtgccctgggctcagtgggtctcaggtttttttctccccgcttgggtgggacaggatggctggagataggtattttccttctcttcctggggaggcaagagcgggcaggaagtgcgcatgtcccttcctccaggtggttttggctctggtttattagtttttcctgagggcaggccttgttaagaagaacggagtgctctggtgtattgcaaaccattccctttcctctcccactgtgaagtatgaaaggatttttctcccacattcacttggaggacctggtccagctcctggaagtaaaacttgtgaaagcatgcccctcccatgactgggtcgccctggagtttttcactctcagtcttgtccacgctgagcctccagcaattcgccacttaggattcaaggtttctctggcgttggttcctttggaggtttctgctctggtaagtttgagtctttgttttgccctgggcagagtggggtcctctgggtgtttccaggccatgggttctggtctctttgcttctatgtcccaaggctgtcttctggtatttgccacctgcttctgagcatgggtctcaagcctcgaaatggcctcacctcagcgtcctcaacatatgtgttcaccattcttatttttsccccgttcttattgactgtagtggttcctctgaaaaaaagtcgctccacccagcctggcatctttttctcacttctgtccagtctgcacagggacgcaaggtgttcctctttatttcaacagctttctaagagtgccgatttaatcaatcctgcatcattactttgagcgggaaaggaacatttctccctctcttgaattcccctaacactttgtggctttcttgttgtactcatcacagcttgccatgatctgtcatatattatagttacgtgtgtccttttctaccactttatgaactataaaaccaggaggccagagactgaaccttaaccaattgctgttacttccagggccagaaatgatatattgcagtcaacttgcataacagctttactgactagatacaacagttcaaaaggagtatacgcttctccccaaaactaagcacattcactgagtatgtgacgtgttaatatgctactgcaggtaggaaaaacaaaacccaaagcaaaaaagttttgcaaatgtcccaggtaatttctaaatgagactggctaaaggtaggggaattgagctagctgttgggaaggacaaagtggaactacaccgatcagctcttcagagcccagacttaccaaaatgatgagcaacctgagaattgtttcagccagtgcctcccaaactttgttggaatcacctggagagctttgaaaagcccaagttacaccccatccaaatcaggatgcctgggggggtgggagtttggcatcagcatgtttaaaaagctccccaggtgattctagcatgcagcagagtttgctatcgcctggcttttgcatcagatgcattgagtaggggtcgagttctgcacaggtgtatttgaccttacgcccttgttaagacctctgcagtgtttttgtttttcagcattttctggcctttgaatttaaaacttgaaagacttaactggaaggatcacacgtaaatcaagcataggaaaacccttatgatagttgccttagggttttggaatttcagggggaagaaacaatttagaaaaacaattcttgttacaatgtgcaaattgtaatttcacaattatttttaaaagtcaaacgacaatctatgatgtaaagaggttgatcttgaatttttgagtcctaccgcatgtctgcaaatgcagatagtttttctttccaatattcctaacttgtcttttcattgtctagaaccttgtcaaatagatcataatgacaacaggcatccttgaaaacagtgacttgtgtaaacagattttctaatgttgagtcattcttgcatcaaaaacccttagtcatcatatataattattttagtagactactattttagcatctttggatgtagtcagatgaggttgcctatgtcccctcctccaacaccacccccctgcacctcccctcgccccctttttaaatgctgcttgtcaggttttgatatcacggttatataaccacttgtaaacttcaagaatgagcttggaaactgcctttttccttttttaaaaaaatgcagtggagcattttaaatgatacagtgtaagatttatttaaaatgggaaaataagccacatcctgtttttaagcggttgaacatactttcaagtgaattgatatctaaatgcttcttcagtgatgtgaatacagcttacatcattgttaaatactaggtcctggtggtttggttcaaataatagtgaaagaaaaatcccttaaggaatgactggaaccacatgtaacaattggttctgtctctgggccttgtgacctacccggtaaagattgcatagtctcgggactgggartttttttcacgatttgtcttcatctgagtcctggacataggttgggactggaacaaaacctcagttggagggattctggattaacagatgtaaatatgtgtacttggagtcattactgtcaatttgacatccctgttgattttatggtattacccacacccggccctaaaagcgctccttgttttctgaaccttttgattctgtacatcacctggggtgctcgtaaggattcctgagctcctttccagatttactaactcagaagttctaggaaagggggctgggaaatctgtgcagtcagcagttacaccaggtgatccctattatttgaagttcatcacagcagtgactcctaaccttgccttgcattacaatcacttggagtgttaagaatcttgatgcccaggcctcccttattgagtgaatccatctctgtaggtggggcctgggcatcaggattttgtaaacattctgccagcattgagagtcattgagtttcagcattcttaggaactgagtggtattatttgagataattgtcaattccttggctcgttggaaattcaagactgggtataactgagtagaatctgtgtttttgcttgtaacagaaatgagactgagatcctctttctgctctgatttttattttttacctcctcttctctcggatttaattctacttaaaatcatactggtcagttaagccgctgcagaataacagatatgtacctgacacgtagtaaatgtttgataaacgttaattactgttactggaatccagatgtcagctgggcttgtccagctccttaagctgactgcattgaatctccagtccatgtcctcagagcatctgctaatttgatgtttgtgggactctacyggcctctgccttggtgtctgctgctgtgcctagagttgttctgcactgagttgacccagatgtgaaatcacccctccttcacacaaaaccctcataataataccatgtgtatatagcacccacataaggtaattgctgtcattatccccactttgcagatgaggaaactgaggcagagaagttacataacgtttttcstagattatccagtaagtgcgtggtggagcggacattaagcccaggcatattgaccccacagcctgtgttgaggtttcatggtcgtatttgctggcctctcagcagcattctactgaagacttaggcagggcatggaggggtgttacacrgggtggtgcagggcaggctgtatagcagaaacccaaaactgcrcatcagccattcctttccttagaagtccttttaggtcggatgcggtggctcatgcctgtaatcccagcactttgggaggccgmggcgggtggatcacctgaggtcaggagtttgagaccagcctggctaacatggtgaaaccctgtctctactaaaaatacaaaaattagccaggcgtgatggtgggtgcctgtaatcccagctacttgggaggctgaggcagagagaattgcttgaacctgggaggtggaggttgcagtgagccgagattgtgcgattgcactccagcctgggcgacagagcaagcctgcctcaaaaaaaaaaaccaaaaaaacaaaaaaaaacaaacccaaaaaaacccttttagctktcatgcttcaacctcttagggtcatccttgggaaccccacactcccctccctctattttacagaccactctgctctcaatgtgcataaccaaactcattcaggtcctaagccaacagagtggcctccagttaacgagacaccctgtgtcttcttgtcattgttcacggaaaaggcatagtcctgttcgttacttttcttgctttctcacatacagaattatacctgttgggatcttttcgttggtgaattcagaacctgtcttaaaggcccacggcccaatctgtcagtaatgaatttatttatttatgatgaaattataaggactgagggggaccagaccactctagtcaaacagccrgaacactctctccctgtagatggggccaaagcaagccaaatcccaaactcaatgccagtttgttgatttacagtgagaatgacaactgccaatgggaccgagtaccatgcctttctgccattgcatcctctccctcagggccagtgctatgggggtaaaattataaccaagagctggttaggcaaaaccagaaccaggatgcaagaatcaatgagacttccaaaatttggatttcttctcagaatccatgaggctaagtctcctctccccctggacaccgcttggggagaacrtgtcctgtctttgtctctggacccttctatctaaggtcccatggctggcaggtgacagattcccctcccctagttggtgttcccattctcacatttcttctttagctattttactgaacatttgatctgattactttcatgcttgacaggactgggacccaatctatctccttgtggtgctttaatttgtcttaattgagttcattaggcgttgattttaaaatgcaattttctgagggcaattttctcttatttccagagtcttggaggggactcttccaaggccctccaagggccctatgtgccattaacagtcaggaaaatggcagaagaaaaatgcttagatgaacgtagcagatgctctgttacgaaattttgcccaactgatgcctgatgctgtttctgtagtgctgtttcttgtacctgctcccaaatggtgcacctaacaccccagtgtgaccctccctctgcccttcatctccatgtacacacatgtatacacagcccaggagaactagttctgtagattatgccgttttaggcaaagccagatgagttcccatattccaaaaggaattagggaagggccagaagagcagagaacacctgttgttaagtgttcattcgccccggtgcattttcctagtgaaggtggttaggcagggttctagggagagactggaaggcagaggtcactgtggagagtatcctatagacaagatcagaaataggggaagggataagccagtctctatgtcatgcataaacataggctcagaaaggatatgcaaatgactcatacaatagcagaatgtgcacagtagctctgtttccattcaacgtattttctttcagaaaaagcatccaaaagttttaaaaggaaagggataaagaaaaatgtgaacaatggttaaatttaagcacaggacttaaaaatttaaatattctaagggaagccttctagcttaattgaatcmtgtacatggggccttttcagaaacagctcactagattgcttgggatttccacgcgtttactacctgacttttggtcatcttgtttaggctagggttaatgggacaggttctcttcctcatttctccctcttctgagtgagcctattttcctaggctgtttggagtttttggataatggcattttatccacttggtcgttattccctgggaatgtatgaaagggccaggagccctgaacatctttgaccatcacctctgttatttccagagagacgtggtcattccagcctcacctgccggaggaggtatagtcctgggccaaggtgggagtggactgcagttagcagtggcacctggacttcacgraacgggtcttagaggctagaataaggtgtttttcgatgaagagagacacatggaactcaatccayggcagggtttgggtggctccctcagcctggtggcagagaaaattctcaggttgcttgctctcattcctgctttctgccttccacccaagaaagcatagcaggctggctgtggtggctcacgccggtaatcccaacactctgggaggctgaggagggtggattacttgaggtcaggagtttgagaccatcctgaccaacatgtcgaagccccgtctctactaaaactacaaaaactagctgggcatggtgctgggcacctgtaatcccagctactcagaaggctgaggcaggagaatcacttgaacccctgggaggcagaggttgcagtgagccaagatcgcgccactgcactccagcctgggcgacagagggagactctgtctcaaaacaaaacaaaaattagccaggtgtggtggcacattccttagtcctagctactcgagaggttgaagccccacttgaagccaagaggcggaggttgtagtgagcccagatcgtgccactgcactccagcctggatgacagagtgagactccgtcaaaaaaaagatcaacacaatacattttcctggaccctcagctttccttccttattgaaacaaacatggatattgccttagttcttttttggttgctataacaatgccacaggcttggcaattataaagaaaagaaaattgtttgacttacaattctggaggctgggatgttcaagagcatggcaccatcatctgtttggcatctgatgagggccttcttgttgtattatttcatggcagaaggtggaatggcaagagaacactcaaaggagaaacagagaggaagggggctgaacttactcttttatcaaaaacctactcctgagttcactgacctactcccacaataatggcattaatccattcatgaaggcagatccctygtgacctaatcacctcttaaaggtcccgcctctcaacagtgttgcgttggggattaagtctccaacacatgaactttgggggacaccttcaaaccatagcagctatattgaggaatacaatggaaattaagatgaatgtttgagataaggcacaaggtgttaacaaaattgtggacttttggctaagctggagatctctaggatatataaattctctctcctttgctccaaggatgatgaccttggtagtgaatgttgaaggtcacagagctgctgaagtggtcctgaatggctgtggagaccaagcttttattttggaaagatacagaacacccatggtgttcaccatgagcttgtgayttaaaaaagaatctcctgcatrctctcaaagcatcatgcagattttggtttttatccataatacatccctgtttattgtaatgtaagaataatgtttgtaattatctcctagtgattaaaataggaggaagatgtgctcattagtctgtgtgtccgcctgcctgttgtcaagtagtcaagggaccgggttcatgtccccagttgtagaatgtggtaaggtcagctctctgattctgttaccctatcccttgcttgcttcccaagtcaaaatttctttttcttccaggcgtctggggtcaggttagttcttcttgattgttggagataaatttgctratgttcttcatcaactccaatgacttagttcagtatttataatctattttctgtgattccaaaactaaacatttggggtagcaacgaatataccattctctaccttctaagaagaaattatgtttgttttcaaataactttacttcgcactcattctacttacattagaatgaaacagcacttcctctacgtccataccaccctgaatgcacttgatctcgttagaatgaaacagcacttcaagtacactttctgtgcttttctttaattaaaacaactaaaacactagatgatgtttgttttataagcaagagagagagtagaaggtaaattttgcagcacttggaaattgtttgacttcttaggggcagttacctaagttgaagcagaatttagagctgagttaaagaatttagtcactgagatagttgcccaagttatacatgcagacgttgagctcagaacttccatcactgcctcccttccctcagttttctcactttggcccaagggctttatctagttgatcctggactggaacatttaaaggagattttatagagactttgatttaataaaagatgaatcaacagtaacatgaagcaaagttgtctggcttagatgtatagcttctttcatgggtctccaataaaaaggttggttcccaacaaatcttttatttagttggcaagtcatgtgcccatttccagtcttctaggaggaagaacctcatggtgtcagtcaaccatctagtcattagggtggcttcctcagagtcactggttctctaaaacttgttcctatgtgtgtcattccccaactttactattggtagttgtcaaattaagagagtattaggtacgaatacttgtgtttgtgtgtaagagacagggtcttgctctatcacctaggcttgagtgcagtggtgcaatcatgattcactgcaaccttgaactcctggcctcaaacaattttcccacgtcagtgccccaaccagctgggatcacaggcagatagtattttaacatttttattgatatgggaagctgcttagctctgtaccccagtttaccttacaataatagcaatgaagaaaaggtgagaagatataaaagaagacatatagtagggtgagaattggattcttaaaaatactgctcagtctggctacaactcaactatctacgcccaaatgttttctttgaagatcaagcacctacattactacaatatggggaggacataatgagaaactttgtggtatagagctgagaatggctcctaagccttctaaatcacagcccttagggctcccatggggaagtggagttcatatgccatgatctagcaaggatatcttccacctgagaaggtcatccttggaactggcaggtgccttctggatctgtgcatgtggtgaggggaaggaggtcagaggtgctggctgagtcattcggattagccctagtggtggcaggtggccttcatgtgtgtttcagctgccagaccttaacagacgtgcacattcaggcacatacttcaaacgggcagccttcaaggcaagggagaggggcgtggatacacttttatgcactgtggttttcaaaatgttacaagtaatacatgaatactttcttccaagtattctaaagctccctcagagtacctctgtgtcagtggaatgcccccctctggctccagtatggggactggagaatcgaagatacagaggaaattgaactcccttgaggccagttgggtaagaaggaagtgccatgtttcttagaagacttctggtgtttgtagatttgagaagggaggtgggagaggacttaggtgaatattaaaacaaacacataaaccaaatgaagacctctatctttccggcatcactaataaaaaaaaaaaagggagaaaaagctgaaagtaaagcataaaaccccagtaaacacatcagaactaccaaattagtcctctgcacaaacacacctttatatttagagctggaaccactttgggagtgacctttctcggaggttgctggcttgggcggcagtgggactctcccaagcgacaaacactctttagagcccccgtccgggacaccactgtatacattagttcatgttttctttggcttaaggaatagtgatggcattgcccttctgtttttccccctttcccaaaatgagtgctaataacttttatataaggaacattacctgttcgttcagaagtctggttacatactcccaggcagaagtgcatctccctggagagggagactgtgccatttggaaattattttaaattactgtttactgactgtcggcgaccatcagagcacagtaggaaactttgtagggagaggtgtgtcataaaaggcgtgacgtatcttttacaccctcctctcaaagcagtgggtgtacacaggataaatgcacgttgtagaaaaagaagtgtgtatgggtgcagaactttaaaacaaatattactaacagctcacatgtattgagggtacttgttccaaacatcgtactctgttctttaaaagtgctctctcatcgaatttcctcaatccttgaggtagttgctgttattcctattttagagataaggagactgaggttttaaagaagttcagtgccttgcccgaagtcacacagccagcaatggcagagtccacatgtgttgtgtctgactccaaatcccgtctcttggccacaagaggattctgcctctttctaactgagcacatatggggagctgcttcctagacattgtttctgtggtggtaaactttggagtttcaaaaaccgaggcacagggtagacttgaaggagaaactggaactgtgtcataattttagggtttcagacctagaaaagagtttgggattatctggtcttcaccttcactgtttttgctggagtctgtatgaagtgacttctgaaagtcactaaatgagtcagtggcggaactggaatcgagtctggacaccagacaccacctttctgccatttggccttcatccttcccattcccggagggcactgtctatcatttctgttacctctattcatcatttgatgtttactcatctggcctcactgattattttctccagtattcgtatcctatttctccaacaagattatacactgaggacaggtgctgtgcaacttctttttcaccaagctcacagtccactgcctcaaacaggtaggcattcaaatcctgtgattttagtgttgcattaggtgtgccatacaactgtgcctttcgggaagcagtgtttctagacttggctctggatcctgagggtctccccaaggagccgagtaggaggacccattcttgccctgtggcccaggctatagcccagcaaatatttgtggtgggtgcccaagaaatccagtacgttattgaagtgtccccagtgccaggcaaccatggtgccctctgggggatgctcaagttatcagctccactctacacctgggtggatttaagctctagtaagattttaatttgtaaacttatttatttttttttttaaatttcttgagatggagtctcgctctgtttgcacatcccaggctggagtgcagtggtgtgatcttggctcacttcaacctccacctcccaggttcaagtgattctcctacctcagcctcccgagtagctgggattacaggcgcccaccaccactcccaggctaatttttatatatttggtagagacggggtttcaccatgttggccaggctggtcttgaactcctggcctcaagtgatctgcctgcctcggcctcccaaagtgctgggattacaggcgtgagccactgagcccagccaatagtgcacttattaagaatgataataaaaatgccattactcttacatagaacattctcttggcccaagtgttctcaggtgcactatttcatttcatctgtactgagctctcatgaggccattattcttattttagagacaagaaaaccaaagtgaagggggagaggggtactcaaatagcaaagagatgccatctgaggtcaggaagggattgatgagaaacagccttttcctggtacctccttggggcttgctgtgtctttttgtggtgtctggtgagtgtgtttgggtgtgtatgggctttcttccctgaaaccacaggccacctttgggaaaccaatttacagctccggttcacctcactgtaccttactccatgggctgtgtggttgaggatgtgtttgagttaagtaggctctagatagcacacacactcatttatttccgtgcttccctcacttcactgtagtgctcatttgtccaggcttattctagggaagcaggaataaatgttctcgcacttgtgttgtgtttctgtgatcagtttaattctgcatctcctagtgggtgttagactgttcacccaccacagtggcacctctaattctttttaaaaagcaagggaggctgggcacggtggctcatgcatgtaatcccagaactttggaaggccgaggcgggtggatcacctgaggtcaggagcccaagaccagcctggccaacatggtgaaaccccatctctactgaaaatacaaaaaattagccggatgtggtggctggcccctgtaatcccagctgctcgggaggctgaggcagaagaattgcttgaacccgggaggcggaggttgtagtgagccgagatcgcgccattgcactccagcctggacaacaagagtgaaattccatcgcaaaaaaaaaaagcaagggagactcttcaaacttaaatttcttttaatccttgacttaatatacattttttttatatgtcccccagacagcttctaacttagtaagggatcaatatatatttgttaaatgtgacacagacaattctatttttattttattgttattattatcattattattttgagacagtctcactctgttgcccagactggagtgcagtggtgcagtctcagctcactgcagtgttgatctcggggctcaagccatcctccccgttcagcctcccaagtagctgggactacaggcaccccctaccacacctggctaatttttgtattttttgtagagatggagtttcaacatgttgcccaggctggtctcaaactcctgagctcaagcaatcctcctgccttggcctcccaaagtgctgggattacaggcatgagccactgcgcccagctaacaactcttttttcaatctgtacctcttaacgacttcctagtccacacagtacagtgcatcgtgttgctgtcctttatttgccctaacactatcattaaagctatgtccatggttacttcttgttccctcttattgaatatttagtattcagtagccaagagactgtttatattctgcttaatcctcaccaaatttctgcaaaataagtagtatcgttacttttattaccactttacagataaggaagccraggcacagaaagattgagtgatgtgctaaagttcacatggccagtaaatgacaaaacccatgctcgttcatacgtaccatgccactgtctctgtcagcttcaaggtgtgcttcttggggatgtgggctgaggcttagtgagctcgtctatttttgctgtgtttgtacagattcagcctcagcaagcacacagcaggcctggctgtgggaggcagtgtggtttasagcaaagagtatgatggcctttagcatttgttagtctggctttggcttgtactctgtcactcaccgcctcaccacattatttaattgagtctctctccattcattcattgtttcatccccgtgttcactgagtgcctattgagtgtccggaactatgcccagtgatacacttaaataaaaaacagacatggttatcaatcaagtgatcatagttctgagtataatgacaaactgagtgaagttccctgaacgagcaaaagccagtaaggaagactgggaggtctgggaaggtttcctggaacaaatggcgcttggtcagaggccccatgtcagtgggggaatatgaaactcttggagaactgaaaagataggtgagaagtgcgaggtctttcaggccatattcagggtctccaccttctttccaagagctgtgagtagtcatgaaacggttttaagcaactgtggtgaggatggtaggggctgccttgatcacacttggaagggatggagtggacacaggggccccatttaggaagtttttagtagctgggttgagaaatggtggtggcttgaatggcagaggaggtggagagaagcaaatgaacttgagagagattcagggggcaaactgccaacaagacatggcgatggataagatgtgaaggagtgccagagggggaggcaagatgcacaggcttccagcttgccaacctggaagggagggtaccttcttcattgagatagggaactctaggaagccccccacaccagattggtggagggagattgtaactggggcatgctcgtgttgagtttgaggtgtttttgagacatcagagggggattgttgaataggctttggttgacagagttctggaggctgaaagagaggtggggtagggataggacttggtgctctgtgtgtacaaagtaactgaagcagcccaggcacggtggcacatgcctgtaatcccagcactttggaaggctgaggcgggcagattacctgaggtcagaagtttgagaccagcctggccaacatggtgaaaccctgtctctactagcaatataaaacaggccaggtgaggtggcccacgcctgcagtcccagctacctggggggcaggagaattgcttgaaccgggaggcagaggttgtagtgcgctaagatggcgtgactgtactctagcctgggtgacagaacaagattccatctcaaaaaaagaaaaaagagaaagaaaaaaaagtatagatgaacttgcccaggaaaggagtatagagcagacgagacagcccaggactgagtttgcagaagaaactaaaagggagcagccagagagataagaggaaaaccggagttctgagaaagggcttgtcaagaggaaaggcaattaacagtttaaaatactgctgctgagatctcggtaatatgagatcctaaaatatgagaactgaaacttggttattgaactttgcaacatggcggtcactgatcattgagatccatttggtagagagatctaggcaagagtcaaataggaaagggtcagagtaaaaataagagatagggaaatgcagacataggggcaagacagcttttatgaaatctggctgtgaaggagaggagagagaaagggtttgcactggagaggatgcacagcaaagaagcgtttgtggcatttgtatgattagagaaggtgagatctgagtgtatgtaaatactccccgggaaggaaccagtggagacagaggagctcactctccaggagagagaatggatgattgaaaaggtaaagtggaactatcttctccataagactgttgtgaaaattaaatgagataacatgtaaagttatccggagcagttgctgttcctgtcctctatgacgctgtatatttttattgggtcgcttcaaaggttccatttttctgggtctgaaaagtcttaactattttttattcctctttgccacttattttctttctatagaaacatgctttcttttcatttaattaggtccattttaataaagggtataggagtttacaactcaaaacaattcgtaagaactatcagatacgtacgataaatcacgccaagggcgcaataacgtaaatccagtggtctgcaaatcagaggcattgtaaaaattgttaagattgactttcatgtcttccccctcctttctcttgttcacagcccgagattatgtacatattgttttctgaggcctgatgacctcaatactccttctggctggggagacctcctcattcagtccattccaaatagtcagcagagggagttcacctcttcttcatggaatgagcatggtccttgtcctttattatttggtttctgtctcctagcaaatgacattaaaacattttgcaggccttgtggaattctggtcactgttgccctccaaatgccacacatgagccctcaggatgagccctacagagtttcatccttgtagataggaagatgtgtatttgggaacgaggctaaagccatggccgatttccccaacatgctttctatttctattttcgttaatctttttaagttcaatttttaaaatcatctaaatgratctaaacattctttagcaatttgcttaaatcatcttgtatattatatagaaatgttagatgcatttatttctagcctgcttactctgtatttcacataggaaccaaaaatagtctttccttcttcccagtttccttttgtgattgttgacatttttttacgtttcatcattaaatttatgacttatcttcttgtacctctgcccttcttattatctaagtccatcctatctatttttaaggaatatgaaagtatgaaagtaatcttcagtaccagttctttccaaatgaatcgactgtcttttcatggtgctcgatgggtctgtgtgtaggcgtctgagtgtgtgtaggcgtctgagtgtgtgtaggcatctgagtgtgtgttcggatcacgtgatagtaaagtgttcacagtgttatcacaagtgttattgcaaaataaagcttctctgtgccaggataaattttttaaaaattcatgtctcaattcagatattttttccagagttgctttaaaaaaaaattaacacatttggcaaaattcattttttcttgcaaactcctttgaactttaaatgacaatgttttatatgagcaagggggaagatcaaacacaaaagagaaggaagtgtagtaagttgatcttggaccatactttgaagtggtctgttttctcagtaggatgctaacctacagctaataggagcagctgaggraaggagggaccagctgtccccaaggagcttggcagccttctaccttgggattgcacagtcacctcctccttgctggggctgcagagtttacgctgaggaagtgaaagaaggttgtgtgtttattacagtttgaggtgtacttttcactccaggaaggggaagccsctagaacttttcccatttggcaaggggtaaccaatgcttgcaaaccaagaagtgtagtcatggagatgagaaagtttagatgaattctgatctcccagccccaagcacctgttccaggtagctagacgcagggggcccctcaaggttgaaggtgtatggtagtacaccagatagcttttatggtggtccgcttttagcattttataaaaagtgactagtacttgtcttctacccactagtgtcataagaagcaaagaagatagcgggtctactaagttggatgttcttcaaatagatgatattttaaagtgcaaggaattattgctgtaattaatatagctgggagtgtggtggctaatttgcttgtttctctcaatttcttttcatgtgtcataactgagtgcttgtttgtagcttcctttgtaaatcagaagagttatttggtgttagaaactcagaattgtcagacacagtaagattggttgtgttttattataggatttaatgtcaagcctgtcattttgagtgatgagaaactgggaaaggcgtccttcactgacatagtaggagaaggaggcacttttgttttcaactccaatttggtctgaagctattaaaggaataaatggaggtcgtgcaacatgttgattttagactcttcccrtgtctgctgctagaaggaacgtgaggagcagcttagtattttgttgtgtcttgcagacttcttttgccttaaaaaaaagtctgtttatggagggagaggacatggctgaaaaaacacttgtacataaaacagctgttaagcgaatctccacacactgagatcaagagaacgtgaagaaatatgtccttccaaggacccttttgccaacttggagcctccttcagaaaataaatacagccacgctacaagtttctggtaacttagttactgaaaaataaattgagctacttagacccttgaacctttattaaaaaaaaaaatctctgaattctattgcagtgatgcaaatgaagccagagaaactatgcagaatgtttctttgcccttgtattaacgaatgtgcccctgaagagtcttgaaaatgcaggaggcagaagccccggcctcctagtagagggaaagcacgtacacgcgtctttggtctctaagctccatctgcaataaggaaagatttcctgatagtgaagttttctctggatttttttttccttctcygtgacttgctgtggtaaaggacagttgtgctcagtggcttccagaaaagctggacgtcccaccatgatggcacatctgggcacaccacacctctcctctctactactgggaacactggagaggactgactgcctgtggcatatgctttgtgcttggagtgttgcttatgaaagatgaggcccctttaaaacctcatgctcacacttagagaattctggtcgtgtgctacagatgttttacagtttatttccaaacagctgcttttcccttctttagtctgtttttttttttttttttttttaaataaaatccctctggaaacctttcagctcacatccttggcaatgcttccttagtacaagtccttgcattctatgccatgacattctcccaaccagcacctgttactacaggcaggccatcgacttagctgttctgtgagttagaagtactattgtgtatgtggatcagaactgtagattcaatcagcctagaacagacagcccccagtgacaagccctccctagcacttcatgagaatacacagaaagaagaaggaaaaacttgacttataatgtatgtctccctcggaacatcaggtagaaaagccccatgcaggtgactcaatccagggtcaaagcagggagggtttccctgagggcacagcaatttgacaagtttgtcccatttcaaacttccccagcagccagctgtcaataatatctttgaccttcagaggtaggaagagcaggaataattaagatccacagatgatccccgaatcctggtaatgattttcacatccttctttctcatgatccttttccccagagctgccatttctctaaactaaagtgacgagtgtaagttcagcctcctttagtttcttttccaataatcttctgataaagatattaggaagaagtaaaagtccaattgaagagggcagtatcagggagggaacagaagtaaagagtttgggagatcattccttgaataactaagtgttgatcggctcttgggaaaatgtgttgatttgtcttctggccagttgtacatatgcagatacaccatctgtactgaaaaatatgcgtgaacttctctggaagcgcctgagtgagtcagtgtctgaaaaggagctacacctctaaaacagttatcaagtatttagggatgaggtgctgcaaagccaagagagtgaaaacaatccttaaaggygtgtttggccagctctcaaaaatcttagacagttgcaacacagtccttggctcagacactggatttttcccattcatgtacttttttgacagatgaattgttgcaggctgcaaaaaaagctcgaagaggaatctgttagactcctcactcagagcagggatctatttgcttgcaatcctgttagcaaaccaaggtgccatttgctttgtgtggtgtgctacttggccactttttcttagccgtggctgctctgtctgaaacggtcatggtctcattcagctctagcatatttgcgtgttaggttggcatgaagattctcaatttagtaaatgctagacactagtataacttccctgaattcctgcctctcaactcctatggaatgtttatggctttcattatagtaataacaagatttcttgcacaaaaactcacttgaccttggcactttctttctagagccatccttcctttttgctgataggtgggtttgcatttatttttggcatgactttttcaccttctgaattgctgactatggtagattgatttttttttttaaagaaacgcaagtcattttgatgaaacgatcaacccagcctgatataactttaagtatagtttcacaccacatgtaataaatgtgaccctttagagatattagaaactgatgatgaatgtttagttacaagaatagttcagaccctcaggtatgggtattctttgcacaactctggaatatatttcttgaatcactggaagaagatggagtccttggaaacatgttgtcaggggctcaattacctttagacctttaagtgttcttggccaaaggcttggtagtaattatttgagggcattagtgatagaccacatgttaaggctgtagctgaaaccaagagtcatcatatgcatcctgtatggaaagaactggggatcatacttcagtctttccagccaaactatgtgtrtaccatcactaacttaagaaacacagtgtatgctattgtgtgctggtacacaatggggaaaatgactggctgccttcaaatcctgtcttctatgtctaggctcaacaacgggggacccctctgtatgtttttatgccgagaactaaagaattttaaaaataaacttggatagttttaaagggtgtaatatcctatgaattgtaacactgtatatatgctttaagtgtattatcaaagagtcaaagttatggacttttctccttcatacttggaaaatgttcatcattgtaaaacaaatggcagcaaaaccagtccttaggatgaagcaaatcagaaggagtgactttgtttttaaaatttaagtaaatgtgttaacatgtcatttcaaataatcatcttgcttctgaactaaaattcctaagatacgtagatagaaaaggcagtgagtttgtcacctggtagaaataagatccctcccaccccttattccatcctatctctgtttttttttttttttttaaagtgttctgtgctttgctctccaaggtgcttcctcaggaatgcattgtcaaattactccttgtatttggcaacccaaggagctttttcctccagctttattgaagtatagttgacaactaattgtatgtgtttaaggtatacaacttgatgattggcctatgtatacattgtaagatatccagtacaatcaagtaacatatccatcacctcggtgttgttaactatagtcagcatgctgtatgctagaccttcagaactcgttcatctcgcacagcagggattctgtacccctagccctacgtctccccaaaggctttactacactggtcagtaaaggggaggaggaaacgagaactgaatgagcaatctcaggctaatcggtttcaggaaggagttcatatggaaactgaggttctggaaatgtaatctacttttaagaatcaaccacacctgtgcctcctccagaaaatctttgtagtgcatgactcttaccaggcgtatatgtagaggaaaaggtcaaagaaaaacatttccaaagatactgtgaaaaataaaattgtattttatcatagaattataaaaggtataactggggaagtttaaacatgggtagaaaaatggaaagaagaatgagacccatgagacggtaattcacatgaatcattgatgtgaaaatatgtggatgatattgaggggcagayggacagacaggttggcaggtgctcctggagtctcatggagagggggtcacttgctcccaagcagccagttccaaagtgtcttgacggcttcctttctggaagtactcggggctggttrgtaattatttcccagcttatgggatttcttagactctccctggctggccttttaaaaatgaatgaccctcctatcctttcaagatgaagcaggctctttaggccctctgataccccttgccagcccacactgagcctgtgggacctagagacaggcagcttttcacaccttctggattgctgattatggtagactgatttttttttaaataaaatcaagtcattttgatgaaatgaccaactcagcctgatataactgggtctgctgcaggagcaggctggctgggttctgtgtccaaagacctgggcctgctctgttgctccttctcagggttgccagtgctgcttggcactgttcagtgtctgtggaggtgttgtctagggctgttccctctgtccattttctgtgagcaatacatgccccctgctcctttccagaaaccacttgtattttactaattgctacagtcagctttctgaacgtgggccgcttattttgatactggcttgagaacacacacaaggctgggtgcagtggctcacgcccgtaaccctcacactttgggatgcggaagcaggcggatctctttagyccgggagtttgagaccagcctgggcatcatggtgaaactccatctctaccaaaaaaaatacagaaattacccaggcatagtggcacacttctgtagtcccagctacttgggaggttgaggtggggggatgacctgggccctggaggtggaggtttcagtgagctgagatcgcactgcactccagccagggtgacacagtgagaccctgtctcaaaaaaaaaaaaaaaaaaaaaaaaaaaaaaaagacacacacatatacagctgttcttgttggggtgtgtgtatattaagtttgttttcaagtaagcttctctgcctcctgcccttctactggttgataatttttctagtatctatcagggacagcaggttgatggtgttggcagagtttgtccgtagcatcatggtccttgaggcttttgtagtacaaacaaaacagaataccacacaactaccagttctctcactccataggacatcgccacatggcccaatactccttcttgcaggtctgtccttgtcacacggaggattctaacatgattgactctgttgggtcaatttctactcccagctcttctagcctcacaaatccacttatctccctttccatttgcatgttcgagtccaccctttctgtaggctccttcccatgagcatttatacacgcttgagtctgtctgacagaaacctcccttggccccttcaccctaaagcacatgtgttctctcccctctcctcmgacaaaatccaaaagtatggtctacactcatacttcccttccttctcttctgctccccttgactcccttgcctctggtttaccccaccagagggtggagggggcatggtcacttgtatgagaggatggcaaagttccttctttcttaaaatatgtgacttctccatcatcccagagcaaatcacatcctgttccactacttatttaactaatgtcaacgactttggacgatcctaaagcattttcagtagacctctgagtccctcctctgtgtttgcgtccactcccactgcttcggtgagatggatcagtgactctctcattgccacatcttcttcctgtggggagcagcatcttcccctagcttctgtgccaccctatctctgtctgtcacctctacagtcactgcctctggccccttaaatgttagtgtttttcaggcactgtccttggccctctctgcttctccatcttcatggcaacctcacctcctcccagcgcttcagttggtccttgagctgctgccccttaacccagaattctgtctctggaacttttgactctcctaatggcgctctgaacatcactacctggaagtcccagaagcccctcaaattcagcatgtaggaaacttatttcattgtgacccccatgcctgccactctttctgtgttccctctccagcgaatgacgttgccatgtactcagcttcctaagccagcaaaaagggctttatcttagattccttcctacctgttgtcttatccccagtttcaatggccaaatcacatccattctacctcagtatattttatatcmgtctacttatttttatcctttgccaccctttgcctcctacttaagaatcaaaaaccctgtaagacttccttgacctcataagaacaggttagattcttgtatcagtcagagaaacaggaccaattggatggatggatggatggatggatggatggatggatggatggatggaaacttattttaaggaattaatcttgaggctgacaattcaaaatccataactgcgggaggagggtgctaacaattctgaatctgtagggcaggctgtaaactcaggcgggaggtgatgccaaagtgtcgaggtggaatctcttcttacctgggaaacctccgtttttgctctgaaagccttcaactgggtggataacacccacattatcaagggtggtctcctttgcttaaagttaactgattgaggatattaacctcatctataaaacaccttcacagcaacacctagattagtgtttgattacataactggggaccgtacccttgctcagttgacacrtaaaactgaccctcacagttctccctctgggtggatattcccacaccacacatcttctaaacagtattttactatattgaagtgggctgtgtactcacctgtgtcccccactggactgcaggcaggtattatgtcttgtccacctaatggctgcataaaataggaatacacacagacatacccgactcaaacagatacaaacacatagacaggcacacaggcatacccagatgcgtctacatatctgaaagtgaatgaatgaatgttcttagccttctgttttttcatggatggtctgtaggaagcaacattccaacaaggcagagccagtaacagaggatgcttgatggcagggaatggttgtcagatatgaaaaatgtttcaatgggccctacaaccaacatgtggaagtttactctagcctaggtcttgattcagccatagcagacaaactgcaagagggaaaccaaagacaagatgaacccctttgcagctgagtgtttcatactcaagggtctagtaacataaactaactgttgtctaccatgtatcagatgctcaaatatagttacgtgwttttttcattatgtagcaactgtgcatcttcatgtcacaaacttgcaagaaatagaatttctttattatcttataaattggtttgtctcacktgtcccacttctgcctgatgggagaaacttratatacagttaatgccaggaaaactcagtcgattaagagtttttttcaggtaagtcttaatattcctgtagatgaatggataaacaaactggcacatccagacgatgggctattmttcagcactaaaaagaaatgagctttcaagctacagaggaatatagagtttgctctacatattgttaactaaagaagccaaactgaaaaggttacatactatatagttccaactgtacgacattctgggaaaggcaaaactgtagagacagtaaaaacattagtggtggccaagggtttgggggaaggagggatgaatagatggagcccacatgatttttagcacagtaaaaatactgtatgatactacaatggtagatgcatgtcattatacggttgcccaaacccatagactatacaacaccgagagtgaactctaatgtcaactgtggaccttgggtgataatgatgtgtccgtgtaggtccaccgatgataactaatgtaccactttggtgcaggatgttgatatgggggaggctgtgcttggtgggaggcagacagggggcatatgagaactctctgtaccttgtgctcagcatagctgtaaacccaaaagtgctctaaaagataaagcctattraaaaacaaagtcttattagtcctcctccatggggttgcttttcatttatggggagttcacatggcttcaaagaagtgagaggcgtgtgaccatcctcagtcgccatgattccagatatccacgggctgtcagtcttctcatcttgtccccaggcactgccttccctcaaccctgatgcctgctgatgtgtctgtgtttctgcctgagccccagccacctagtccaggctcgcatctgctgctttcatactgcatggcattttcagagctgccagctgcctattccccagcacaggatccacaggcctatctgggagttctgttgctctcattcrcaagctctgtccatgggtaaggctcgtactcagaggcctgtggcactgatgctcttcactcttgctccttatggccccttgacttggagattctttttgtgtctgggaaggagtggagggaggtacacctggctcagcatgtgttctgtcaaacctattacttatcaagggtcttgactcttgaaacttgaaagccaaaagttgggccatttggttctcttgttctgctgtaaggatttctgtctggaataatgggttgcttcatgtctagtagcccaaatagaaaagtgtcatggggtaacaacaagaatgtacactttgggagaggccaaggcaggaggatcccttgagcctaacagttctagaccagcctggcaacatagcctctctactaaaaatttttttaaaaatagctgggtgtggtggctcatgcctttagacccagctcctccagaggctgaggcagaaggattgcctgagtccaggagttccaggttgcagtgagttgtgatagtaccacagcactccaggctgggtgacagaatgaaaccctgtcccaaaagaaaaaaaaaaaaaaaaaggagaagaagaatgtaaagggtatgggaaagtaatatgttagttgataccttacaataaatttgccacatttacaaccttaggagatcgtattctcagccctaggttgaaggtgaggaaatgtgaggcagggagttggaagagccttcacttgcccagggtcgtaagtgataggacagggatttggacacaggttggtctgacttcactgtgccatactgctcataagaagagaacatggaggaasgatcactttctaagggatacccaacagtgtgaaaagacccatttatagtatttctgaatcctggaaaggctctccctattctatagagaaattttccaagacctcaggattccagtactatccatgggaacacaggagtccttgacaggaaacatttatgtttttccagtttttccagtttattaaactgcaaaataacagccacccagttaaggaaggaaagcatgttgaacatctctttgccaggcacgggagataaagctcctgctgtgttctgggttttacagacataaaggaaatgaagcatagtccccrtgtctgtaacctttcatggggagaaacacaagggcagacaattttcattcatccccactcttgagattttgaaagaggcatgtgcaasggcagccagaaccacaaggaaggaccctggcctggtctgagatggtcagtgtgggtttttgaaggacagagtcaagtcctaagaagaaggaattggcctgggaagatgatctagagagtgtgactggggagtgctccaggctgaggggatggaggaacaaagcaaggcagtggtaaaacagccctgttagttcagggatccccaaggcagagggatgtggctggacagagaggcaaggtcctggctacaaagggctagtttgtcatgaagccacttagattcaaccccacagctgatgacaagccattgagggagtttaatcaggagcgatgtgaccagacttgtgtttttaggtacactgctgggtggcaacgaagagagtgcatgggatagaacttggagaaggagggccatcacattgtccagcagagagatgagggcctgggctaaggtagggatggaacagaaggagagcagaagacaaagccagaaaaccccggggaagtcaaatgagtgggacttagtgctgattggaaaggggagagcaatggtagggaatgaggtgttgaaggtgactcctgggcacccatcttgaatgtatgggtggatggaggcgcctctaaatgagagagtgaggagcaaaagtagatttgggggaaaacatgatgagttcagtttgacatatgttgaatttgaggtatccttgggagatagcaagtacgcagttggagtcaaatctatcatttgtaagaaaggtgatagagatttaggattggaagtctatagcctggagtaagagttaacaccatgagggcagatgagattgcccagggagagcacccagggtgaaaatgaaatagttcttgagatagacaaagaagcaagcagtgaagaggatcctggggaggaggttggacacaatcagacatctatggaatctcaaaaatggaggaggccagtgggatcagtaatgtcacattctgcagagaagtccttaaaaagaagagtgccatctggattgccagagggaacacattggtggcccaagggaggaatgttttggcagattttatgaggatgaagccaaactgccaccctcgtggccaagatggccttgatcctgtcgcaggaaagtcccttctgtgcttggtagaagaatartacttttttcaccctgttccccacactgttgcattaagcatgctaaatagcatcacccccttcctcatctataggaatattaattttaggctttgtcttgctgtcacaatattttaactaatttttcctaagttcttatcaggtacataatggacattctaattagaaaaaaacsatccgtatgccctaaaccttacctctgagggtatcttcatagtgaagaagtttctattttgccagaaaaaaagcgatacttataaaataaatgttttctcttttactacttagtagaaccaatacataatggaattttagtttcatttcataaaatatttactctgtaagcaaattaaagtgactttttttaaacaaaagaaggttgctgtattcaccattgaatcaaatctttagatttccaaattagtgaactaattctgtgaaataatcatcttattcawagctattcaaatctttctggataattcgttctgtttcccaggtatcggcacaatcataggctcataaacagaactccaatgcgttgtttctgtttctctttgtcatgtgatttagggtttatttttgtttgtcaatttaaattctaagaatctagatctcagtgtctccttgaaagaatactttattaagtactacctatttgtaatatgtttcaatgtagactaaccaacccaataatgagtatttggtaaagcaataggaaactttgcagtaactacaacaaatatacgtcatcatactctttgtggagatgacacgctggaaatttcaggtggtgcttatttttaaatgtatgctctatttaatgtgtccctaagttctcagtctccaaaataaatctaacacgggcagcacccccctcccatccgccacacaaaacatgagctgttacacatcccgagtaatgaagtgtatagycgcttcagctttctcttggcatccgaggctaaggagctaatattctaagaggtgatgtattttaatcctaataagcacctaagaattcattgagtgaaaagttaaggttagcaatcaaccttggcaaactgatgcttataaattataccaatgtgaaattgtgtttgaggtgagaaacaagagtgggtgctgagagggagtaataaaccatccaactgcaaatggcgacatttcatcacaccactgttstcattggacattattcacaagcatacttttgatttatttttctcagtgggtctgtaaatctctttcttggagtgcaaattgcatgagtagtaagttccatgtgccaggagatggcttggttcatctcttagaccttgactttattaataacagcaacaaaaagaagagaccgatacaagttatagagaacctcaaaatgaaaagcaaatttattctagattstacctttttgttttatgtgtgtttttcttttactaaacaatcttatctggtaatttgttccatcatgatgctttgagaaacatagaaactggttattgaaaagatcagatgtatacgttgatttttgtaaagatcagatgtccttcccctaagatagggtgacttctactgccattgtgttgtagatcttgtgcctgtcattctttcccttaagctaaatatgctctagtactctctctaagtctaatcttatagtctgttaactagttgacttgtttggtggggtgtgaagtaccaaggagaccaagtcttggatttaatgatgacaaaagtcaacctatattccacatatgtccttatytctgtagagtccattaggcttcttgtatttgaaggccacagggtatacctttaggccactcagccaagttcttgccatgagtcacaaagcagaaccagatgtaagaccagagggtgaggacttcgagcccagcggggaccacagggatggtctggaccactttcctcaccttactgatggtgaactgaagccaaaagaggtcaagtccctgttcgcagtcatgcagccccttagagttggctctgggtgaccacccttccagtccagcactgtttctgatacagtgcgcatgagcatctcagcaagtatctcacatcatttttgcaaatgagcaaaaccacactaatttagggttcgtgttctacctgttcccaacagtctgcttcctacttccaatgccagtgacactttgccagtcccattcatcttggggacaatcctcagatgttccttccacactcactcactcggcactgctgcttgccacacactgtgctttggttgcaggaacaaggacagacctccacctgttgagaaaaactatttcaaaataatccttgccaccacaccacatgtagcataaggaaaattataaagtaattcccttagacttagactttgtaataaccagctcaggaaccagagaaacccctgctagggttagaggtgactttatttcacagattccatggccagacgccagagtgatacagagaaactcggaacgtggtcaccagtgggccttctggcaggcctagggagattggatcatctcattacatcatttttaattattacctcttgacctcactcactttctctcaccacatcatgtactggttttaattggtcagtagccgaagagtaacaagcttactcgaaatttccaacatagaacatgaaaactttggctactgcgaattccaaggttttggatggcaaaaatctggcaatgactccaaaggagggagagaggagagagcagcttgttcaatggaataacctcattttaaggctggagtgccaagctaatttgttaaaattactatactcctttctcaattatccatctcaaggtttatttatgttgtggatttgtgatggtcgccacatctcagccaatcaaagtaggggacagggtcaggtgcgaaatcagtaattctgtataaagtagaattcagraaactgctagtcacttggattaattcagggaagtcctgttcagattattgaaaagatcaaagttatgatttctttttttgaagaagkgctatttgattccaactgaatgttagtgtgccagttatttaactcttctgggccttccttataaataaggagtatagacaatgatgaaattaaggtctcttctaggcaggcatcctataagattagaactattactttgaaatacctacagcaactggtaatgagctggcagagtagtcctcaccgctcagcttactttaataaataagcagccatgatttatagttgacaagagcaccagccaaaatctattctccttgacttatagttacactgattataaaaaaaaaaaaaaaagataatgtctctggtgcttaaaagcatattatcatagagtctttaaaacttgaaaggattttgattttattctctactctcattcacagttgagcctgtgccctgacctaggtgtcatctgcatttgcttaaggaaccgatcacttattgataggtgcaaatgttgaagggtcaggtgtcatcaataagcatacattccaaaatcatgaagtcctgaattgatgaagttctactgcacggttcttttggagttgtttatattaactttatcaggatatcttctctcatccaaaagagatgagtgttattacgataaaggaaggggtgtgtgtgtgtgtgtgtgtgtgtgtgtgtgtgtgtgtgtgtgatctaaaagaagccaccctggcatatgatttcttccctcctcacatacccacttccaaacatgtcagatttactgcaatcctttatctcagatgcctgtactataaagtgggataatccttatctttgctacttcacagtgagtagtggagacaaatgagatagtaaataggagcattctttgaactcttatggagagagcttttaaatacagactttaaaaaagagtcagataattccagtggaaaattttgtagataatcaataatgtccataaaatgttacattagacctcacatctccttcacagaatggcctttgtccctgtagcctgagtgtctcacaaaatctctaacatttatatcctgaaaaagctcttcttctgtccctcccctgcccatggtgtctgggaggcccagtctaaaccatgtctgggtggcaaggtctttgttttcttcttattaagctctgggggtttgattgtagctctcccctactataaaagcacctttcttttcctctagggtttggggatggattgatatatttacttctagttatcctggggttccttttattattctgtcttatttccatatgcaggagcatgatagaagtatttattggactttgttttacaaaccaaccaataaattgattcattaaaacttcattaatttaaggaaattatatttaacccacattttctagggttctagggccaatgatttgtcatttgaactggctagggttaggttttcaggctgtggtcataaaataaagcggggggaggggggggcacatgtccttgaccttggctccagtcagtcaagttggtcagtgccaccatgtgtacttccatgagagcttgctgcaggtacctaagtttttcagaactgagactgttctcatctggccacttaatttggaggaagatatgtatctcagttccagaatgtagtaacgaaggcaaaaatgaagcaaaatatttctaaattgatgctctctcctgcacaaatgaatagtattcgttcactttgggtggcttggcatcaactttttaagacagcatttattaacttgaaccgaatcctcttaaaaattttcttgcataatttccaaactgctttgtttactgttttcttgaagaccagtcctcttgtttttggcattggctgatactattggacttcaatccagtgcttcatcgctgagcggtgacgcactgagaaactcgatagagaagcacctgcagttagtgacgctcgggtggactctgccaggctggatctgaataaatccttaagagcaaacccaggtgaacaggaaatcatttccttctggtcaacattgagctctgagatccatagtgatcaaatgctgaggtccaggacagttgggtgctgccaagtcacgtttcatccacaggcttggcatcaccttgtgacctcagtgggttctgtgaaatagctcaggggctgaagaagtctgtccagataatagagtagtgtcagagaaaaaatttcccaccacttttccctcccagtctgggagatgtgtgccaaattggggtgggtgggaagctgaagtggcttgcagaatgcagcatgaacacagatgccttctgcctctttgcaaggtttatggagaactgagacatgggggtgctgctcatgatttagtgggctcctgagccacagtagacacaacagatgttgttcttgttggcagaagcaacggcctgatatcaagcaatatggggtgcagatggtcctatactacaattgatgaatccggtcagcttgctctaggtcagggagacataggcactgcccagaaattcatagaaggccccttctgtcagggagatgtggagtgcccccagccagacagagatccagagggtacattccaaatctgcttcctgaacacagaggacctgccaacaggccatttagaaggcatttggtggaatgctcaagagaaatgcagcctggatgagaaccttatgtgagccatttaatttgctacctaactcagttcatctctttgtgtctgttattaaagaaaaagctctaaagaaaagcttacagatattttggatttaagagaagagtatgattgattatataacggagcccaatgggaagagtgtcttatttgatgttttccctcattcaatcattaaatgttaattgaggacctctgttctcagcaccagctatgatggtaatgaaacaggtatgatccctcacctctcccttgaggcccattcagtcatatgatggagcagcattcagagaccaatgatgggcccaatagctgttctttattgaactgtttcccagacgttgtaatcctcacaagtaaggggtttctaataaggcagtcaaaattaatggaacaggcccaccgttcagcatgacactagatttgtggcgggattgagtgaggacaacactatttgatgggcttgcatcagggagggaggaagacagggcagtcacttgatgaggagggatgggtgctgccatcagcaacaacctatgcaccttctgagcaggtcactgaaaggagaggaaggtggcagtgtccttggatggactgagacttgtcctttgattgtcacctgacagtgaagggtttcctcatcccagagagacattcttaggcaattgccttctttccagatggtgagactgagtaggtctggggcccatctggccttctggcttagagctgaatatgcggtagggaaggagggggtcagacactcatttattcgttcaccgaatgctcatagaatgcctgctccctgcaggtgctgtgggatacaacagatgctaagagagatatggttgctatacagatgaacctttctttccaaggagggagacaaaagcaaatcaacctgggaagaaaaacacttgaagytgtgatgggtgctaggaaggaagcctgcagaggcttgaatgggaaaatagtagactcgggatggggttggccagggcaggtcccttcctcccagggaagagtggcgcaggcagagggagcagcgtacatccacctcaaggtagaaagaccgtgactggctcaagcttggctagagcatccgtggtcaagagcagtgggacaggttggggagggaggtgacggccagatcattgagagttttagcttccttgaaaaaaagtctgggtttggtccaactcaaatccactgaagggtttgagcatagctgtgatgtcatcctagacaccactaccacattaatggtctctgtgggttatgatacaacactcaaatcttaggggattccccactgccttctcgttggcatcagcttgtcttaatctttcatttcttcccatcctgcaccttaagctctaacctaatggcaacctctactccctacacattcacagtctacttcaagcctttgtccatgccactgtctccacctacagaaaactccccaccctgcaaggcctggttcacgtggcatccccttcaccatgcctctcttttgtagttttctcggcccagatgtgatcgcccttctctgccagccctttgtaacttatgaataccgctatatttcattgatttcaagatgcaccatttttttttcacatttaacttgcgaaatcaggtcgggcctaacaattgctagtgtattgtttaattggccatgcttttcctctcttagcagttacataaatgaacgctgcattttactatcactggcatattagattggatgaaatatggtaattaatttttaccaggtactacagtaatcaatataattgcattttcccctcttgaaatcagatctctgagcataggmgcacatggtccccctttcagtatcccaaggtaagcacactttttgacatgcaaagttggtgccctccaatgaatataaaatgctaaatgagaggaaaatgtgcaggaaacaataagggatttgttccagctggatctgacacactaaattggagcattataagagatggaaaygtctagagtgggatgagtgacccgtttagtagtaagcccaaatgtcaagctaaggaattctgatctctcaaggattatcccacactgtaaattgcaggcaaagccatcgggtaggaaattaaagcagaggttaaagtaacttttttttttttaaactctcacttaaaacttacatatttttaaaaattacctcctcttctcattagccatctggccatgcaaactggctttcacactcctttctttctttctttcctttgcttttttctttattattcagtagaggtgctggtttatacatagtgattgtcaggacagagttttcaggcagctctatgactattgggaccagtcgccaaagtccttcatttaaatgaccaatttcacattcagtctggacttcaatggggatgaagattttagaacccgaagacacatgggtaatgctggaagtctttttctctttccctatgaatggaaaattcattcattcatttagcaaacatctggtgtcttttacgtgccagtcacwgtgctgggtttgaagaatacacagataaaaatatgctcggtcccttcacatagcttctattctaaacacaaggagagtttgttagtagattatttctacagtgtcatgtatagatgtatagactaccttctgtactggattggtttaaattagatgatttccatgatgggactagaggattttaagaatattttccaacgctttctacaactgatttttttttttcttagtgtattaaaaaacacagccattgcacagaaataatctcccactttccaaccaacctgatgcttgtaaactccctctcaggtcacaccagagggacgaaatcatttatagaaagcaaattactattaaatcctaagcaattttattgttgaaagtttaaccctatttatataatactgtcattgatgtgatgtaaatttctttgcccatttcaatgttttgtccctagtctacagattctattagatccagtagacagtgacgtgaaggattatgaatcctccctgaggtcttttccgtgtaaaagagctctgttggttgctcatctttcatcttttcagtgcagccagaataatcgctgagctcactgtccgtatcttatacaatgcggacttcataaatgttatcttttggattacagagctgcacactgacacacaggtatgtgaagagatctgtatctattcaacacacacacgattattatcttggttgtagtcaccttaaaaagtagaatgaaatttgtgttattttaatgagagatactgagatgctgctattctttgtggttttctattaggttcatttaaagaagcaagcctgtcctgctgtcttattttaatggtttaggacggatggaattttaattgtatagatgcagcagatcctttggaaggaaaccggatctaccccattagagtttcatagaggtttcagataacagaaatgaatgtgaatcaactagcgcctatttcattatgactggggaaaacaaacagtgtcaatatttggtacaagagctcttccgttttaaaagagcaacttgtaagagccatgtaaggcaaaataaaacctcacaaagagaattctgagggtcggtagagatgataaaatactctagcacagaaatcaaaagaccattaaaatcttaaatatgccatgatttgaaaaacgtcccagtgaggcttcccacagtaagcgaggtcatcatagaaggcacgtttgaatctgtttatctcgggttggaatgacacatgactgcagccacattcaggctcattactgctgaagtgtgaagtgtccacttggaaagaatgcattctttcacacataaagattgctgcattctgagatgtggggtcagcaatgtggttggatgttttttaggagattaacatcgaacatattttctacaaagcctgctcaacaagttaaccacttggtgccagcctcctgggggccccgacatggggcaagcactgctctggggatttccagcatcctgagactttccctcaccctcacacatagcagatcagggtcttcaagtgcaggtgacacatacattgtgatccacctcaacctgatgaaattgatttctcttagtacctattgcttctacatgtgaataggcaatctataagttacattccctgtgtcccatttttaggattactaaccagctgattgcccatgtgargacatctttatgagtgtttgcattatcctggtgagaatttatgtagctcttctaatgtgtaaattgctaaactttttcttcccctacctgaaattttgacttacatgtgtatggcttttgtaattgcgtgaatgtattctattggctattgatggtttctctgattctaggaaacacatacttctgctgatcctgacaaccagaaaaaacaaaaacaaaaacaaaaaaaamcaagtgatttaaacaaagcaagtacaaagtcattacagagatttcttttttttttagtatggactattcttagttatctttttcttttcttgggttggataattttaaatattttatacatcctaatgaaattaatattttccacttaaaatagcttatcttgttgaactgtgattggattgctaaataatttttaaaagaagattaaagtttcatgccttgtcaagaggccaattaatgtagcacagctaggcaggtaggaaagaaaaacttcacctgtcacaagataggaatgtgttggttgatactccctgtcttcctttgaaatcataccatcgaaatgaaagttgtccctagttttaataacctcctgacaagaggattccactgtttctctgctatcccatttcaatatttaacaactttctaaaagtctgagcatctcttgcttcagaytgtcaatttttctgttattgttaggaaacagagggtcattctcttacgtaatactctccttatgattgtggtcggggaagagaatggtgccccacaggaatcttagacctcctgttcyatctccatcctttygatatacaaagggcagcagttctcaaagtgtggtccatggaccagcagcatcagcatctcctgggacctcgttgttttttgtttgtttgtttttgttttgtttgtttgagacagatttttgctcttgttgcccaggctggagtgcagtgacgcactctctgcttattggaacctccaccttccagtttcaagtgattctcctgcctcagcctccagagtagcacaggccaccacacccggctgatttttgcatttttagtagagayggggtttcaccatgttggccagactggtctcgawctcctgacctagtgatccgcccaccttggcctcccaaagtgctgggatcacaggcctgagcccacgcgcccggccgggaccttgtttaacatgcacattttggggctccatcccagacctacmaattcagaaactccaggagcgggtcccagcaatttgtgtttctactggccctccaggtggttctaatgcatgctaagtttgaaaacccttgttatgttggaggttagagtcagtcagaaagaagacagagcaattcaaactacccaaagaggaatggacagccttcaccttccattacacttcaggtacactttgaagacaaccaaagaatgcagacattggcctgcaaatgcctgtgcctgcaattgattgcagttctttttgtattactaacgggaagtctttactttttttttttttttttttttttttgagacggagtcttgctctgttgcccaggctggagtgcagtggcacgatctcagctcactgcaatctccacttcgcgggttcacgccattctcctgcctcagcctcccaagtagctgggactacaggcacccgccaccacacccggctmattttttgtgtttttagtagagatgggktttcaccgtgttagccaggatggtcttgatttcctgaccttgtgatctgcccacctcggcctcccaaagtgctgggattacaggcgtgagccaccgcgcccggccttaaatgttaaaaggaaagaaaatatgcatataaagagattgcacttaaaattagtcagcttgtactttggttggtagaaaacaaacttctgcaaaatctgaagatttactgataggtggatgaggaagtatttctgaaatgtgttaaccactcatttcatttaccagaaactgctcagagcctcttgggggggcgatcattgcaaacttaacaaaaccaatcgcctgacatttctgcattgcacataacttcttaagactgccagttctgaattgtccattttaaactttgcatttattcttaggacatgggaagtctaaagaagatttggatgttccccgaaacgctttccttcttcatttccaactagcaccaaacttttgtctgattttatttaccttcaaaaagttaggctgggcacagtggctcatgcctataattccagtgctttgggaggctgaggtgtgaggattgcttgagtacaggagtttgagaccagcctgggtaacatgacaagatcatgtctcaaacaaaaaatttaaaaattagccagtgtggtggcatgcttttgtgatcctagctactcaggaggctaaagcagaaggattgcttgagcccaggaggtggaggctgcattgagctatgatagtggaactgcactccagcctgggcaacagaacaagaccctgtctctaaaaaaaaaaaaaaaaaaaaaaaattggtgaacattcacctactctgatcagaggcatccgcttcccgtgagcacttctgtgccttgaggatcctgagcacatgtgatcataaggaaaatttagggctaatttttaaaaacataggggtttggtgagggctccatttcttccaatgggcgtatagtaccccccacccccccccaaaaaaaaaacgctttttaaacatgttgactaaaaaatgtaaaagtgataacttcctttaaaaactttgggctggagtttatttaagtggaactttctggtagctttttgcaacctgtaataaactcattggaatgagtgggaaatagatatcatgtgtttcctgagccttccttggatccgtggccaggaaaaaaagctgctgttcaaggggttaatggtgtccaaaccttatttatatttgtgtgattagggatgtgcaaaatgtgcctcttgcactcaatccaggtttgtggaagattagctgttctaaacagaaatggaagaacagcccagaagaattgtaaaaagaatgcgtagcatgagcaacaggattttttttttcctgtgtgtggctatgtagaggcggaaaaggatgaaatgcggtttaaaaattaaatgcagactaactgctttcctcctctgaagaatgccagaaaacatttaatccaggagatactcctgaccattgaccacattccacccaccaccattcagtcggaagcttcagactccgtaaaataggcgaacatggttattactgcaaatgctatttgttgattttttagggtcgacagcccaatggctgaacagtgcatgattgagtatgaattcatactgcgttcagcttgyaaaaaagacttgctatgtacaaagtagcctcatcggtttgaatgcttaggaatttttctagggaacaaaacattatcaaagacagcaaaattaagggaaactgagtragattattaaaatagatcatattaatgccaaaatctcttgtacaaagagaccacttattcatatatttattcactgagcaaatattcattgttacctattmtgcacagctagagaatgttagctcaaagttttcaaaccatttttttaaaacaaagatgtttatatatcctctacagattcctaaagttggatcttattttcttggttaattgtatgtattgatggggaaaattttttaaagtcatattcaaatagatttctttgattcgctgragaataagaattggacatttgctccaggccaattgttcatcttatcgataaatacaaaatgatgtcactcaagttgtgggataaccccccaacccaccctcaaagtttaagaaaacagctacgtagatagcattatggaattcttaaagctccgaggggtatgagaagacatcagttcaatatcttgaatttgcaaaagagctcactgaggcccagtaatcttagctcaagtgactttcccaaggctccagaggcagctggtggcagagccaatcccggcagccatggtcggtcttttcttgtgtttccctccaggtcttctgcgtgcattaaactcttacagaggtactgacttggttccagacatgtacctgtacatgggaagtccctgtacttgggtagctcatggtattcatatttgtcttagatctttcttccttggatattacaaagtggaagcttatgaagtgtgaaaattaaccaaaggatcttagaatccttcagattattttgagtcattcaytatacttaataattgcattcattgtattttactaaaactatgtgtatgaagcatgaaaatacatttgttcttgaaagaagggaacactcaaagtatatggtacatttggctctttcttatcttgcttctctgctacctaggccaacactgattcttggcgatggggtctctgagaggaaacatccttagctacacgatcctgtgggtatgacaacagtggagtcagktggggctgtgattcaaaccccgccacagccatactttgaagcctgggtctgaaactgggccctcattgaagtatcttcaatgtgtagggcctgataggtacccccatgtggcccccagggcccccaccatggcctgataggtgccccattacctcaggacagctcatgctttgggacgaatcagtcccacttggtaaatctcaaggctcatactcaagggcatcaaaggccagtgtgtaaattggggctattctcgtcttgagaaggcatccacctgtcactgtgtcacaggctgctgacacctctcagcctacattctcagtgactgtagcaatgattcccaggtgaacagagctgctcccccaggcccccttgcttctggccccagaagtccaggacacctctcctaggtgcacggcttcccaagctcctctgggggtcttgggttgggatatacttgcttgggggagaaaatgggagactatctagaaggaaggtctgatttggagggatgtagcgctggcatggtagttgctatgtccgcctttcractggttgctatggggttgagccccagttcgggcaaatgtatgttcccggagaaaagcattttcagtcggcaattyctgacccaccctttgaaatgacttgattcagatactgtttatgaagcactttccgttctgaaatggggcctaagttcagggtagtgttcttttctgctgtttcatttgactgtaacgggagttacacaagtaacacagggtataatttgacctaattgattccaggcctcttcattgtcgctctaacatcttcctccctttattaaattcacatcagttcacatttcccttcgttaaacttccagttaaactcttgcagagatgagaatgctttctgcagataacttcagtaatggaagcacctaattttctgtttgggtgataaaaagcctctggtgatgaaaatatttactttaaaaaactgggattcttaactaagtgaaaaatatatatatgaaaattactgttctgcaaatagttagaacagggtagcgcctctgctcatagctttgtatcaacataggcaggtgttcaaatggagagagcagggtggggggcccaaagcgaggagactgagtttccaaattcaacatttagctgttttgggttagggttgagttagatcaaggcttgtacattttatatactttgacagaattgtgttattggattgagaaaaatggaaggactttagggagagggagtaatcagtgaatccatctgcgtgttctcagaactcagtgaattaattccatataataactattttaaattttcagtcttagaaaaaggttcctttggtttgcttgaagaatactatccattccagttcttaggaacattggcctagacacatttgaaattcagtagactttgggcaactgaaatttacaagattaaactattacaaactagaagaaaataaaggtgatggttttaactggtctctcaatggagaaaagctttctggctataagtaataggagactgtataatgtacatgtacacatgtagatacatttcttacacatacagtatatgtaaagaaatacccagatattagatgacataaaattttcagacacatgtcaaaatataaacaaaattaaacatayacacattaaccctctggtatatttgttgcaaatatgatagacaataaatatggcaaagacctattcttatataaaaagcccatataaatcaagaagaaaaatatcaaagttgaatgtaaaatatgtagaacacatgaaaaagaaactgagaaagaactataagtgcctgtggtgtattttcaacagctctgtgaatttcattattatgtttctgaaagtgccgtggtgacctcacccacatgattgacatggtgtcccatttgtgaggacacacaccaggatctcccccaggtctgggcttttcctgggctacctttctctgagttctgtaactggccacgtatctgtgttttcagtgatttctacaaaggtgaggaaaaaaaaaacatgctgggtcaggtgtgatggcttctgcctgtaattccagcactggaggctgaggcaggtattcaagatcagcctgagcaacatggcaaagccctgtctctacaaaaaaaaaaaaaaaaaaaaaatatatatatatatatatatatatatatatatatatatatatataaaattagtgggcatggtagtagataagggatcttcatgacacataatttgtatatctctgattgtgttttctctctttagtttctcatttatttttatgatgatatattatttgatttttataaaacacctccaatactttgtggaatgacatgggttttaagtaaatcattacataaaaatatatttgaggccagatatgatggcgtatacctgtaatcccagcacttttggaggccaaggcaagaggttgcttaaccctaggaatctgagaccagcctgggcaacatagtgagatccctgtctctacaaaaaaaaaaaaaaaaaaaaaaactatttaaaaaactagctgagcatggtggcatgtgcctgtagtctcagctactagggaggctgaggtgggagaatcatttgagcccaggagttcaagggtccagtgagctgtgatcgcaccactgcgctccagccagggtgacagagtgtgaccctgtctcaaaaaaaaaaaaaaaaaaaaaaaaaaaccaacaaacccagtatagaaaatatatatttgaaaatttctatagatactccatagcatctccttgcaatttattaatttatctttataattcccttgattttgaatacctgagttggaaacagtcactgtataagtagccacctaaagagtgaccccctcacccctactgccccatcagtcactcccttttctgatttcctctacggagggaaagcccagctgttcttagatgttgcgaccactggtggccagcttggggacatccaggtagtccaatccttcctttcaggttgttggaagaattcagttttgcagtcataggaccgaggtgccycttttcttgctgactgtcagccagggctgctctcagatcctagaagctgcctgtatttctcaccaagtggccctttccatcttcatagccartaacagctcattatgcctgggatccctctgcctctctcttctgttaccagctagagaaaactatgtgcttttaaagagctgctgagattcaaytaggcccacatgggcaatctcccttctgattgtactcaaagtcaactgattagtaaccttaattatatctgcagaatccctattgccacgtaacttaatcaggacatgacatctcatcatgtttatactcctgggaattagggcaagaaatcttaggagtccattttagaaatttgcttaaaacagccagatgtcaaaaactcttagcttctcttcattcataaggttgtatttcttccactccccgatttctgtcttcctgttgtttgcagacttttgctgttctttagtttgagtgttttttttcttctttcacrtacagtgtacaatatccttttaaatcttatcctttgttacagtctctgaattcttcactaataactgtaggaagtatctctctctacctttctcttcctctcattctcactcttcaagccattggcaggagacatgtaatgatgtgagggtcaggaggccaatacaccagttcctgttctgtccctacattaagtatgtagcttgatcttagtgtcttggtctcctcaatcagtaataactaataattatctctatttaaatgaaaacacatggacacaaggaggggaacatcacataccggggcctgtcggggtgaggcaggggagggggagagcattaggacaaatacctaatgcatgcagggcttaaaacctaggtgacaggttggtaggtgcagcaaaccaccgtggcacatgtatacctatgtaacaaaagtgcacattctgcacatgtatcccagaacttaaagtaaaataataataattttctctgtttagaggataaaatgagcctatttaaatgtctttcaaaatattcaaattgtgtgatgctaagttcctaaatcacctcttgtaagattattcttccttttctgggatcccttctctcatgatatgcccaagaattcctgggacttaaagggtcagccttggtttctcttaccaagctattagagtcattactcaaaatacctcctagaagctgaggactccagacctctaccgagtgctgtggcacctaaacactgatgaacttggagatatttttggatgtgcmgcaactgcctctatgtgtgcagaatagcagggtgactaagagcaagaacttctgaataaaaaatatctgggcttgaatcctggctctgccactgataagctttaagaattggagcaagtttcacatcagtaaattaggataataattgggattgagagaaataaatcagatgtttataaaaagcttatcactgtgcttggcacataataaatgtttaataaatagtacctactgttacttttgctaagttacttttgctaagaattaacatggcagtggcaaaaccttagtcttggttgaaattacagtattatgaaaacattttggaggttaaaatgatcatagaaggatcacacagttgaattacaaattcaaaaagttttaaatactaaaatttaaaaatacaaaataccaaattttaaaaaatagagaacacacactgtaattagacccctaagaagggaagaaaatggcttaattcattcccgttataattaacagtgggcgtttaacagtaaagatgtgcttcgtgttaacattttcctttgtctccagttgctggacttcctaatacaacccatttatccaaaaatagagcaagaggaaacagaacatagtagcattgtagaaataaatagtcgttctggctggaaaccaaatggttggcaggggcattttactaatcactggtgtattgatatggcctaagctgtgcttgttggcaaaattgttacagtctgacttggtgactctttargatggggttgtaattttattttagaatatttcacacagtaaaggactaaggaagtccggtctcctargttgcaaagccatcagttagtargttagaaaattgctggagaggcttgtgtgtgtacttacaccattgttcagcattaattgagtatgtattctgacaaatggattaagaagggagcaggaaatagtggaaacagagaaatacatagaagtagtggaagagaatggagtttacatttgtgtaacttgtgggctcttcgtttaatcccctccgtaatccacagaacagatatcctccctgttttaaaggtaagcagcttgggggtcaaaaaaactcttcaaggtcatgctcattgataagtggtagagctggaatttaaacccaggtctgtgtgaccacaaatgccatgtattttccactgatttgactttagatttgaagcagaagtaaaattgggaaagtatcagtacattcagccatggcatcaccagtaggggagatgaagttaaagcaaaatttgagagaatcccttctggtggaagggctctcagttaaagccccatcmataattgctttctgttcatgttgacctttattttagactaatggtttgtttattaattaaactgtgaaaactagttttacttgattaaagtgcacagcagagtatactttgttttggtagtgattgttttttcttctattttttaaccctttaatgtcagttttcccttggagggataatatattagattaaaaaaaaacactatgacattaggggaaaatagtatagaatgctacgtaggcagaagttattactctactgtttttcatatggcttattagctggtcgttcttttttattgtggcaatatttcagttactaagatcagatccttcagttaaccagggttgtctgttgttctgaactctacttggaaaagaaagagatcaataaactcagaaacaaaggcaaacaaagatacacgtcctcaccttctcatcaccagtccactcgagagaaaccagctttcaaaacattcagtctattttttcaataccttgctttttaactttacaatttgtaacatgcttttaagtgtgttaatgagctcctttgattatcatgtttttttaatgtgagaaaaaayaggcatatgctgttcttcccaggtcttctggtgttcaaagttctatcaactaaacaacactggacttcttatcttttcagtggatgcttatgtggaggtggtgcaggatgctcaattattaaaaaatgatgtgattatatattaaggtcaaaaactgcctgatgcacatatacaccatggaatactatgcarccataaaaaaggatgagttcatgtcctttgtagggacatggatgaggctagaaaccatcattctgagaaactatcacaaggacagaaaaccaaacaccgcatgttctcactcataggtgggaattgaacaatgagaacacttggacacagggcggggaacatcacacacgggggcctgtcgtggcgtggggggtggggggagggatagcattaggagatayacctaatgtaaatgatgagttaatgggtgcagcacaccaacatggcacatgtatacatatgtarcaaacctgcacattgtgcacatgtaccctagaacttaaagtataattwaaaaaaaaaactgcctgatgttttaaagctgaattgaaagtgtatttttaaatttagatttggccttttgctaaccaagatattagattatctagaacatctccagtaatgatagaaatgtagtgttgcgaagggctttgggaatcatcttgtacaaatgcctcacattgcaaagtgagaaaactgaggtttgtggatggcaagccatcagtcagcttgtctgggatgtcatgttgtgggcccaacaggtgggtaaatttagatcaggtcacacattttttaaaaacacatttataattggactggatacttgaaaacttttaaaaagcataaaatagaccaaatccatggcttagactgttttgttctgctgatttttctcagaatttacaaaatacagaggattgcagcagatcaaaaataagcaaatacatacgaattagagccggagaagctttccagatttcctgatcttactgccctacaagtatgaaaaagcgtttctaaacatgtctttttttaatgtcaagatgagcgtggcaacctcgtgtttgttttatacttttggacattttatattccactctgctaaaggggacttggggtgaaaaaacagaaaagattttggaatctttaatactccctgtagaatcatgttatttaacttacggccacaacttgtggaatatttcagcacttgtaattctgatttgaaaagtgtttttgttttttccttccaacttgctagcagctgtaggcagtaactgacatctttatataagttgcacattgtcgacatagataactggacaagttctttagagtggcctggcacttttagaggtttcttttcctgctagacggtgtttaatcatgaaacagcccctagagggaagtgcttctagctgtctccatcacaaacaaagccagcacattggctcaaaccaaggggcctcctccagagcctgaggtcctggagccttgccccgtagcccttgctttcaaatgaacaggggatgtgtagccacctacaatctgacgtcaactgtcaggtcacacgcctcatgcctaggtcagaggtacatcacttttagacacgttgatactatcaagagaaaggaaaagaccatcaggatctggggaagggagatctttttgagccaatgattgcattttataaacacgtgaaattggcaagacattctttccagatttcacagagggatatcccatgtccaaccagggtaagacatgaggacatgagtaattagaaggagaaacattgttcataatgacaaggtggaatgtgaaaattggctggagcagaaagggggaaaaagacaagctgcartgtgagatttaggcacacagacaggcgtgtggtgtctttgtgtgtgagtacatatgtgagtgtgtgactgttcacgcgtgcacatgtgacctctagcctaccagatcatgtgaggctttattgaagagatgttctgtgacagtagggtgaccaatttgtcctagtcttaccagtctgtcccagttttagcagctggagaggatgatcggttgaaattcaaacctgagtatactgggtataattgcatatatacttcattgtctccacaatgagtttgtgtaacttgtaggttacacaaattgctggctgaagttcatccaggtcaatttatgtgctaatgttttagggattgcatggctgataacagtatttttttttactatcagatccagaaaacaattgaatttgaatttggcaaacggagataaacagggagaaggagaagtaaaaaagggatgtaaggggagagaaaggaagaaagggaaggggaaaaggcctctaagcctcactgggaaggtcctggtaatgtcactgaaccaacatgagcccaaccacaggaaccaagaatctgctctggaaatcctgyttagttgtatttaagtttttttccctccagttaccattttcttccaaaactcggcatgtaagtgaagatggtctttaaatcccagatgttgtttttccatcttccagctggagttgaggtaatattgtgatattcaaacagaaacagaagctgcattttttgggttattttttctagcagcattaccataaattggactgcagtgagtaatcttttaatcagatggaaagaggcattccaaatatgtttctagtcatctgagagtatttaacaacttctttaagaaataaagttaagcgttggtgaaagtggggatattggtggtctgtttaagtgaaatacttttaaactttttgttttaaataatgtaggtgtgttttattacaaatagaatgtacttagtatgaagaatttataaaatagagataaccaaaaataagacaatagaaattattcatactccatcatccagctaactacaattttgtttcagccttttaaaaagtatgtgtatataccttttaaaatgtgtgtgcatatacaaatgacatcaccccatacatgtgattttgtaagtagatttttaaaggtttgctctcttttgttttgagattgctttgggtattgcagcattcctaatacaggactaagactttcacctcaagatgatagatccccacccaggtgcattggtggtggtttgggaagctgtgaccaaaactccacaaacctcgcaaatcraaagctctgagaaaagtgtttttctggctctcrggacttgctgatgactgcgcattggctctttttgcttcacgtgaccccttctgtccccaccaaagggagttctgcctggggacctttctagcgctccagttgccttatggcctgggagccctcagcatctttctgtctgcctgcctggaggaaattaggtggggacagtgaactagagcytggcccagctgctcattccccgaggcaggtgagcatgccctgggtggaagcctgcagcacatttttctaggagctgagttgctcgttcttcatctttcccttatcccctagcacgtgtgtcttaggcagcagtcccaacctttttgacaccagggaccagttttgtagaagatcatttttccatggaccaggtggggaggggggtggtttgggatgaaactgttctacctcagatcaccaggcattagatcctcakaaggagcacgcgatctagatcscytgtgtgcccggttcacaatagggtttgtgctcctatgagaagctagtgccaaggctaatctgacaggaggtggagctcaggcggaaatgctcatcgccagccatgcaccttctgctgtgyggcccaatccctaacagggcacaggccagtgcctcgggtctgcagccctggggttggggacccctcttctatgggacatcattctgcctgttgtgggctgtttctccagtggtccctttcttccagggcaacttcagccttcttgagctgaatatgacaccagccttttaaaagctttccaccttgttctatccaggtctggcagtttgacccaagaactgtggggattggggccctaaaggactctcctgtccccacccaggggtggcttcacctaggctgagtggcagaactgatgtttgcttctgggttcttgcattgtgcccatgactgctgagccttgggccaactcttttgtcatctctgctctcagaattactcaactgagctggtcatggttgctcacacctgtaatccccgcactttgggaggctgaggcaggaggatcacttgaggccgggagggcagcatcgtgaaaccccatctctacaaaaaaacttaaaaaataataaaagaaaaattaaggaatgactcctgtagttatcagtaggcatcatagtgtaatgatgactgtgtgggtttgggatcatgtcccagttctgccctcatcaatcacatgaccttgagtaagttactttcttctttgagagtcagttttctcccaaactgcagtgggtatagtaatggtgactaccatgtgtggtgattataaagatgcagtaagatcgtgcacgtatgccactttgcaaaccatttggcttactgtcaggagtcaatatattcattcttaagcaagacattctccactgtctaagactattcaacacaaggcacactgaaaaggtctatacaragggactttggctgttcrgaatgtgaaggggaaagttgcagggaatgagatttaacctaaaatagggcttacggttatgaattttaactatccacattccctctacccagtgaaaccatcaactgactgcacgttgccrtggactgcaggagggacttttttttttttgagacagagttttggtcttgttgcccaggctagagtgcaatgacacgatctcggctgactgcaacctccgcctcccaggttcaagcaattctcctgcctcagcctcccgagtagctggggttacagtcatgcgccagcatgcccagctaattttgtatttttagtagagatggagtttcaccatgtcggtcaggctggtctcgaactcctgacctcatgtgatctgcccgccttggcctcccaaagtgttgggattacaggcgtgagccaccgcacctgggaaggacttttaagcagccctagcatttgaaatgggacgtggtctgcagagacggggtgcatttcttttctctgtcatctttgtgcagttgcctttgttcactggatcaggtccctgaaaatcttctttcccctcttccctcctcatgcctgcagcccagttccggaaccaccttgtctggcactgattgcagccagcagtggtgccacctcactgctctatttctgtgggttttatttctatcctgggagcgtgtgtacaaataccttcttcccctccctcaagcccaccctggctctgaggtctccatcctcttcttatggtgctatcgaaacccagatgctctcctttttctcactaccttttagattctccatcctaattgttgggaacagcagtacaaaatgagggaaaatgatacaagtgaccaaaagggtgatgagactttcaaaaacctgagttccagaaggcaccagcgtcagcaattcagagtgttttggatcttaagccatagcaactagtggaaaccttgtggaaacctcagcaggaccccccatgctacagtaggattggtgctggttgtgtgtgtgtgtgtgtgtgtgtgtgtgtgtgtgtgtgtgtgtgtacacactggtaaatagggctcttttatttctagcactggtctattccgaagtttccgaatatagaattacatattacagcagggctgcttagcattcttgtaacattctgaaccccaagattttctgtgttatattctcccagatccctcactttctttttccatggaaaatgttctgagttgggggattgcagttaccaccacgacacgtcccaaacatttcctgagcatctcctgcagatgatgatgaggctgaccgaattgtggactctgctttgttccaaggcagtggacaaacaaattacaccttccacttacagaatattgtactgatacttcttgaaatgcttgcacgtatattacttcattttagcattggacagctctttgagrcagatgagtcrttattacctccctttagccaatgaagacaataaatttgagaaggttactcaaagaattattgactatcagctatgtgacatatgggatattaaaaggcaccacacgaacttcttgcactcatgaaacgtgcattctagtggaagaggtaacaataaattaataaattcaatgtaatgccagatagtgaccaatgctatggagacatgtattttaaaaagcaggcattttaagaagatggaatatgaccagacacgctgtgttaggtgggcaggtctacctaacacagaaggtctctctgaggagatgatatgtgagcagagatgtgacaagrggagagagaaagctgtgtggctgtctggggtaagagcatctgcactgaggaaatagcatgtgcaaaggtcctgtggcaggagactggctggggccttcagcgtttccctgctgagaagctgcatcagtagaatgaagctaggtcagagagcaagccagggccctacgtgggttaggctttgtgcaccaccctaatgattgtgaaaaataccctgaaaaggtttttgctctgaggaggaggacttttgagggttacctactgggaatgatatcatctggtttatattttaaaaggatccttctggccactstgtagagaataggcyggaggggcaaagtagaacgaaaaaggcatgttaggtggctgttgcagtggtttagataacagatggtgatggtttagtccacagtgttagtggyggaggtggtgagcagattgggtwctgatagattttgaagacagggcaggcagggtttgctggtgtcatggaggcaggtgtccaagaaaggcaggagtcagggggaccctgagctcagaagaattcaagaagtcatagtcatgttgtggttggctgaagatagatctagactttctgaytggcccagatctcccggcgatctttccagggccactttgagaaaaggcagtgagtagcaggggtctccgtccggcttggcacgttctcyttgaggccattgtgagtcctctaagaagggactctgtctctgtcaacccacctttgaccacagacctttactgatcctttctgattgataaacaatagagggaggaggttgtgtgatcttttagtttatctcaaggatatcaaaggggaggggaagccctaactgaatatctagctaaataggagataccattcagtctatytgtagtgtattttaaagcctgtttcatgtgcaaatgtgaactacacagaggtaatctgataatcccaaaagggtaatctgataattccaaaagggtaatctgataatcccaaaagcttattaacataccttgtagataatagatatccagttagtatttgttgcrtttggtgatttgtggttgaatattgagtgttggtattttctagaaccttacattcaattctcttccctatatttgtggttagagtcacacttcactttcagatggaatgagtgtcagtgtttccagtattttccagrtgaggaaactgagatgggaaaaagggaaaaggtaggcgtttaacaaaggcatttcataccactggcttattgtcgatgaaacaggcagaagaatcttcctgctgtatcccagacattcactatcgggattcacaccctgttgtatcattgaaaaaygcgcagacttcagctggatgaggtgctcatgcctgcaatcccagcactttgagaggccgaggccagagggttgcttgaggccaggagttcgagaccagtctcggcaacattgtgagaccccatttctacaaaaaatattttgaaaactagctgggtatggtggcacacacctctagttccaggagttcaagcttacgtgagctgtaatcacatcactgtgctccagtctgctcaacagagcaagaccctatctctaaaagaaaagaaaaagagaaaggaaagaaacaatgaatgaaaatgtgtagactttaattcacactgaccttctaagtttttcttaggcctttattgacattgttatgtcacaacaaaatctggccatctctgagaacttataaaactttagtggttttaggccaggcgtggtggatcacacctgtcatcccagcactttgggaggctgaggcgggcggatcacctgaggtcaggaattcgagaccagcctgaccaayatggtgaaaccccatctctactaaaaatacaaaattagccaggcatggtggcgcatgcctgtaatcactgctactcgggaggctgaggcaggagagccactkgaacccgggaggcagagattgcagtgagtcgagatygtgtcattgcgctccagcctgggcaacaagagtgaaagtccatctcgaaaaaaaaaaaacaaaaaccaaaaaaaaaactttagtgtttttcagagacatagtgtttccccaagttgtcatttgaagtacacaccccttcttccaaccacatgggcgtcagcaactccactgtgatcaaaaggcagcctgtctgacagaatattccccagtcttcttccctatcggcattttgaggcagggacacactacagcaaaatcagtccagacccttatataaaataastcttccgtccaccacagtggccaatatttccttttcctaccttggccctgcctgatcacacacaccagctctgcagccagaggacccctcatgggtgaagtgggctccgggtaccctgtgagttgagaccacggtcccccaggagcatgcagtggtgcctgagggtggttggcagtggtgatggctgtgttatgtgtccttctctctctgtctgcgagtctggttgggtggactttgtccttggttcaaaaagctctcagggatcagctccctgttctcttactcacaggtcgcttctagtcaagtttcttctgctgtaggattcacgttcactttctcctgttctgactgtcctctgtggcatacacctttgatgtattgatctcccaggtggcttcctaatcctcagggtgctgcagaggtcagaggggcagtgtgaccacacacctggaggggcctggggaagtgccttttgtcagcccaggtttgaatgacctgcaggctaattatgttacttacgacttatgttgcactgggctccttaatgccaacctctgggcgtttgaaggttataaaaagagaaaaatcaaaactcagaccatcagttgygctgattactaattgctttggtgggagattttgtgggaaagacactaatagtcaaaggtggtttgaacaatcacctgtgacttaacctcattccgacttttcttttgactacttattgccagcaccagacaggaagagcaaaaggcagagcaaagcgtctgctgcaggtgaatcaagatgtagcatgatcttgtcccaaatatgcatagccacacagtcayctctcrtgggagcacagtcctgtgtgtttgcctatccacgctgcatggctgattcctttcttgatatatgcttcctgtcttttgtagggggaggtgctctttggcatctccagacagacccctctccactcctctcctatctcttgtcttcttttgcactatgagccatgatgttttagaatttccatgcctcgttgaggctggaatttggtacagatccaccacaacccagcatcaacctggaaaccaatgcagctctccttggaggcttgctgcccgtatctacagctttcttcactttttccccaacctgcggaaaggcctttttgttgatctcatcaatctgtgatttgagatcttgaaagaaccaagatcttgtgacttggcagggggagccacccgccatgtagccccaccctgtgccctccctgaccccgtcgccccctgtgcggacctgctgcgcttcaggggaaaacagcacgttwagtgagcagtttagcttggactgaatccggaggcaaatcaagtaactttatactgagatactctctccattgtgttctcaggaagatgaagtgaatcaccagagcaaagaatgtgctctctggtgctacaccaataataaagtacaatgttttgaattagaggagggagagagagtaactgagaaacctttggctsgtcactttattgttccttgtggctcccccttcccttccctcagatatatacttggataagaatttcsttctccagcccagtatttcctaaactcaatcctgcagtaaaatgacaaggccgtgttagacatggaaattattgcagagcaacaaatccaagattgttatttcaccaaaggccccaggaagtggagatgaagaactgtgagagcataagcctccagctcaacccaaatgtgtttttcttgccccacttgttaattagtaaatcaaaaccaaatgaaaaatgcaaataagtgcatgccacaaatctgtcatacttgaatgtttcccactttatttctgtctttctgactttatcctgtccatcattctcgtcatctgtgagtaaaagcacccaaaagcaccttgrtagattggcgtcaatttgggtcttatacataaaactgcctgacaaatgacagcgttcaggtagggattatttagttaacacagaagttatgtgatttatattttttaagaacagaaagatgggagtgataaggcactatttttcccactctttttwaagtttcttacaggtgttttctgtttttgttttgttttgtttctaaatcatacattcaaatgcttgagcctggtgaattttttgttagcttgcttgtttttggtcatttaggaagcattgcctattcagatagacatttacaatcaaatagggctgaacacaccagcacagctgttgctcagaagggaccaggagggctggttgccccagaaaaggaaagatattctccaagaacagtcctgggagaagcattttgttgtgtttttgcaaggaygtggggatccaagttttgtctattaaaggaaaggaatggccctgttctgtttgtgtgttcagagcgcacggctgtgctcagagatgttcgtgcaccctgcggtggtatttttccattctcttgtttagaacccctgggcatttagacacatgtcctgcacacagctcagcatctgtgatcacatggtggtttagaactgaggtcttggttctaaaccaaggaaagattcaagtgtctgtcccttgctgcttccaggccaggccagccagctcttgagaagtgtggctccttcaggtccggatgggtggctccctcattcaacagacatatactggacacctgctatgtgcaggtactgtttcgagcacttggactgcatgacgcaacaaaacaaaactccttgccttcccttgtggggcatacattggaggggagtttagccctcagcaggagcatgcctgttttctttctcactggctaccgtttcggtgttgttgaggtgaagagggacagccatgtgcagatgcccccgattagggacatgttctgaccacggctgcccagggctcaggccagcctgggcccatcacgcggaccagaggttggacggaaccatgagaaaagactctccccgtgtcccagggcttggcacagtggtgctgtgccgcgaataataggtcatctgatgcggtataatttaataggaatatgaatccccagtaacccggggaaccaaagcaaggaattggcctctcagttacttttaactttcaaaacttgaacrtttccttaaaccaaatagccccatcgtcatggtcagaagtccactgtggagaaaggcaggatttagtgtttatttaagctgccaccccatgagagaaactgttgcccagtggagtttgactctcaatttttcaaggaatgattttccattttgtggattttttatgtatgtcttctctctctctctgtctttccttccttccttccctacctccctccagaaatgttgatgggagcaggaaaatttattggccaggtaagggtgtatatgaagaaaaaccttgatggtagggatcctgataagtaaggctcttaaaaagactgcagttagccaggcacagtggctcacacctgtaaccccagcactttgggaggctgagtcaggagggttgcttgaggctgggagttcaagaccagcctaggcaatgtagtgggaccccatctttacaaaaaaataaaaaacattagctatgcatggcagtgtttgcctgtagtcctagctactcaggaggccaaggcaggaggattgcttgggcccaggaggtcgaggctgcagtgatctgtgattgcaccactgcactccagcctcggcaacagagggagacactgtctcaaataaaaatgcaccatctggtgccatgtagcactgttgggcgtctgcagagcattttggtcacagggtcttctttgcctcccgcctcttcatatgtagatgttactacsccacaagcagagggaggttggtcaccaaatccggaaacatgggcaaacccacaataaatgggttattgatactacattccagtatacagtaaratactcttgtctttgtttccagattttatggccactctgtagaagcttcaagggactgaaaataagtcatttgatgcagctaaaaagagacattgctgccttttgatctcacatcttcagcctgacggtcctgtgttctcttcatatcagactcctgactttcagaaaagagccaatcaccatttgactagggctcatcacttttcaactttttcaggatttcttttggcaagagcacccccyctctctctcatgtgagctcactctctcctstctctcatatccgtgctcctcttcctacagtgctgacctctgaggtatccttttttcttttgactctcatcagtctacaacctctgtctatttctccttctcttagtctctctgtgactcccctggattaaaccttgtttctgctcagactcagcaaatattcattgtgagcctactatgtgccaggtgctgtgctgggcttatcactcagtattcactgatttccccagcctctttctgctcagaggtcctacatagccttggggtgagggtgtttagctaatccccttgtgtttggggtgggccgtaaatgagctctgatggaccatcctcagcccctccagaatgacctckgaggaatcaatggctgagaaggagagatggagagtgtattagtccattttcaaattgctgtgaagaaatacccaaggctggataatttacaaagaaaaagaggtttaatggactcacagttccacatgactggggaggtctcacaatcatgatggaagrcagaggtacaccttatatggcggcaatcaagaaagagcatgtgcaggggaaatgccctttatgaaatcatcagatctcatgagacttattcactatcacaagaacagcacgggaaaacccacccccackattcaactgtctcccaccaggtacctcccacaacacatggggattatgggagctacagttcaagatgagatttgggtggggacacagccaaaccwtatcaaagaggaagagcaaaagagaatggaagaggtatatgccccaaagaactgwaaacacgtactcacatacaagtacatgcatgttcatagaagcactattcacaatagccaaaaggtggaaagagtccaaatgtccatcgatggatgaatggataaacaaaatgtggcatgtatccatacaatggaatgtcattcagccataaataaggatggagtgcagacacacgctacaacatggatgcaccttgaaaacatgatgctaaatgaagccagtcacaaaggatcacatgttgtgtgattgttttcatgtgaaatatccaaaataggcagatccagagaggcagaacacagaatgatggttgttaccaaggccgcgggggaggaggaaatggggagcttttgcttcatgggctttgtgtagaggcgatgaaaatgttttggaatcatttagaggtagtggatgcacaacattatgcatgtactaaaacgccactgaattgtccacttcaaaatggtgaattttatgttatgtaaattttacctcaattgaaaagaatgaaagataaaggaaggaatgtgttaggggtctattgctttgaattaaggatgcaatttagaaatctggcctgactttcctatgcatggtgaccttgtgatgtggcttgagtataattgaagtaatttgagtagattaatttccttccttggcttcttaaaatttaacgtgcttgaagtttgcatcctgaatttagaatgcaaagcagtatgtggatgagtattctgggccaatagtgctgctgcttaaaacaacaaacccrgacagatgtgttcagcaggttctccagcttagctgtttgcatcttggagaactgttcctgggtcctggggaaagaccactggggstggggtcagaagcctgagttctgttctgcctccttatgcccatggaggatactgcagagctcaggaaagagcacgaagcaggacccagccctggctcacacgtgcattcaacacacattcttgggcaccatgtactaagccttctatgggatatatgaaggtgaacatgacatggaccctgcctttgagaggcttgcagcccagcaggttaaggtagacacgcaaayagctgatcgttttggtataaggtaggggtttgatgctgaagatcttcatgggaccttatagaggtctagagttgagggtactaaaactacctgggggtgaggtttggtggaagaaggcaactaaggaaagcttcctggattcaatcttaaaggaagatttaaaatattgctgaattactgcaataraccgaatgtttgtttccacgcccctgcaaattcatatcttgaaacctaacccccaaggtgatggtattaggaggtggggcctttgggaggtgattaagccctcatgaatgagattagtgcccttattaaagagaccccagagagctgcctcactgcttccaccatgtgagggcacagcgagaagacagccatctatgaaccagggaagaggccctcatcagcaccttggtcttagacttccagcccctagaactgtgagaaatacatttgtgttgtttgtgagccacctagtctatattttgttacagcagcccaaatggactaagacaattacccattgcgtattgcaagtaggtggttagaggagcagcaaaacaggaactgttaaaactgagtgaaaacatgcttacgaagagtttgtttgttattttgcaccaaagcattaataattagatataagaacactgatgtacctacccttgttttatggctttaattatctaggatgacgtaggggcaccaagccttttcaaaatttgggttctgtaacagtctcaatccaggaagtaagagaaggaaagctcacttccagggcaagtatattgtatgaggaaggcgaagtcacgagatcctgggcagtgtggtgggacaaatagagcaatttaagaccttcaaaggtagagtttaaggtggaaaagggtgagggacgagggtgggaggtggctgtggggtacaggctgaagggctcttggcaggcctgttacaagtcagacttgtggccctggtactagctgcagtgtggagagagtggatggacatggggcaaaatgcgaggcagtgggactgaggctctgcatgagggcagtggtagtgaagggagtgggacccactgggtttgagacacttctagaatgatgctgtccagtagaactctctgagatgatggaagcatccaacgrtgtgctctccaatacaggagccaccagacacttgtgactcttgaacactttcaacgtgactgatgtgacaggaaccaaattttacattttaatttatttaaatttaaatagctccccgtgsctgtagcttctatattggacagtatagttctagaaagtaaaagcaacaagagttgatgattaattgggcaatttagggtggcagggtagacagagctagagacagaggggcaggttaattgtagaggggggaaagatgagtaccactgtgtgcatgttggctccaagtgcgagagacatctgggggaagaagtatgcccagcagtaagaaacgcaagcctctttggagaacgctgggctggagatagaaatttgagagctttcactgttaactatsataggtgagatcataaaactgagtagcacagggaagccacttcactgcttttggcctcagattcctgttgatttgatggtggtcataatatttgctctgcctaccttctgrgactgttctgaaaaattcagatgggattacgtgcatgaaaatgctttgtaaactcttcagacattaggcagagtttataacrtctttaggagtgagaggaatgtgtcccacatgttattttccaaacatgaaagataaagacttcaaattctggaagtattgcagagtagatcatctgcagggcctcctgctaaaaaacgacaagatccaggataaacaaaagcaaacttgcctaaagtatgagtgtcacgggctcagggacagctttcaggactcccctgtgggagtttccatgagcaaacaaacataaaagttgggtttctgtgaatgcaaagaccaacactagcgctgatcctgagaccagcttggggtctgggacagggtagtggggagctgtccctgaggttcccacattaagccgggactgtcaaagggagagaaagtggttctggctggtggtgttcctcacaagaacaaatgctttttttttttttttttwwargaaaaaaaaagtaacccaatttaaatattcaggatgaatttcaattaaaaactaccaaaaaatcaaaaatcttcaaacacacaaggaaatacaccaccaaaatgtaaagtgatcatcagagtgacgggagagtaatttcagtcccccaagaatttcacatattggagaacaggcaccaagttagaaaatgcaagacaataatatagaaatacagaaagaatgatagtataataaataatagtaaatatatgacaatttaccattgaaaatgacagcacaaaccaaasaaaaagggagcaatttgaattttttttttttwaaatcattgaggtggaaaaactagggtgtggtgacatgcacctggtgacatgtagtcctagctacttgggaggctgaggtaggatcacttgagcccaggagttcgagaccagcctgggcaaaatagcgaggtgccaacccmaaaaaaataagaacaaataaacaaaactcactaatagattatttaaactgcacattaaacagtgaaggagagaactggtaaatgtgtaaatagaagatattacctaaatctagtccagagatcgggagataaatggtgtaaaatcagtagctaagagatgtggacattagaaagtctaatatatacctaattgtcatttttgaaggaaactctaaaacaaatggcagagaggccataattgatgagtgactggctgagaattttccaggactgatgggagctaggaacccacagacagatgaactacgacggcatctgagccgggcagaatgaataaaaagaaacacacaagtaggcacaaaacactgtagcaaatgcagygtaccagaagacaatggcattgtcaatgggaccacagaacccagatcacccgggaaggaatgctttgtttgtttgtttgtttttgagacggagtcttgctctgtcacccaggctggagtgcagtggcaccatctcggctcactgccagctccgcctcccgggttcacgccattctcctgcctcagcctcccgagtagctgggactacagacacccgccaccaggcccggctaattttttgtatttttagtagagatggggttagccaggatggtctcgatctcctgaccttgtgatccgcccaaagtgctgagattagaggcgtgagccaccgtgcccggccaggaatgctgagtctgaaggaatgaatacaggctgagagttgttcttagtcamgtggaggatattgtgcctgttgttcctctgcagtggaaatcaggtgtgggaggatcttttgttctctctttaagctggcctatctgtgttttgactggagatgtagcagtttttctcaagtgtgaaaaaaggcatgttgtgtagattgatttttactaaatgtggtctgattgcttctttaaggcagcccttgtaagggggcaaaaatgcggttatttgacattaatggaactctatcaaggctgtgatcattcatttgaaatctttcttcccaacgcatgtttattgactgaagtgcctgagtgtgctctcatagaagccaaggtccactactaatttccataatgagacatgtatagtggtagctactgagcatctccccaatttttttttttctttttttgagatggagtcttgctctgtcacccaggctggagtgcagtggcgtgatctcggctccctgcaacctctgcctcccgggttcaagctattctcctgcctcagcctcgcgagtagccgggactacaggcatgtgccaccaagcccttctgactaacttttgtatttttaatagaggcaaggtttccccgtgttggccaggccggtctcaaactcctgacctcaggtgatctgcccacggcctcccaaagtgctggaattacccgtgtgagccactgcgcccggcctatctccccagtttaaagtgaaattaatacctatatttgggtatgaaaatggttttaacatgattttttttttaaaaaaaaatgactattaaccctttgtgctaataatatgtaggtgcctagtgtcctaaagctctttacgatacatgtactggatatcttcttaaaaagtcatttggaataaaagggtagccccagagagttttattgtggcaacggaggatttctggatctggatttgggtggtggtaacatggatctatacatgtgataaggggtcatagaataatacacatacgtactcaaacagtgcttgtgaaaactggtgaaatcagagtgggtgtggtctagtaaatgtattgagccaatgtcagtttcctggttttgatcttgtacttcagttatgtaaaatgttactatggggggaagctgggtgaagggtgcatggggcttctctactgttttttcaactacttgtgggactttaattatttacaacacaaaataaagtttaaaaatgtcatttggagcatggcaaccagaaaaaatagattattcttgatatttgtgattcttatagaatatgaatacaaatacttagaaatatttgatgaaccctggagggtaaagtcttttgtttcaccttggtcaaaagtgaattggaaagtttagctcagtstttgtattacaattcaaggttatatgcttgcaacatgaaagtcaaaaggccgctgtcgttacaacccttggaagtccagccagaaatgtccttgttgcctaaaattaaataagcttgtgccatagaatgaaaaattgcttacattagtcaatggaatgaccatgtttcaaaaaaaatttcaagtttggtgtgtaactgtaaatggaaacgtgaaatatttggaaaatgtaggatttattgggaattattgtaattgccttaactaatctagactaaattaaccagagagtaagtccagttagtgagagaataatgaatatgtgattacttttaaagtaaatatgttaaatcgattgctctgttctttttcctctctgttgttcccctttttattttatcttttgtgtttgtagtttgagataggcagtgtctttgtttttctctggacaattttaattgaaataattcagacttagataccattcagaaaagatatatattaaaatatctttattagcatcaaacaaagcagtagtgagaaaaaaagaaaaatctttagtaagatcaaggaaaagtgaacgtacaaattcggatgaaaaaggagaaacaaccatagatagagcagagatgaaataatgagaggattctatgaaaaatgttatggtaatagttcgctgcaacctggatggggttggagaccattattctaagtgaagtgactcaggaatggaaaaccaaatattgtatgttctcacttataagtgggagctaagctatgaggatgcaaagtcaaagaatgwcacaatggactttgaggactcgggggaagactgasgggggcttaggcataaaagaccacatattgggttcagtgtacactgcttgggcgatgggtgcaccaaaatctccgaacccaccactaaaaaacttacccatataaccaaacacgacttgttcccccaaaagtattgaaataaaataaaataaaatttaaaacaaattatggcaataaacttgaaaaattaaaaatggacagacctctagaaaacagacttaaaaagaaataggttcaatatttctatgtttaaaggaaaatgagtaatttaaaatgtcccccaaaagaaaacaccagaatcaaatgactctacagataagtctgccagattttcaggaagtatattacttcttgaaaagaaggagctgaaaggctccccagcttattccaagagaaagtgcagtagttcccccttatccacggtttccgtatccacagtttcggtttccacagtttgctcttgaggtctgaaaacagttgagtatagtatagtaagwtattttgaaaaagagagagagaccatcttcatataacttttattatagtatattgttgtatttgttttattatcattaatcttactatgcctaatttataaatttaaatttattttcctaggtatgcacgtataggaagaaacatagtgcatatagggttggcactattcacggtttcaggcatccattggggcccttggaaggtatccccctcggataagaggggaaaattgtatracttgaaaccacacaatgccataggaaatgagaacatcgccagtctcacttacgaactcacacataaaaattccaaatagtaaatatatgaaagcaaccctctaaactttctcattaggtccaatgctttgcaatgtgtctcttcttttcctattatttaatcttaatagtaccgaactggactccaacatcagactgaaagtcagagtccttgccgctctcctgattttaaaggcagtgatgtgaatgtatcaccattaagaatgtccttagctggctgggcgcggtggctcacgcctgtaatcccagcactttgggaggccgaggcgggtggatcacgaggtcaggagatcgagaccatcctggctaatacggtgaaacctcgtctctactaaaaatacaaaaaattagcctggcgtggtggcaggcgcctggagtcccagctactcgggaggctgaggcaggagaatggcgtcaacccgggaggtggagtttgcagtgagccgagatcgcgccactgcactccagcctgggtgacagagcgagactctgtctcaaaaaaaaaaaaaaaaaaaaagactgtccttagctgtagggatctttttaatatacactcattatcaggttaatggagttctttctatgcctggtttgctagtttaaaagagacttaagaggtagaataatcaagtgtcatgagtgaacactggctcctgatttcaacacacaaaatttagacagttttttagatatttgaggaaatctgatcactttaacaattttattattattttacagagacagggtctcactctgttgcccaggctggagcgcagtggtgtaatcatagctcaytgcagcctcacactcctgggctcaagcagtcctcctgccttggcctcccaaggggccgggactacaggcaatgccactgcacctggctgctttaacagtttttaagtgtacggttcagtggcattaaggacattcacattgattgtgccactatcaccacttcctctccagaactttttcttcttcccaagctgactatttgggtacttactaaacctgaacttcccattcccctctcccatagcccctggtataccattctcctttctatctctatggatttgactaggcttgctacctcatataagtggaattatacagtatttgtccttttgtgggtggcacatttcacttcacacaatgtcctcggggttcatgtggtaccatgtgtcagaatttccttccgttttaaggttgaagagtattccatcataggtctgtaccacattgtgtttacccattcatccgtcagtggacatgtgggttgcttccagcttttggctattgtgaataatgctgccatgaacatgagtgtacaaatatccgttcaaggccctgcttttaatgcttttgcatatatatccagaaagataattgctggatcaatgctaattttatgtttgtttgaggaattgccacactatttgctacagtgctgcaccattttgcattcccatcagcaaagcacaagggttctagtttctctaaatctttatcaacacttgtcagaaaatgcccatacttttaatacatctctatgaagtagggctgaagaaggagargagttactggtcaccattgcctgcacagyggccatgcccacctatgatayatgagccattcacccgctgacaggcagacgaccctccacacaggctgccttgctcttaaccataaccaggcctacrttttccatgtgagcctgcctgtacaacttcatcatgtctctaaaaaggaaaggaaaggaggagaaccgaacagtgtatgatttagtgatacacacatgcagtagaattgttaggttttaaagggcaggggagtgataaacattattcctgatgtgaggtacctttggagagaagcagttgaagaggatcaggaaagaatacaacagtctcagtcactttctggttttcaggttgggtgatggtttccttggtgctttactaktatgcttcattacctccgtaaattgcatacatccttttgtatgtataattacataatttacattttaaatcttaaaccagtgacttttattccttaaggcttttgttcctatgtgttggccaaaggtctaggacaggwgagaaatttccactgggatrgtctgaggcagaaaggagagaaggaagtgagttttataaagcttcgtttgttcagtatgtcttccctattttatttagtattaaaaagacttttagaaatgcagtggtagagttagagcatgcagtttgttgttttgtttttattgtccttaacaatggcaagcagaagaagcagatagccttgtgtaaggtcattatcatttcaaaaactgtcttgactggtccttgaaatttaaaaattctaggaattattgcctcagagaacacagcgccgcattcaggagccagccaccaaggctgatgctcagtgagattttgcttactggcctttcacagaatgcctcactcgaattgaaaaagctaatttagagggagcagccgtcagtcctatctgtagactcgtgaataaatttgaattactcagcaaagacatactccaagctccgaggacctggattctcaaataacagccaatgattatcacagctaacattgattgggtattgactccgtggctttggctattttgtatagattgtgtcacctaatctttagaaatgttattatttcaatttacctgatactgaaactttattatttaactcagcatcatataggtaagaaaaaagctagaattcaacaccagcgtctcagtttgacatgtcaccaacactcttaactacgacttaattgtgactgcatctggccccatcatcagtaagccaaatgctaatgggtataaagtaggtactgagggctgaatttggaactcagccctctccctttctytcccattcatatttcttgaactgtctggcatttgaggagtcttgactcatatagcttgaattgctgcgctcattggaaacattactgttttaccattgtggcgttcaggtgcacatacaggcagtaacctaattgtatttatttcttatatccctatgagacattagcaaacaaactgtgtacattcaatcgcaggcaaaagagtggggggaacggaggagttctgagcaaacttcagtgatcagtggctgaggtatgatgaggagagtgaggaaggtggtacagctttgaggtaaaaggcacaggagcagcttagaagaccagacggtaatgggatgggcgtgagagtttaaaaggttgtgggtggcaatcagaggctcgtggatgacactaaggaagccgtgcatcttttctaagaaggataaaggaaaagaaagttsagagtacttcatgatattgttgttttggtagaggaaaaattggaaaatccacatatgaggcaatgggttctattttacattgtaataaaakgaatgctttgaactgtgcttctgttttctcatttttagattttttatctcctcacatcttcaaatctgtgagcatttgccaagattcttccttagtcgtacatatgggctcccagcattgcacaacacttatccttaaaagttacatgcaatttatccccttcctggcatggtcagacttcccttytctctcctccctcctcttttcctcccatccccctttcccttgttgtgttagttgcctattaccgtgtgacaaatcccccaaaacatagtggtttaaaacaacaacgagttaccatctctcacagtcttgtggaatgaccaggttcaactaggtggttctttcaaggcctcttgtgcagctgcaaccaggtggtggctggggctgagtcatgcaaaggacatccaagatggcatcttcataacacttctggtgcctcagctgaggtgcttggggacaggctggacagtttgtgtgttctgtctctctcttctcccacccacccccatctctgttctcctctcccacccctctgtgtagcttctctacatggctagcttgggcttcctcacaacatggaagtttcagggtagtcacacttcttagatgacagctgtctttcctcagacaagcattccaagaagtctaartggaaggaagttcaaagcttatgacccagccttggaagtcactcagcaccactgttgaagactttcgttctgttggtccaaaacaggtcatacagccagccacagagccagctcagagccacccgaagggagcagaccacccacgggcatagatgctgggagatgtggtttattgggaatggcatacctctcagaagaccagctaccacatttctcctttgttaaaaatgtctgtttctctgctccttataactgaaatatcttaaagttactgtcttatgtcttatttcttatattttttctaaggaagtttattgaaagacttctttgaagaattcttacacatgctctccagcgaatcttaaaatattattttcatttagtaatattacaattaggcctccaaaaagctctatagagaaaagctgtgtgactgttttttagaaagtctctttggaaaatcagatttgattcactttttaaccaacgatgataacatatcaaacttaaaaggcagatcggttttagggaaaagtgatacaccgtcctgtgtgggtgtccttgagtgaacttcccaacaatattgcttttcatgcgtagccactaattagaaaacctgctctcttgttggggctaaactgtggtttacttttctggttggacttcttcttgcttatattcaagcttttacagaagccaaagcttattcttttttaaccctcaaaataaaaaaaaaaaagaactcgaatctaaaaaatgtgttgtgtaattacatggcagtttcagaaattctttttaaaaaatcttgtacctatagatggcttaacttagcttctgcaaatgccattgaggacttagattcttctggggagttagctcttttttttcttttcttttctttcttttttttttttttaagaagctaaatctccaaagcttttctctggtaattatgaaaaacaacatgtgtaagagaaagtgggaagttggaggtggctaataatttgatattttttctacccacaaaccttgggaaaactctgctataaggattaatttgctcatgagatttcactttggttgccattaaggaaaaacgaacaggaacagcaaggcagaagtgtttcttgactctggggaaaagagtcaagggtttatggtgggaaacagagcactccttttttccttttacagcaattataagtgaggcatctgaagtttgatatcacttttctcacacaggactttgtatagacacctaaaatctgactgaaaaatcatcagtaattgcaatttctcatttgtcttcatgcgggaaaaagattttattttaaaaacgtattttttctagcttcattgtggtgtaattgacaaatattgtatgtatttaaggggtacaacgtgatttgatatactaatacatatacattatgacatgattaccactatcaagctaattaatgtgtttatcacctcacagagacacggctttattttttttgtggtgagattgtcccagttcctggtaacctccattctattttctgcttctgtgagttccacttttttagattctgcatatgagtgaggtcgtgcagtgattgtctttctatgctttgcttatttcacttcacataacatcctccaggttcatccatgttgcaagtggcagaagctctcccttttttaagaccaaatacaaatgcatttatgcacataccacgttttcttcattcatctttcagtgcacaataggttgattccatattaaaaaaccttttagattctatcctttccccccagttttttttttttttcaatgtaaaccatgagaaaatagcagtggctctgctctgttggtgatttccttccacatctttgtggcatctacatgcagattaaatgggggttccagcaacttcccagtgtggagagtcccccactgctcagagtcgtggagccttcaggttctaccagtaggaggaaggcataaatatttccactgaacaggcaaaatgtgaagaccctttacacttcaggcccaggcaaaatgctttgcccaccccccttccccacccgcagccatccccaccaatgttcagctcagggctgcccttggttatgtcaactgctgatggtgacacgtgaaccagcctgaggagggaagagtagccgggaggagagggggccaggaggacataacggggccaggatgggcggacgggttcttcttcattgcttcattaattctcacacctttttctgtgaagtcatactcttcccatttttgcagatgagaaaactttaaygcaagagttttcataacttgctctcatgcaaattcattcaaataagtatataagcagaagtatttaaactaaataaaatctaagaattttgcttcatcttgggtaacatgaaggattttcatctcctcctcatgggccagccagtggtctgttcactaccygatccccgtagtaagccgtgggtaattggtaatccacctatgaagtcaaacggggaaactggtgaggtaagcccrtggcacttagtcaagtaacaatagttgtcactctctcttgtttaatcttatagtggagtacgacaaggagttctcccctcgtcagcgacaccacaaagagttcaagttcaacttatcccagattcctgagggtgaggtggtgacggctgcagaattccgcatctacaaggactgtgttatggggagttttaaaaaccaaacttttcttatcagcatttatcaagtcttacaggagcatcagcacaggtatgaaggctygagaaagccccaaaggtggggctggcccctgtttcccaccttttgtcatgacaataaccccagctatgtctgtgcagggtgacctggagttcaggggcagcatgtgagtacgatgaggtgggtgttgtaaatgggagtgtttagctggtgagatcttttgctatttgattttccaaatagctatcttttcctaagaaagctagtgaatgtatttattataagcatcttttgtgatcagataactccataatttattagggttaaaatgttcccactattgattagtcctcattttgaatgataggtgagrgtggctaaaataaattcatacattaaaagtatatgatgcttgtaagtgataataattccagtgaatacaaggcagtgtatttgtgcacataagatacacatacacacatgtatctttgagtaagcttgtgtgtgatgtattttttttttttatcacttggatacaagggagcagtagactttttccatgtctgtattactctcgtttcctaaaacaaggccagaccattttacaaaagaactgcagtgaagcatgtgcatggagctgcctagcaatacagaaaaacttccatggaacaattgctggaggactggaagggctgagggatgaagttttatagtcgttagtacagaagaagccaatacacagaagccaatgacctcgaattttgcttagtatttaggggtcagtttagtaagtcagtgagaatcaaggcctttatgcatagtagaatagtgttaccgtgtagctcttagtgtgtacaaggtggaaattaagcaggtgatatgacggtctggcaattatatggcagctacaaggataaaaatgaagggaagtgaacatatgggggagggaactccatgcttccagactccgtaagggatttgtcagmtttggttttataaaccaagtccaggttcccacttttggtcttgtgagtctattgatttcccaagaatttccaaaggcttaagaatgactttggtttttcctgaatgtattgatctgtgtgtgggtctgtcacaaatacacacacctgaactcataagcaacattaatttgtccgtgaaaggttcatttttgttttgaaagcaccgccagcatccagcccttgtgcatatttaggtctgtaatggggaaacacagaaggaggaaggacagatgccatgctttgggacatttcatggtatgaacatacatgctgatagttgtaggtaattcatagctaggagagctaaataatgagtaaaatacatccattgtggtatctttataatgggtcacaattttggaacaaaagggaagttttctgatatctgattctcactcctaaataaaaatatattcagtggctatactactgagggcctcttttgaaaagtacattttttgttgctagatttttgtctgttgatacttcagagataattggtattcactgactctttggaactgttttagccattgattttcagtctgcctaattatttatttcattatgtttctctggttagaataacctactggtatctttttggctcagaaatatattgggaatatatgtttttctccgtcctgcaggaaaacctttacagtgaaaaccctaggctgggagttaagtgactggcatttaaaaaaattgttatttgttttaaaaaagagagagagaaagttagcagaacatttgtaaggtttatactgaactccagccaaaaaagaacagctgccctgtgcttaggatggtggtgtcatacttcctcgaggccagcagtgagtttggaaaataaaatcctgaatggtcccaacctttgatgactctctatcaaagcrgagagttgtagtttctttgccttctaggatgggagcatttggcacctgcatgtgtttcgttgttgtgcataggaaaggggaaattctgggagaactgggagagtttcatgcttttgaagggctccagtttggccaggaagagattttcttttcttatctgtgggccaggagcccaggcctcctgccgcctcctagcgttcttccagaggcctccagattcagctgcaggactcctttcgggggaaggtttgatctccccatctgtaccatcttggggtgtcttggctgaaaacaattctccaggcttgtgaagaaatgtatttgtctaatctgtgtttaagtgaaatttgtagtagttgatggattaactccatttaacaagggtttgtgttgcaaaatagttgrcctccttgaaaaattaaaaacagagtcagggttttaaatgctgagtcacacactcagctggggtggcagaagttgtgtgtcagcyttctgatattaaagacagttaggaagcctgacccagggagggtcagggaagattcttgcaagatgggcttttgctgtgaactctgcacaaacatgttcctttgactgaaaagaaatgacgggaccaggtaagtttaaaaagaaaaaaggtggctacttgaatagacggtacttttagtaagaacaagcaaacacttgatactttactcaaaagttgagaataagcccttagatggagtctaagtcatggaagatttgattgaagcaactcatagattagaatggaatcagcaacctaatagggaaacagtttttgcaaaaattacattggcaagggaaatctgacttaactgactccatcttgcttctacttggctaaattgctcttgctcattcttgtgcagaggccatagtggtcctttccttgaatggatccccttcatgtttaaaaattgaaactatatttgtaaagaggtcacaaggttagaattatggaagggggtcaagctttgctaaagaataggcataaacagtgacttgccattgatcagcttacttgtctataagttgctgactgccccagaatcatgtaactggggttcacaaagtgtatgacttccccaactacacctatagataacatcactattgtgaaagctaaagaacttgtctttgagatatttttcagagttagcatttcagcagaccacgagataccacctggtcctgagattccttcctaggaactgactcagctatgtgaagacagttttagacacccctgtgatttcatcctcggtcagtcagtgatttcagttccccagctccctgcctgtcaaagtaccctaaaaacyctagcctccaaattctcggggaggcatatttgagaaatacctcctgtcgtactagttggctggtcctatgattattgacctctttctttgctgtaatacctgctgttttcagtgcattggcttttytgggcagtgggcaagaagaacccatcaggctgcaacaatagtctgcatcattaagcttgagtaacacatgatgcctttgcgctttatttatttttagaagtttacttcatggtattgcatggtgtttaaaagatgactttggtattaaaatttggtgttataaatcattgtgtccttgtgatgatgcaggtaaaaaaaattgcattcatatagtagttacagttyggaaaaggccttctcttatattttctcattagggttttaccatgaccttatcagatagacagggcaggcatgttatccttgagagaacaaagtatggcacatacgaattttgccaagaccaaataattcctaaactattgtctgctatgcttcctaaaagtcacttcaattatgtgggtacagtctcaagataaagacgaagwaccggaaagaggtaagcaacctccttatgacacatcctcacacctccatgtccttaggtttgaagcagacaccccaagaatgcttctgtttgaatggcaaatgttttcataggtagtgaagatctgtgtctgttagaattcagactctggtactttgatgtctaaggccttcctacagaaaacctttgcaaaactttgttgatctcttgaccaaccactgatctattaacagtttttctagaggaggggaatagaagggaagaaagattggaataaatttacacaaaagtattatatatttgtcagtttacttctttactattttttctgtattgcatgcatactaagctgacttcacaccgggagtatagactgctctgaatgacttctgacctttcatagtcacctatggtagcatcatgagtacatgcttttcacaacatgcactcatgatctttgttctgtagcacctttatatgaatagtgacattttgaggtctttagagaatatcattttcttctacgttttttacttggttaaaggcatacttttactgttgtaattgaattttgtatacctagaagtcaaagagcatctcttgaaagccaaccagaaattttaacagacacgttcaatatctgaaccgtggtcctgtttggtccatgaagatcggccacacttgtctctgctagttttgaaattccgtgttctgctctctgtgttttggcatttgcattgctcggcagtgatggtctatattctgtgtgtatgataacttttcttctccatgttctatcatggtacaatcttttgggagacatttgaagaattaccaaatttaaaatttatgttccatttaagcaatatcccaggttactcctctgtttagaaataggcaaggatgttttttgtcatttgattttagagtttggtttatatattcatcgtaacttcagaatccttaggctttgaagaaatgcatcttaaaatcaaggagggaaatgctgctctgtagttggtttccatgtttttgttttttgtttgtttgttcgtttttgaggcagagtctcgctctgttgcccatgctggagtgcagtggtgcgatctcggctcactgcaagctccacctcctgggttcaagccattctcttgcctcagcctcccgagtagctgggactacaggcgcccgccaccatgcctggctaattttggttttcatgtttttaatacatttttattgaagttaaagctacatataaaatttaccatctttactatttttaagtgtgtagttcagtggtaataaacatatattcttttcttcccccttcatccctccctccttactaaaacaggaagatttcctcaggcaagcacaggaggctgctgttggagtctccaggaacaatcccagactgaactattgctttaatttttgacagaattcacaaaatcttacctattttacagacagaatataattgtcccaggagagaaaagggtaaaaacacattttccagaatttttagtttgatactgcactctgaaccattcacagagatcrggaacacaggaataagcagagttcagatttgcacrtttgagtcatggtatgagtacccgagacgatgtgagatgtagaagttttgagctcagcagaatgagctaaactacagtaggagattgttgagaccacagggcgaaccactgaagtaggtcacatagaccagatgtgtaagaayagaaaacctaattgaccctgtaccatttattgaaaatactatctttttctcatgtgctttagtggcaactttctcataaattaggtgactatatatgtgtgagtccattttttggatcttctgttccctgggttaatttttctcttcttgcaccaatactccactgtcttaattccttcagttttataataaggcttgatatctgatgtgtaacctcaaaattgttcttgagactttcttggctattaatggcccttcacattcccatgtaaattttaaaatcagtttgtttccacaaaaaataaaaacaaacttgctgggcttctgattggaattgcactaaatctagagatcaatttgggaaggatttacatctcatcgataatgaggatttcagttcaagaaagtggtatttacttaggccttctttaataactctcagtaatatagttttttgtatgtcttgaacatttttattakattaattttaggtattgaagtttctgatgctgttgtaaatggtattaatagttttttaaaaattcagtgccaaattggtttttgctcacatatagcataccattgattttaatttgtatccagcaaccttgcaaatttacatgttaattcgaatagtttttctgcatggccttttggaatttctgtgaatataatctataaatactagttttattttttccttttcaattctattttttatttctctttttcttgctttattgtgctggctgggacgtccagtacaatgttgaaattgttcagatttccatcagatttttaaatctcaggtaaagatttaatatttcatcattaagaatgatgattgctctaaatatttttgtagataactcttcagtagataraggaaattcttctctatttctagtattctaagagttttttaacattaggaatgggcatggatttatcaaatgtttttttttaattttgggacaatcatataatttttctcctttataatgttatgtgtctgccatattaaatgacttttaaatgttaaactaacctcatatccctggaacaagttcaacttgtgctttattattctttttatataaggctggattcaaagaccatatctgataactttgctatctggatcacctatgggtctatttccactacctgtttgttcccttgatttttccttgtttggttttatttcctggcaagactgctaattttctatttatgaaattctggacattaagaaaaaagttctagatactrttatctccttccagactagattcaatgttcttctgtaaggcagacaaaatatggccaaatcacctttttctttttgttccaggttaggcagggtttaaggatgtattaaggcttatctgtttatggttttccctttctcctagagtttagccctttcagctaaaagtctaggatgctgggcacagcggctcacatctataaattcagcactttgagaggccaaggtgggaggattgcctgagcctaggagttcaggactggcctgggaaacataaagagaccctgtctctacaaaaataaaaattaaaaaattagccaggctggtggctcatgcctttagtcccagctcctcaggaggctgaggtaggaggattgcttgagcctgggaggttgaggctgcagtgagctatgattgcaccactgcgctctatgctgggcaacaaagcaagaacttgtctcaaaaaattttttttaattttaaaaatcttagaaaaataaaaaaccataaaagtctggaatgtttacaagagcccctcttccttggtggactctgtactcgattttttagctcctcagcactgtgagactgccaaaccctctgctttgcttttgagcctctaaacagtttctttctacttgttttctcaactcctcgtcccatataaacacagcttaatatctggtaaatacctcaagtggaaatgttggagttcaaggaggccaggacttgaagagccagagtcctagaggaaagggactacacagaagtgacccaggcttctatgagatcacttttatgagctcatttccatgcagccccctttttttctgggactttagctcttctcacgcactagctgccttgaattttgattttctccccagctggtgatactgygtaaagctctaggccgctaccaattgctgcttggtgtctgtgcctcgtactakaaattatcaaatgccctgaaaggaaaaggcagcagcaaacacaaggctcaccttaatgcatttcctttctccctgaggtcttgacccatctagtgttgccttgcttggttgctctaagagaacttcaaacaagtgtgttttttagttaattcagtattttttttagtgggaatgttagtttgatacatcatgaccagaagcttaagtctttgaagtatagtgtgttttatcattttcatttggaaatctttttaatgaatcccgacaaatgttgacatttgattcagtartgaaatggcatagtcctggaaacaagatcgggacccaatgttgatccatttccaggatggaggagagtggtttctttagaaaaacattacctatggactgattgctctataaaatctgttggattttcagtgttgcctgctgaaatgaagacaaaagttcaccctttttagatacctgagacgggtttcttttttgaagagaagggcaaatttgagaaagccaggatgggagaacactatattatagtttgggcagaagaaaaccaaagccttttatccctgtgcccagccacacctttttctctttctgtgtctggctttcacaggcatgatccttagggactcctgaaatcttactgctgacttgataatctctggctccctctgtgtgggcctcgagaggcaagcagtgagcttttcagtatttgttcctttgcccctgaaaaagggataatacaagtgacccatggttcaggttatgtaactggttagtttcatcttcctagtcaagggcatatgacttatacctagaacggtctacttggggagaaaaaaaaaaagactgctcaaggagccatcagaccttcttgttcctcagcctatgttctgttcttggtaaggcacagggtagaagagaatgttatrgagaggaattaaagttataaagaatcatatacactcaaaagaatgctaaaacattttatgctggcgggaagagccagtgggtggtgggcaggagacgctgttctttgggaactgcttatctacttggtaaacatgaagagaaaagaaaataggtttttatttctggaaactatgccttatatatttatcattcatgcctcgaaacagatcgctttggttacgtgtgtctccatactatgttgtccagctttgtgggaggcaggccatgccggtggttaagattactttgtaaccccataaataggtacatctactatatatacccataaaaactaaaaataaaaaacttttttaaaagattactttgtaaaacatctttttaaaaaaaaaaaatcaatagcacttttactgtttcatttccccaccttggacgggaatgtggaaatgtagggttggtgatgagaactaaaacatgtaatatttgcatgtcacatgtttaaaaggtagcgggggctgggtgcagtggctcacgcctgtgatcccagcacttggcgaggccggggcaggcgggtcatttgaggtcggaagcttaagaccagcctgaccaacagggtgaacccccgtctctactaaaatacaaaacttagtcaggcgtggtggcgtgcacctgtaatctcagctactcaggaggctgaggcaggagaatcacttgaacccaggaggcggaggttgcagtgagccaagatgacgcactccagcctgggtgacagagcaagactctctctcaaaaataaataaacagacaaactaactaaataaaaataacaggtgacaaactccgcacttgatcactagtgaagattagagtataccccagtgtatggaagcattgttgtgtttatgtggccaaagagagcagactgggtagccgtcagtttgtataaagtttccatcytctttccccctcttaccctgccttggacatatagaaccaagacttctaataacactgatactttggactcgatctcacctgcagttctgtttattagcctaattcgatgacaccctgagggtcatgcccatccataagacacactgacttgtggagcagcctacatttggtttgcactgttttagggagaggagcaagaaatcttgagagcagatagctttcaactctaagttcacaaaacaggcacaggtagtcctgctcatatttcatggagaggtagtctggctttaggtccttggctcacaaagtatggttcttagaccagcagcatcagcatcacgtgggaacctgttagaaatgcagattctcaggcccctccccaagcttactgagtcagaagccctaggggtgaggggcagcaatccatgtgttaagcccccgcaggggattctgatgcaggctacacttgagaaccactgataaaagagcacgtacaacacatgagccaaactgcctgggttcaaattccagctctgcccttgctggctgtgtgaccatgtgcaagccacttaatctcaayctctctctctctctctytttttttttttttttttttttttttgagatgagttgtgctctgtcgctcaggctggggtgcagtggcacaatctcagctcactgcaacctgcacctcccaggctcaagagatcctcccacctcagcccatgcccagctaaattttttattttttgtagaggcagggttttgccatgttgcccagtctggtctcgaacccctgggctcaagtgatctacctgcctcagcctcccacggtgctgggattacaggtgtgagccaccatgccctgcccacttaatctctttgtgcctcagtttcttcatctataaacctgtaacagcattaatagtatttacctcttacggttgttgtgaggcattaatatatgtgagagtacctagaacagtcgcatagtaaacaccatgttaaggtttgctatgttaatattctaacagcaaagtgatttatattggttttttaaagacgaaatagcccctacagaatcaaggtgcatttgatatttgaaacgtctcttcataccatgctagccattgggtgaaaattgagtaatatcaaagactgtaaaaaaaaaaaaaaaaaaaaaaaaaatgcaagtgtagccaaataatgttcattcatctttgttactcaaatttgtatgtgtacatgtatgcagcagtttactcttttttgtagtactttattttcaaatatatgatgccttttctatctttctaatggtaaaagtttaaacataatctatactgtactttacgtaaggaaaaagtaaaaagcatgagcttgactccttaattttctaaaatgaaaatggattttttttactttcattctatttgaaaaatgaatttttcttattgcagaaagtcagttcctccatgtatgaatgttgttttgtattttaatgtaacatcaagtccagacgtacaaatgcaaaggaatgtgttatggagaaataaagaacaagaccacagaatcaccttactgagtatttcataaatctgcttactttgaatatataaatgccagtttatcaagagcatttttttttttttttttttgaracggagtctcgctctgtcgcccaggctggagtgcagtggcgggatctcggctcactgcaagctccgcctcccgggttcacgccattctcctgcctcagcctcccaagtagctgggactacaggcgcccgccactacgcccggytaattttttgtatttttagtagagatggggtttcaccgttttagccgggatggtctcgatctcctgacctcgtgatccgcccgcctcggcctcccaaagtgctgggattacaggcgtgagccaccgcgcccggcctcaagagcatttttctatcaaaatggttagtagtaaacactgttgtactttgaccccggcattgtgaccttgatgggtgtgtggtttgtcaggaaagggtcgaagcctgtccaccaggagctcaggcacctcctgcccttgtccgagggcaaaggagagaaaggcctgctgtattttggcaatggtgctctctgtcagcccagtggtgtatcactgatgtgagcatgtgccttggaggctgtgtgatgggagggatatgcagggataaatcttgcccacaaacaccaattctactagtctttatgagtggctttctgattcatcaactctaaagccagggtgaatttttgaaattttccagaaatatcttactagcatattaatttgttaagaacctcatttgcccaggatgaccacaatgtgaggaatatcacgctctgaggttggaataacattgagaagagtaacactgttacatccttgaagattggaagcgtattcatcatgcaaatgtagggtctgagttagttgagaacaaaatagtcaataactgcattaaaaattatcttcccttgtttcaagattttctttcgtggtttgccamcttgagagtatgtcacctcaataggaaggtccaagtaatctaggcatggtgatgattttggccagtctctaggattctttatcagtgacacacattttaggtgagaacatctcttctgaactctgccaaagtgagatttagaagggaaagcttatttttcacgtggcaaaatcagatgcatcttcttcgaggctacacttttacagtccgcagactaggaaggccatgtatccctgaggaaacattagtacatgtgggtcagaccagaaccgttttagtgatttgtcatcaacagcatctcttcaatatctgagttgttggaagctttgagggtgagcccataaagttgtgtcttaaagcttcattcctttttcaagttcctctccctcgtggtgtgaacatattagtgatgttctcatgctgggcgcagcatattctgcttggaaggagcagagcaagattgggagggtcactggggctccaccactatgccaccatctacagctgacaccagccacctcgggcgccttcctgcacgcactctcatacctacctgaccctgatgggggaggcccactggtgatcgatttatttatttatttagacagggtctcactctgtcgtccaggctggagtgcagaggtgcgatcatggctcactgcagcctccacttccccggactcaggtgatcctctcgcctcagcttcccgagtagttgggactacaggagtacactatcatgcctggcaaatttttgtatttttttgtagaggtagggtttcgccatgtttcccaggctggtctcaaatttctggcctccagcaatcctcctgcctcagcctcccaaagttctagtattacaggcatgagccaccacacccagccttcccaaccggtgatttttaacctgtgcctgtcctgtgtatcttattgtattttctgtatccagctgactttagcatttgtatgtggtagactttggtcccttactttattctgagcccttggacagtactttcagcctctgccctgtctgcttcatgactctactttttagatatgtgacggctaaggacctgggccctgattaaattccatttgccccacttaacagccatgtgaccttgagactctctctgggggctcagctgtagaagagatgacataggtcctgccttttctggctgtcctgaggaataaaggctgttgacacagtcaatattcgctgttcctctgtcccacttggcccaatcatcttaagtccatgctctgcctcacttcccttccagaggccccgagcatcctagatctaaacattgaagtccaagccttcctcgctgccataggaccacatagagttttcatctttcaaggctcggccactagactgcacttgttgacctcacaagcttcttaagcagtgagaacagtcagtgttctcattgtacgattacaaaagtgtgccacagaacaacgcaaattcrtggggccccagagtgactcggtagcagagtcgggatggaaactgggctctccacatccacgaatctgcactgaccccgtaggtgcaattgcttcatgtcatgatgggtaatcctcatcttccgcctttgccccaagtttaacttttgattcatgttctccctctttaattcattccttctctttctgctcttctctgttttcctcctcctccttggatgatgtgcgtctgcctcattccccacrttctcttggacgaggctgccattttctttatcacagaccctgatctttaaaaataaaagctcattctgccagctgtgctaccctcacgctttgaactgtatttctctgtatccttattataagtctttaaaatgtaggtgcctaatctagtcatcagaggtaactcggcatgtgctcacgggccccgccttgagggcagccttacccccgagattcccactgggtcttggtgctagagagtgccagccacattctgcccgtgacaccgatgtgtgccgtgcttcctctgggaccggggctactttcccacagtgctgtctgtactgtctgtgttattgctggataagggtcttctgtgaccttccagaacagaattgatgtcctcttacatctgacttcaaagccttggccttccagtctctgcttgctgttttccatggacaccccccgcaccccccgcaatctccctgctcacagttgttacctcagtgatggggggtaatttgtcaacaggggatgtgacacatccacatcagagagagctttcaactgggcaggccagaatgtggcctcccgcagactctgttaagcagctgagtaaatgacttttaactgtgcctactgtttatacttgggaaagacgacaatagagttcccttctcactttaagtggccatggaggcaggagaaactgttcrctcctcctctgagaaatctaaccatttgaacttgatgtttcactggcctcgtaagtatttgatggattaaagatgaagttcattcattcatcacaggtcgtctttggtaatcatctcaatgagacagtatgttattatggaaagctctttgaatccaaractaggtcctgttttttcacttgctagcttgagatcttgaccacatatgacggtagccttgtgtctgagtctcaggttccccagctgtaaggtggagaccgtgacactctgcctggcttttaggattggtgtaaggaccaaacaaagagaagtagatgaaagcactttgtaacttatgtaaatgtatgcttatcttaaacttagtatttaattttagtcgtttttctatctctgtaagatattgcagcaaaatatttccaataccaggagctttgagtctttccatggccaaaatatagccctccctgtcatgggaatcccaggccatctcattctagtggccatgggatggatacgcagattcagattgtccctaaagatgaccatctcctggcactgacctatcataaaatgcaggtgagcagaaggagaccctcacaccgtcatcccacagccccttgattatgttagttcaaaactgtgaaaaagtcagtcttycctgaagggcctaatggaaggaatggattctctgactttgcctcaaagaaccccagctgtagctcaccactgtgctgggatgaactttaaaatcactcagcatccaccctcggctacacagtccatatggggaaggactgggtactcactgcagaccattcagaggccttaattaaaatagtagatgattacttaggcatgcgatgtggcttcttgtttctccttatttcataggaacaaacgagaagattttcagtcccaatttcaaaacaagaaaaaatgagcaaagcccagtttataaatgctcatatggatcctgatttttatcttttctcaatcctgtttctcgctgtctcctactttccctgtttttagagctyattagccataaagtaagctagtcactaatagtatcataaataaatttttaaaacataatagaagtattaaaatgtaaatgccactgcactacagcctaggtgacagagtgagacccagtctcaaaaaaaaaaaaataaaaaagttttttaaaaaatcatttatttgtaatttatcctaattcgcaaaaagatctgtcataagcagcactagcaagatttttggtaaagttgagagggtctgcctgtgtcggggtgaaagctgatttctatgaagcgccttatcagatgtgcctgtctctcctaattgtgtcatgcctgtgtcctgggtggtaccacgcctttcagggctatggcaagtcactgtgcttgtgcctcacaggtagatgtgatctgactcgggcatgttttatcctgacgctgagacaggaaagagtgggaaggagcttcaggcagtgcgctatttaccaggccattttttctttctttcagagactctgacctgtttttgttggacacccgtgtagtatgggcctcagaagaaggctggctggaatttgacatcacggccactagcaatctgtgggttgtgactccacagcataacatggggcttcagctgagcgtggtgacaagggatggtaagttattatccgcaagcctccaacgtccagcaagtcatcagtttcacacatttcccttacagcagttgtgatagaaccgtgggcaacaggcaagtcctcagcttcaggatggcctcatttactgatcccccatgacttgcattgagaaccaaaacctttcccggaggcctcctagacaggaattgaaaacaggcttgggcaacttggagacaggagagtggtaatgtttccaagaggatggcgatgggaggacagcttttctaggcagaggcaggttgcgggggatgcagcgagtaagagagaggcaggcgcatctgtttaaatcctgacggatgaacaggtttgcagtacccactcctcctgcagcatcagagccagcagcttgaggtccccactgctgatctgtccaccagggagggcagggtaactgcagattcataatctagcagaaacaggagagcccaggagttcacgccactccttcatgtgattctgaaactttgaaaggagtgctttgattctgccaaaagatgccatcccatgggtgccaggcaaggtttggggatacatgatcttcttcttcacactcattcttaaggattagcacttaggaaactaggaagtatcccttaactgttgtagctacaggaacaagtttctgtggaataaagagatgcatgctttgatttgcattaaaggagtccaygtccacccccgagcygcaggcctggtgggcagagacggcccttaygayaagcagcccttcatggtggctttcttcaaagtgagtgaggtscacgtgcgcaccaccaggtcagcctccagccggcgccgacaacagagtcgtaatcgctctacccagtcccaggacgtggcgcgggtctccagtgcttcaggtgggtttgtggggagcctgtgtttccagaaagccttgttggcctcagtgagaacaaaagttgtgtccacagtctcagatgtcgggcagcttctgcacagcaaatccaaaggcaaataggtgtcatatgcatgatggtaccttgtacagtcgcagaacatctgcgtgggttctgagggccctcagcctggaacacttgttacctgaagactcaggctgcccgcatcatgactgcctgttgatccagacaagcatctttctgtttggttacatttctccaactcttttttaaattcccatcaaaaccctgggagcacctagattcttttttctagttgcgttatgctggggggttatgatgtgcaagcgaacttggtacagttgtgtaatatgaacttgtatttgtcagtgctcttggctggaagggaaggaaggtcaactcagccctctaggatggatttctttggctcatttaatggagaggttgagggtttttttgttgttgttgtttgtttttgggagacagagtctccctctgtcgcccaggctggagtgcagtggcacggtctcggctcactgcaagctccgcctcctgggttcatgccattcttctgcctcagcctcccgagtagctgggactacaagtgcctgccaccacgcctggctaattttttgtatttttagtaaagacaggatttcaccatgttgaccaggatggtctcgatctcctgacctcgtgatccacccaccttggcctcccaaagtgctgggattacaggcrtgagccactgcgcctggccaggggttctgtctttaggcatggctggatccatgggctcagatgataatcaggaatctctctctttttctgtttttctatttttctttgttggtggaattcttagtaaaactatctctatatggtggccaggaaggcaaccagtggttccaggatttttgttacccttggcaacctcaacctcagacagagcccttcttcagcagaaatccagggcacgactccggttggcttggctggggttgcgtcctccaacctgaagcacactgctgggtggggagtgctctgattggccagacctgaactgtgtgctcacccgggagctaaggaataaggtgagtcccattctgctcagaacagacacattcaaagggcaagagagagaaaccagctctgctacctgagtgtcagctgagtggtccttcagaagtgttctccctggcagggtgcagtggctcatgcctataatcctcacactatgggaggctgaggcgggcggattacttgaggttgggagttcgagaccagcctggccaacgtggtgaaaccccatccctactaaaaatacaaaaaattagctgggtgtggtggcatgtgcctgtaatcccagctactygggaggctgaagcaggagaatcacttgaacccaggaggtggaggttgcagtgagccaagattaagattatgcctgagtgacagagcgagactccatcgaaaaaaaaaaaaaaaagttctccccrgtgtgtttttaggaagtggcatggaagtccacccatggaagcccagaggaagggagagtggatgttccctccccacagccagtcccgtagctagttaggattgaatggaaacccagacacttctgactctaatgccagtgcttgcaaattctggggtcctttggctatttaaatagcttgagaatcaaccataaaggtgaagattggcagtgggatttgcagccagagaacttgtttccctggttgctaccctgtgattttggacacatttaatctgtttcagcttccatttactcatctgtaagatggggatgatgartgccttgcagatttgctggaattaaatgaaaagcatcaaaatctggctcataatagcactcaaagattatttatatgccattgtaggaagtaggttctcagrgcatatgttgggatccctggaaaacaagtaaaataattctggaagatgcattaattcttccaggtaattgtacagaaatgtcatttttggtggccaaacatgttgggaagagttaatgcaacttcccaaagtacctatttcttctttgggaagcagtgtctccattttgtgttccgacttaaatcaaccatctattttaccagtaacttggatgtggagcttgaggatccaccgcccagygtgatgtgacattttgcttcttgtcatcctggtgtttctcggaagcattgctcacagcatgggtgttcctgtattcaccactagaaacagtcagggttggggtttttgaaaaagagaagaaatgcttgctttcctttattcacttcagaggcagcctgctgaacagagttaataatctcagtgttttccttcgggctatgatgatgaagtctgccaatggtaggcttcaatttattaatggaagtctgccaatggtaggcttcaatttattaatgaactgtggtcagtttggtgctgggacctcagacacagaggcatctcttgaaatgttgattgctttttaaaattaaaacttcacttgattttattcagtaccccccacccaatgcacacactaatgtttttaaattgagaaaagatgttgtgtctgattttgattttagcaatatcaaccaattattattttccaagtccctttcaacttttttcaatttgatgagtttaaattaaatatggatattcaagttgatctaattagtaataggtgcaaatatctctgtttttcagtggtctccccccgcccacctcccaagccagtacttccaaatttgctttgtccctttcagtagtacaaaggcaaaagggttcatacgaaatctctccggtctcacctatttaaaggcccccaagaaagaatgacgatgaaggatgctccctccttctcattctcttcaaagatcctctaagtgatctgggaaattgctcatgtctggcccactgaagcgcttctttatatttttggctctttcttccttatctattcttccattaatgggagtggacatgctgaggaagagattcccagaaaagatttccagagagatggcctgctacctggagaaatggcctgtctggtgttcctctccctcggggtctctgtgaggccagatgttgctgggccttcatgaaccaggtagacattacagtaacagaaaagtggtgtactctggcgtgactgcaggcagactttctgcttgtaaatcttttggaagttggaaggaaaagattgcattgtctctgctgcccccttcttccatggcgtgctcccagggagttgatagttctccaccaaaacaaccaccaccagaagcagcccaccagggatcgtcctacatctgggtaaagaagttagcattcattcatcaaattgcctgtcatcagggtgaaacgtggcaaggaaataagaggctatttttggaattgtgctgtcagtgcctgagacggcaagactagtgcacagcagtggagaggccaggagccccaccacccaccaaaatctactcaaacatttgtacttggctttcaagctggactttccaaacatgtgcactggatagtggtttggatcgacgtctccctggatggctttcacttgcccttgcttctctgcagctggctgctctaaatgaaggctggatgttggttggctctgttayacttctccaggggcttggatagcctctgcatggtatcatttattgtttttacacatgtttgactagtcctggtcctagccgtctttgccccattggggattttaaccaatctaccaattctttttcagcctccatttcttaccagcctgctgctcttgcaacacctgtcctcaggttctatagctccagtttggtggtctccttctacttgttatcaytcactctcttttatggtagctctcacttggggttcactattttatcttctgggggactgtgataccacttggccaatccatgacaaggtccatgaacaaatggccttgaagttccattgggtgattctaaattttcatttggctaattttccggatctttccaagacctcttttgagagggtgtagctaaagcaatttcaggtcagctggtaagtctgaagtctgctctgctgctgctgctgtgaggcagaattggtctttgttttgatagatgagtttggaaacattatctgcactttaatgatccatgtgaaattggagtagtctctttcagtcttgatgtttatgttgtcactacccagctctgccaaccatctatgacccagcagcctcttgagacmctgtctgtcctttggaatgagtctgccattgtatcaatgccacctattagcatttcttttttgtttgtttgtttttaagacagtttcactcttgttggccagactggagtgcaatggtgccatctcagctcactgcaacctcctcctcccgggttcaagcgattctcctgcctcagcctcccaagtagctgggatcacaggcatgcaccactactcctggataattttgtatttttttagtagagacggagtttcaccatgttggtcaggctggtctcaaactcctgacctcaagtgatccacttgcctcggcctcccaaagtgttgggattacaggtatgagccaccacaycyggccagcatttygtagagtaagttctccttccctccttttcccacccccaaacatgtatctttaaggaccttgggggaaattgtggctctagtacattcagggatactcctgaccttcttcttgatagtttatattttctgtcctttaagcttcccggttgggactattcaataggctttcagcgtaaattaaccaggagtcatctcttgcaaaacagctgtttgagtagtttattataactgtgcaatcttgtgctatacatttcaaggaaatccagtccagactgggggtctcattgttacagtgtcctcactacttcaccattggcttccatggattggggatagccagagctgactgggtcggtccaccatggacattcaaagcttgggaagaatagacacaggtcaagactgtgaactagcagtttctagttctccaggaaagttgggaattgtgatttgtcattgtgatcttaaacttttagggcctgcagcttggcttgcagatgtcttaagtagagtttggttcagggcttcctatatgaaatcaaaccttaattctccatagacatggaggacagtcatggcaaatagtgatctaaaagttagaatcaccaaaaaaaagttagaatcaaaagcttcacttctatcatgcacaactcttgttcgaggataatggctatcaaagagtggaacagactgkaaagttcccttctacctcctcccaaggttcactccttgcaaatgtgcaaatggcaacaattctaaaaggcaataagaagaagcttatgcaggtaccgtgagatgcctaagtcattcccratcattgccaaccctgggagggcactggggccrggagactcagtctaggaagtggcagagagtatagaaggtgcttagagcacagagggtcttagagctaagtttttaaaggaaatctttgtctatttgyaggacagttccayattcttttagaatcaagacaaaggctgaaaagagaccaaagtcccacccagattaaatggggccttatgagatcctgaaatctcctggagcaaccaaaaaatagggcctcactgttgcttctcaatgttgaccatccaaattataaacaaaatctagactctgatcaaactgtccacccccaccccagccctatcaactgttaggagattattgacaccagaaatcaaaaccccagtgtggtccctggcctcccgtagtgtcggtgacacaaggagctggcacctgctgcgcgttcttcaatggctgtattgattctgctgggcgagtgggagcgagaggcttgttttggataagatggggccgataaggcccagagatatggaaagagcggccaggcccatgaagacagaggtgccactttaacgacctctatgtggccctcacccttgtcattctaggagagaagggaaattaaagtagtgaattattccctctamaaaacaagtttcctttgggaagagtctgtagcctgagctcaggaaagctgggaaatacatgtggagcatgccgctttgtccagtcccctgccatgctggtattttcttggctctgtgtgacctgctgagcggggacacccggctgagctggcagggcctgcggggtcagcccagggcagccgagtggcccctctgcagaagcyctggtgaggagacgactccctgcccacctctctccctctccctccccacctctctccctctccctccttctcacctgctttctgtggtgtccctgacattctctctcccctgcctttgtttcccttctccctgtcttgccctttgtttcgctgtcctcctctactgaagttgcaaagcacagcaggcagggtcactgggacccaggctggctctggctgccgtgactcaggcgcaccccccctgggagcccacaggcttgctgcagcgccctagccccgtcatactcacagcagcagctgcgtggtggccctccagccccgcggtgcagcctccccgcacaatgcctgcctgagagtcaggatggtggctgcgcccttcccttctcctctgggtctcatacctatgggcctctcctggcctccagtgccagggaagcctgcctgtcactggcccrtcatggcatatagggattgagcttcagagctaaccaacagtgggctcctttgcacttcgctgtgtgcgtggctcttcaggagggccagataaaaaggatgctggatggaattaacccagatgttatgcttagtgtggggtatgacccctgcattgggggtataggcaatgtatacagtgcatgtgccgctgcctggggacatggcttctgtgaggaagtcccagcccagctagccgccttctgttggggccaagggtgccctgtcctcactgcactggatgagagagctattctgcagttttcagtttgccttgggacgattaggatgccctgccccgtcactgtcacatgggccccggcagccttcccatttgttttctcctgtagatggaatgtctcctcagtcatcacaggggagaccaggacttaaggtcggggagcagaggctatcagcaaggaagctgattgtcaggtccaaggcctagcaactgagatgagaactccccaccagaactgagcagactgtaggagctcagcagagcctgtgtggaacgtgcacctgcaacaggaggagcaagggcaggaagatgctagaggacagagaaaggggatcagccagaggcstgtgtgctgggagctgcagcatgtacccctgatggcccccaggaagggagctatggcccctccaccaccaccctcagaacaggactctcagatgtgaaagctcagttgtgtctcaaggacaagaagactccatcactgtgtcctccctcccatccgctggactccagaaaaatgcacctccatatggctcctttcaagttagcccccaaccmctcccaggtgtactggcccccaggtaacatggaggaatgacagataatgaaagacacacctggggcttgggagagggatttcagagccatggctggacctgatgctttattccgaggtgaattctggattggaacaccccggtctcttatggtagaaaatggcaggcacttccacatggtcccgccatcgggaatggatgggacacttctacctgtttctctaccactgattkcatcgtgcagaaggcctaaatgagatgcaagcctccctttggcaaagtattggaaaaatgaaggcaacgtattggaaacataaaggcttcataaagacacgctttgggcaccacagctgggacctctctgcccaactctgttctccttctgagggggatggtgcctgtctctgccaccttcttttccactacagatcatggagagtcttgctgaagaaccttccttaggggaaacaggcatgtctgtcttggatctttttttwaaaaaacaacaacaacaacaaaaaaaaacgggtctcactctgttgccagactggagtgcagtggcacaatctcagctcactgcaacctctgcctcccgggttcaagcaattctcctgcctcggcctcccgagtagctgggactacaggcatgtgccatcatgcccctctaattttttgtakttttagtagagacagggtttcaccatgttggtcaggctggtctcaaactcctgacctcaaacaatccacctgcctcagcctcccaaagtgctgggattacaggcgtgagccaccgcgcccggcctgtcttggatctttagagttcatctccatccccgaagggagttgtagaagcttcctgtatcatgggccccacttgcctgtcccacactgtgagaggaaacccatttacatctcatgtccaaagccatttttttcctacaaatagttttgtgtgtgtgtgtgtgtattgaggggttataaaggaaagcagaatattttatcatggtttttgcttcagtggctttaggacaaattagaactcaactctggtgctagaaaagaaaaatctccacttaaaacccatgttcaaatatctgtaatgttcatttggagaagagaggaaggatttgggctttttaatactaattgtacctgaaggtttccctgyggaagcagtttattaaatgggactgaaagccgcgctgctaaaggcaattaacatctgatacattctcaaagctcagaaatctttggygagaggaatgtttctgcctgtgtaagagcaggccagggagttaccttctgcttatggaaggaattcgtcctgggggggcttttatgattgttggattttgtcatctgtgtcacctgatcactcaacagttttttgcccaaacccacctatggctgggccctgcttgtccaagttgccctggatgagcacctggggccttgtcttgagggggaaaattgcctctgggcggctggtgcccctgcccttgagggggaccagatttcactgtgtattcaactttgaaaaagccagagcccttgaaaatgtctctcaggaccaatattgggccttgactgcagctgtgtctggggatgctggggagccttggggtcccaagacagactttgtgtctcagcagggcagtagcgctacctgtgtgtgagcctcttgtctagagggcagcagttccaattctggtgtcacaggcgcatgtggacagccaggggcctgatctcagtggctctgactcatgggtctgggattgagctgagaaccccgcactttagagaaactccctgatgatccccagtattcggcacaggccacctacaagtcacacactgagagcttctgtcctggcggcgggggtggtgggggaggctcctctgtcttgggtcagcttctctggtttttggtttgtcgcctctctctagctgtctcacttcctttctctgccctgcccttgactggtgaatccaytggggcaaagctgtgttacctctctttgtcccactggagtgaccatgttcctgttgaattgtcaccacatacatttccactggccctcttcagcccattcatcaaaaccaataccargggcagtgggagtgaggggaaagttttttctgtaatctgtaatctgtcaatctgtttaaaaaaaaaaaaaaaaagtgtgtcagtrtaattccatgcagaacccagggtactgaccctgagtggcagacacaagtattccaaggagcatcaaccttcataaatatttatacgttctttgccagcacttaacatggaattataaggaaatttaagcatggcctgagagtatctgtaggaagaaaaacaggagagttgaattcctccttttcctctctctggccctgatccttacttaatgacaaaaatgccagtgtctggcgctaaaagaaatagctgttcttccagagaaggttctctttgttgagcattgagagagtcaaatcaacagcaggttcacagaaacccagaactgctggtgaagttagaagcaaagccctttgactatgtcatcttggttccatccagcagaaaaagaaactggaaatccagacatgaagtggtggtctctgcctgtgttctgccagcaattcttcaacaccaattaagtgtcttgcaattcaatccaattctttttttttctttttttttttttttttgagacagggtcttgctttctcgcccaggctggagtatggtggcataatcagggctcattgcagcttcaatctccagggatcaagcagtcctcccaccttagcctcccaaatagccgagaccacaggcacacaccactatgtccagctaattttatatyttgyagagacagggtctgtgttgcccaggctgatctcaaactcatgggttcaaacagtcttcccaccttagcctccaatagtgctgggattacaggcatgaggcgccacatctggcctcagttcaattctgatgccacctggagttagcacaggcccaagtgaaagggcaaggtccccaaggagactgctgtcatttcagacaccaggcacaagtgaggtccacagggcagccatgcttctgtctgtcttgcctacaaatttgggagttcacattaccgcccttcatgtttgataatttgctggaacaattcacagaactcaagaaagtgctatacttacaatcataggtttattataagaggtatgactcaggaccagccaaatgaagagactcttaggcaaggtcaaggggataggcatgggtggttggagcttccacacccttttgggtgcaccgtcctcttgaaacatcagtatgttcaccaacctggaagctccactgagcctcagtgtctggagtttttatgtggggtttaattgctctgcacaattgaatcattggtcacatgattgaactccatctccagccccccagaggccaggctaagccaaagttccaaccccctaatcctgtgcttggcttttttggtaactagcccccatcctgaagctaatgaggtcctagagagtgtgtggggttcaccgtgtacaatctagggcctcaggagcataacaaagacactcaggaaaatccaagggttgtcaaagcttggtgccaggaactggggacaaagaccagagatatatttattattttcacactgcccatgtctgcttgacctgggaaagaaagttgtttgtagaaatctttgctttttacatgaccaaatgatgccaagatggtcttcatggagattttggtccctagcacgagacggtattttggaggaagcttacttcacaagcagaatgaggttggatggggaaaatcccaggctaagactgtaagtwgtgtgatcatgcagtttatcatctaatctaacccaggacacctttaggagcgcagggcgttaggaccttggggtcttcaggagactcccctgctgcacccagctggcaggagaggaaagagtgagtggaaggctgatggggtagggggcaggtggttaggagggccaggcctggcagcaccacacatcccttcttccccacattcatgggcagaatccaggcacatggccacagctaactgcagtgggaaatgtcatctggctgtgtgctcaggaggttgatagaggatgtgggttgctaataaacacatcacagccgccrcatggttgttcctggaataggtgaagcaggctgcttcctcagggccttcacattgtcattcccactctaggaaattctctcaccccagatggcctcatgcctcactcccaaggctcctcttttgcttagaagataccttaacagaaagacaaggccaggcgaggtggctcacgcctgtaatcccagcaccttgggaggctaaagcaggaagatcacttgagcccaggagttcaggaccagcctaggcaacacagagaaacaccatctatacaaagtatttaaagaattggccaggtgtgtgatgtacacccagctactcggaaggctgaggtgggagcatcacttgagcccaggagttggaggctgcagtgagccatgatcacaccactgcactccagcctgggcaatggagtgagaccctgtctcaaaaatttcttaaaaacccacaaaaacaaaaaaatccagacaagcttgtcaaygctatgtgagatagcacacttgccaccctgtactctctatgccctaactattgaataataatttagctagtccgggtttttactagtcagaattttccagagagacagaatcaataggatatatrgagwtayatatatatataggaggagatttattatgggaattgactcaggcaattacggaggccaagaagtcacatgagctgctgtctgcaagctggagaaccaggaaagctggtggtgtaattcagtcttgagtccraaggcttgagaaccaggtgagccagtggtgtaagtcctagttggaagtcaaagccctgagtactggggagggctgctggtataagtcctgaagtgcaaagccctgggaactgggagctctgatgtcccagggcaagagaagacaatgacccagctcgataaaagagaatttgcccttcctctgtctttttgttctctctgggccctgaaccgaggagatgatacctatccgtgttggtgagggcaggtctattttactcagtctactgactcaaatacttatttcttccagaaataccttcacagatayaccccaaaataatgtcttaacagttrccagrctcagtagcttacacctataatctcagcactttgggaggccaaggcaggaggcttgcttgaggctaggagttcaagaccagcctcggcaacatagcaagtccccatctctgcattaaaarttagcttgtggtggcccgttcttgtagtcccagctgcttgggaggctgagtgggaggattgcttgagcccaggaggtcaagtctgcagtgagccatgattgtgccactgtgctccagcttgcgtgacagagcaaaaccccattgcagaaaaaaaagttttatcagctacttgggcattccatagtccaatcaagttgacacaaaattaactatcacagtgctctagattgcatgcagtagaagcagactgtaatgagagagaaaagcgtaccagggaacttacccaatcaacaaaaaggctggagacttaattcaggaaatcaaggctcagatctagtcatggaacaatgtgctttggatccctccaatgtggtcatcaccctagacactggctgccgtactacccattcttgatgtcacctttgagtcactccctcaggttatacactgcagggtggaracatttgattggctttgatgaagtcatgagtccgtacttcagatgctaggggacaaagaggggagctatctgtcgtgggaaatggggctctgagtcccacctatctaggcattcccccacatgcgaagtgttgccaaaagctgggtagcaaaagcagtaaatatccactacagctgggtatggcattctaggtttgatggcatcattttcatattatttaattttttaatgtgtatttttgttaagtttgctatccattttgtgtttcttagtaattttctttttatctctggattacttttaagaatttatgtgtttgatataatttcactacatgtggctagataagaatttatctgatcctcttggaactctttgggccttttcaacttaaagatgtttgcctttctttagttgtagaaaattcccagtcattatgtcttcaaatactactactccctattactgccttccgaaattcctattagaaatttgttggacttttcattctctcttccatgtctctttacaaagagacagtcatgtattttggccatttgattctgtgctatatttgaagagatttcaaatatactgttgaattctttaattctgtcttcagttatgtgtaatttgatgattatctgtttaatgtataactaatctgttaagtaatctgtttaatctgttaattagacaactaatgtttaacctgtttaatctgatctttagttatatctaatctgatttcattgttattttcaatggttatggtttttataaagttctatttgactctttttacatctacctgttcttttttcatgttttttccccataattttgttttaaggtttctagtccttcttttcttccttccattattttaggtattcttccttttttttcctctagtttttgtttttagttttgttattgttttgttttgttttrgtattcttcctttagagcttagttcagatgactcttatccacagtctctggggtcctctgggtcttcccttgcattccagccatcctcttgagagactttgtgtggctgattcatttttgttcaggggttcttttcagtaggaagtttctgtcttatggtgatagttggttgattgtttttactgagagagtccttgtcctgcattgtgaaaatttccctccagggcttctctggggtccttaaagttamaggcagggtggttctgttgggtaacataggcaggtggagaggataaataaatttagaattataaaccacctaaaaaagttgccccatctcttctcccagtataggccactggcctgagtcactgtctcttttccttaaaaaatcatgaaatctggtggggcatggtggctcacacctgtaatctcagcactctgggaggctgagatgggcagatcacttaaggtcagtagttcgagaccagcctggccaatgtgttgaaaccccatctctactaaaaatacaaaaaattagctgggcatggtggctcgcgcctgtagtcccagctactcgggagactgaggcaggagaatcgcttgaacccaggaggcagaggttgcagtgagccgagctcgtgccattgcacttcagtctgggtaacagagcaagactctgtctcaaaagaaaaaaaaaaaaattaatgaaatctgcacgctctctcctgcttcagagccaggaagactgggagttagaagttagaaaatcaagttcaaacaggctttcaacaattaggtgacttactggcttatgtagttgaaaagggaagggatagcctgcaaatgacctaggctcttacacccactgacatcccacattagatgacctttctctaaagccttctccttgccttttctctctccgtcgtttctcgaactctccaacacaactccagatggattaatcctttcgaatcacagcgggaaatgctgctctgcagctcagaaccctgcaaaggctcactttgtgcctctggtgggaagtccgaagcattgtggttggcagcctaggccattcatttctccagctttatctcatccgaccctgcttgacacatccttaaatccattccagcagaactcctctctcttcctctcactcccactctgaactgtcccttctctgaagggacatttgcctatggcccttgcctgtgtgatatttgcctatggcctttgcccgtagcatccatgttctggtttgtattggagttatttgtgtgtctgttttacaccaccccttcattcactgagttcttggagggaggaaagccatgtctgacttaccgtctattggccgtggtgccaggcagaaggcatgtcacgtaagagtygctccagtgggcctcagtgaattggggcacccccagtgctcttgctggtgattcagttaagccaggctagtggcccctgtgctgcacagggtgggtacatgcacttcagcagagtctcctgaggaacccctggcttagtgttattgcatcagcacacaagagctcaaccctggcagtgaggtgggagtacagccagagagagcattgcccctgcgtggtgtctccctctcccccgttcctgggcctcctggtttggccccactccaccattactcttccttcaggatactcttctggcccggcagctgtcttgaaagcccctgtgcagtttcaaaatgctccgtttggactgcagcaaatcctgcctagtagcgttgtctgatcatgtgaatgtgatgccttcccggtcwggcgcctcyggggtgtactgggcaagtcggcccacgcctccataggccttgcatgcagcagggctcacaacacacctctgttgcttaagggtgtccattcaagtcaccctgctcccagtactgaccccagggtagacaaaacggattccgtaagacattcaagccaacagtcaggaacctgatgtagctgttgggtgaccatacttgtatctaggaggctatcctgagcctagcacagagcctggcatgtggtaaactctctatgaaggaattaatgagttgatgggtgcatcttttgatgggtgcatcttttgatctcctccaacagattacaacagcagtgaattgaaaacagcctgcaggaagcatgagctgtatgtgagtttccaagacctgggatggcaggtgagttctctggacacgggggayaaaggtcctttctcagcagtttactctcatctgaatggtggcagccattaccaaacacccagagcttgattgaaggctgagctgcttccttctgtggaagtcctgaggagccctcccaaatgctcaggctcctggagtaaggcagaggaagcttagtctgtggggcaccaggcgctccaacaccttcctagggtgcctgagctctgtgatccctcaaaaatcaatagccacatttcccaatattctcacctcatcctttcaaagcccataggacatacatttatttgggcatttaaacaaattttaattgagacagggktggaaaaaaattacctaatggttaacatctccaatggctgcaaaccagctcaccaaacgatgcagaagagcacacgtytgcctcgtacctgagaaccatcactagtttgtaagaaaggcagcaactttaatcacaggtggtgagcgataaaaggtagcttccatatgcaggtggcactacttccgcaggagcaccgtgggctcctggagaggcttgcttgggtccaagcacatattgctggcaacctacgtgcttccaggtagcagctgaggccctgtgggcctctgcaaggagcgagggytctggggtcagatggaccaggttcacttcccagcattgccacttgaatgtgaacttggacaaattcctaagccttcctgcgtctgtatccttgcctgtgcaatgtgaaaaataccttttcacagcattcctgaaaagcacaaatagtgtgagaagtgcatgctcatcttttgttgcttcctttgcatgaaattaaggactggatcattgcacccaagggctatgctgccaattactgtgatggagaatgctccttcccactcaacgcacacatgaatgcaaccaaccacgcgattgtgcagaccttggtgagctctcggagactttgttttgtaagtgggagtaagccaagaccaggtgtcatttctaaggtacyttctccccttctgttttggaacaggttcaccttatgaaccccgagtatgtccccaaaccgtgctgtgcgccaactaagctaaatgccatctcggttctttactttgatgacaactccaatgtcattctgaaaaaatacaggaatatggttgtaagagcttgtggatgccactaactcgaaaccagatgctggggacacacattctgccttggattcctagattacatctgccttaaaaaaacacggaagcacagttggaggtgggacgatgagactttgaaactatctcatgccagtgccttattacccaggaagattttaaaggacctcattaataatttgctcacttggtaaatgacgtgagtagttgttggtctgtagcaagctgagtttggatgtctgtagcataaggtctggtaactgcagaaacataaccgtgaagctcttcctaccctcctcccccaaaaacccaccaaaattagttttagctgtagatcaagctatttggggtgtttgttagtaaatagggaaaataatctcaaaggagttaaatgtattcttggctaaaggatcagctggttcagtactgtctatcaaaggtagattttacagagaacagaaatcggggaagtggggggaacgcctctgttcagttcattcccagaagtccacaggacgcacagcccaggccacagccagggctccacggggcgcccttgtctcagtcattgctgttgtatgttcgtgctggagttttgttggtgtgaaaatacacttatttcagccaaaacataccatttctacacctcaatcctccatttgctgtactctttgctagtaccaaaagtagactgattacactgaggtgaggctacaaggggtgtgtaaccgtgtaacacgtgaaggcartgctcacctcttctttaccagaacggttctttgaccagcacattaacttctggactgccggctctagtaccttttcagtaaagtggttctctgcctttttactatacagcataccacgccacagggttagaaccaacraagaaaataaaatgagggtgcccagcttataagaatggtgttagggggatgagcatgctgtttatgaacggaaatcatgatttcccttgtagaaagtgaggctcagattaaattttagaatattttctaaatgtctttttcacaatcatgtactgggaaggcaatttcatactaaactgattaaataatacatttataatctacaactgtttgcacttacagctttttttgtaaatataaactataatttattgtctattttatatctgttttgctgtaacattgaaggaaagaccagacttttaaaaaaaaagagtttatttagaaagtatcatagtgtaaacaaacaaattgtaccactttgattttcttggaatacaagactcgtgatgcaaagctgaagttgtgtgtacaagactcttgacagttgtgcttctctaggaggttgggtttttttaaaaaaagaattatctgtgaaccatacgtgattaataaagatttcctttaaggcagaggctggtcgagatgctgctgttatcttctgcctcagacagacagtataagtggtcttgtttctaagattcctaccaccagttactttgggccaagtatccacatccccttgcgtatgggaggtgggtgaagagtgttggatgcaaagtggttattatgggaagtagctcgatggtaaaaggacaaacacctatctatcttagagcttaagcctgtatgtgcttattcccaagggagatagaggtgtttaatcacaaggacagcatgagttagaggacactggcatcaacagctgccacagccgtgcacaccagggccagagcagcccactgacatctgtctttggtcttgagatcaaatgcatcccattcttcatacattagaaggtcgacctccttgaagcagaccaagtatagcaagcctctaaaaggactactgagaaacagaatcagaaactctagaactctagttagggcccttcagcagggctgcagagcctccctggatacccaggcctgggaaagcctgtctggtcttgtcaccccaggtgacaaatacaactggaatctttcaatgagttaatgagatactgagaatgagcctcgtggaattttccatgcctaccctttctaaggaagacatccaacagttcatgtgggctctggcttcgtgttaacatgaggaactaaagacatgtttcaccccgtgagaaacagaaggatcccctgaacagtaactgatttgacaagtatcgacacataaagttatggcatcagcattctcttactcaggcacggtcagaagtaacgctgctttcatcacggctaacctctcacactgagagaagtattcacagcaacagaagctccagcagcggccgtgaaggtatcttccagaggtgtgggtttttgcatttcaatctgctccatgctacggaccaacacagtattgagtcaactgtgaccttaagatcagaggaacgtcaatactgccacaaggccacctttccagaactcgtgggcaggtaaactatgctttggatgtgctttctttcaccaaaatcactcaactcaggagccacaaatagtccagcaatttcatttccctcaacgctattttagtctcaaaggaaaccatgtaaatttcatcaagagaaggtcaaaggggatatatcgccactgaaaatgtttacacagtgaccatgagttacacatttacttagagaaacttaacttaataaagaatctgtagagtgtgttggcttggaaaacacacacacaaagaagatacctcacgcttagtatgttctgctttctgaacagccaccactgggaacccagtggcctctgtgggactgaactcctaaacgcagggtgcgggagctgggcaggagaggtgacctccaactgtgttcctaaagttcgtctttcgcttggctcaggacaaagcggtgtaacgagtcaaggtctctgcctccactgtgctcactgactttcttccctcctcggaaaagcaataacgtggggtagcctcgtaccttaaaacaaaaaagaaaaaagtttgcaaaccagcggtccagatcacatgcaaattgcttcctaaataaaaccagatacactcctaccgttgtggctggaaaaattctgtggctaatttttaaaggtgtatattccattaaaacaggagcagactactgtttagaaagcacagccgtggggctgtgtgttcacttctgaattcaaaatgacatcattaaagatcagcctcaaaggaacgactttaccctaaagcagacgctttcagtctttactgtgcacacgatcacctgcggatctgctgaaggtgcagatttggattgagcaggcctgggagtctgcatttccaatgacctccctggcgatgccctggtggtctgcagaccagaccatgagagcaagatcctcttgaggatacatgtttcagtggcaactcgtttctaagaattttagggcacaaaaaacaactggtatcttttaatgataaggaaactatgtctgggttacgtctattctccatctaaagggctccaaaagtgtctgaataacaaagaagaaaaaaaatgacaaatcttccaggccatcagactgtgctaacagcttggaatgaaggcagtagttaacccaagcacaggaccgacttgctggcatggccctttcagaaaggaggttatgttgaaatgattcttagattcagccactgcattttataatgctggcttatgtgtgaaaaatgagcgactcgggtatttatggcaaaggctacagaccactggtcaatcatcaagagtcgcggtgtgggaagccccacagtctatggcgtggggtctgttacttcacggccttgttactcagacagcaaggcctgaaaacctgcactgaaacatggatactaactacaaagcgggcgaagaagaatgccttccctttgagagaggatctcttttgcttctccaaacaaacaactcaaagggacataaaaaccacattgttgagaagatgagagcagagtgagttatcgtggttgaggcacagttcccttgggatctgcccccatactgagagctcccataagcatccatccaagtacccaccgaatacttgctgcagatattccgttcagcagtgcagtctacttcggcgatcttgacccccgccagaccagggaattcctttttagagagttcctcccaagtaggagccagagtcttacaatgaccacacctaagacgagaaaaatggcagcttcgttgaaatcctgggtcgagatcattcacctacactctgctgccaagacaagctctgtttcttctgtatgggacagtcaacaattgcctagaaatttgtaaaataccaaattctcccactgggtgcacattaactcttcctcctcctatcccaaatgaagaacccaaaagttgatccaaggtagactttcagataatgtgacagaagcaagccagtctcaaaacaagttgagattctgagaccatttccatgccatggtgaactgtgctaactggtttatgaaagcacaggagcagaggaacagggaacagggcagatgccacacaatttctaaaaggtcacttgaatgccaaagacattttagatttgattgcttatggtctcacaatttcaaaaccattttaaggcctccttggtacttcagcgatgtggggtgagcatcaaggccatgattaagtttggttcaaaccctcccttctacccgactctgttcccttgtctcttctgaccccctcctgccgtatggatggctccccttcagccaaaggggatcctcctttttgatacttgatctgtggagctttaggtttttaaatgttgcaaatgatttgaaaggcattgctatggttcgttcaagtcctgtgcttattaactttttacccctatggttagtttctcaggaacatgtggagtgtaacaaacaagaaaagtgacgcctttatcatgtttagataaacaatctactgttgtcctaacactctgcttttccaaatggattgttttatttgtgaagacaaaaagttactcccatttttcagctgagggaactggggttcaaaggaattaaaggacatccaagtttactatacagtcattcacggtaagtcttagaaccaaggttgtctggatctcacactacctgcaatccatttctgctctggtctccaagaccacgtggcatgcaggttcaggaaactgcgtagcatactgaatggctctaacagactctactggatttctctacaaaagaaatccgagtacttaaaagaaccgaggagcaaagctacatcatgacactcattgtttagccaaaaagaaaagccatctatttggaaaagtgcagataccacaaaactgaatatggccatcataatttgcctccatttttatgttttctccaaagttgatataactttagcctcattctccatatataatcaaagttgatataactgtagcctcattctccatatataattaaggccattgaagtttaaaatatttgaatataggagcatgataacggttccttatttcctacaacatgacctacatataaatgtaacatgtgcccaacattgagtctggaggggtggcagatgagctgaaaaacatgatgtgacttagtacacatggacaaagtagtttctaattaaacagccacttaccatggagcataaaacttgatgaaggttattccttctgcaatggtgtcatcgaagttattttcagtgagtgccaacacagtgcccttcaagggaggaaaaagccacagttcaagtacatcccttaaagttgagcagggccatgctttgggattgcagatacacgaatcagtaattttttaaaaatgcagttacgtaggctccaaggtcacacagaaatacctacacaatctgcatttcataggctacacacaaagggaggctggcagcctctgaagggcagagagatcaatgcaagtccctgggtcccaagcctgggagatgtggtgaggaggtggctggatactgtacaggggatgaaggtggggagggggactgtcttttggggatgaggcaggttgaaaactctccagggcgctgtggtgtggaccaggcagccctgggtgtctgacacttgagtctgcacctctaagcctggagtctccaggatacccactgaagtctcatcctcagccgcttttctcactggccaccctattctcctagcaccctttgtgacatcctctctatgcaacagaaagaacctagttacaatagcaaaggcaatgatacctgttttacattgaacataaaaatggaaagcagcctgttctaagtcaatgtgaaaaacgctgatggaagctctggctggagaatttaagggaaaggtgctacatggtagtctgctttaaagccattctcccttgacagttctttacagaatgacgtctatgtgtttctccaaaaatggatctgcgattctctcctgagagcaggaatgggatgatttatcacgtggctaagtgtaccagggctgctccatttgagtctggcatcgagtaacatgtcagtgacggaggccaagggggccactgtggaacactaccatctttatgtccagaaacatgacgccacacgcactgaaaagacccacttcatggtggaaaactgcattataaatagaaatggtgctgcgatgaaaacatccgtggtatataattatactcaatttgggatgacctttgtaaccaccatgacacatacactcctctaacataagtggtcctgacaactacaaaatcagctgtttacttcttcaaccaaaacgtcaacttttaaacaacactcaggccatccccgacctacaagagcccaactagggacagggttgtaggggtgaggaggcctggtgtggccccaccagggaggaggggttggtggccccactggtttttccaaatccaaactcctggccttcaggcatgacttctacctgaagaggatgacacgggcactctcgtccagtgcagacctcctgccgcagccccaggctcatggttggaactgccactggacactgccacctacacagccgaaagccttgaagatcaacaccttgaaaaccaagctcatccctttcctcgagctctggccccgcccctgtgctgggtaccatcctccaccagatatgcgggaatcagactcgcctcggaccctccctccctctcct

SEQ ID NO: 96197 - DNA, 15981 bp, Homo sapiens
tcactgaatcttaactttcatccccagctcccagctacagattcatattgcccccagtgtctttacttacatgttcacactggctcccaacttgagcatgttctctagtcctttggttacagctgacacagaccgtgtggagtgattctggccccagtaatccagccagcctgtgtagtactcagagtttacctagagtgtgaaatgaaaggagtgtgagtgagatggaactgagctggacccattcctatccctgattccctgactcctctctggcccctcaccaatggcccatggggttcatacttccgaagcagggtaaagattttggtcatgttgtcagctgcggaaaggaggcaaaagaaaaagataaatgtcgtggaagaggtgtcctttccccagactccactcccagcccttgcttgagacctgggccaaaatctacagtggtatagagtccccggagggagccacacttgagtccttcaggcccatctgtggtgaagagcaagatcttttctcctagcagtgcacggaagagcccagccaagtgcctcatgtagctgaagtcacaggctctgtagctaccatattcattctccacctgccagaggggagggaaagtggaacccagctatgggatggaggtcaaggaccccttgtaccttcttcccctgctccagtcacttcccccttgtacctgaatgctaatgatgttgcccccattgtgataaagccatggatatatcttgggcagcaagaccttgaaccaggagtccactgcggcaaggaagtctaaaggaaggagcagagcttctgtgttaggtgctaccatcacacttgctcaccactaaatatgggaagcaatgactcttgtcaagaaattcccaaccctaagcaccttgtatatttgcacgccaatgaaatttgaacataggaaaccttaaaatagtgtttcttaaaaacaaatgggccgggcgtggcggctcacgcctgtaatcccagcactttgggaggcggaggcaggcagatcacgaggtcaagagattgagaccatcctggccaacatggtgaaacactgtctctactaaaaatacaaaaaaattagctgggcatggtggcaggtgcctgtaatcccagctactcaggaggctgagacaggagaatcgcttgaacccgggaggcagaggttgcagtgagccgagactgcaccactgcactccagcctgggcaacaagagcaaaactccatctcaaaacaaacaaacaaaaatggtggtatatggggagactaaaatatagaggggatggccgggtgtggtggctcacgcctgtaatcccagcactttctgaggccaaggcaggggtggatgacctgaggtcaggagtttgagaccctcatggccaacatggcaaaaacctgtctctactaaaaatacaaaaaattagccgggcaaggtggtaggtgcctgcaatcccaattactcgggaggctgaggcaggagaatcacttgaacccaatcggaggttgcagtgagccaaggtcacgtgactgcactccagcctgggcaacagagcaagactccgtctcaaaaaaaaataacaattatgccgggtgcggcggctcacacctgtaatcccagcactttgggaggccaaggctggcagatcacgaggtcaggagatcgagaccatcctggctaacacagtgaaaccccatctctactaaaaatacaaaaaatagccgggtgtgttggtgggcacctgtagtcccagctactcaggaggctgaggcaggagaatggcgtgaacctgggaggtggagcttgcagtgagccgagattgcgccactgcactccagcctgggtgatagagcgagactccatctcaaaaataaaacaaaataaaaataatatatatatatgtgtgtgtgtgtgtgtgtgtgtgtgtgtgtatatatatatatatatatatatacatacatatatatgtatgtatagagagagcgagagagagaccaggaaggcctcaccaaggtgacttctgcaggaggcttgtgatgaaggagcaccacatgcaaaggcctcaaagcccaaggcctggtgggtctgaagaacagcaatgaggccactgtggctggagcagagtgaacatgggggagaagagcaataatgtcgaggaggtgactggggccaattgtgtaggacctaccactttaaggaatttatggttcatattctgaatgagatgagaacctactagagaggtttaagcagagaaatgacaagatctgagatgtatctttaaacttatacttgaacaggatcacactggctactctactgagaacagattgtatgggggagagggcaaacaagggaaaccagttaggaagctataaaataagccagctgagagagatggtttggaccagggtgggggcaatgggggtgataaaaagcacttaaatttaatgtttgtcaagatacagctgataggattttctcttttttgagacaaagtctcttcaatctgtcacccaggctggagtgtagttgttcaatctcggctcactgcaacctctgacccccgggcccaagtgattctcctgcatcagcctcccaagtagctgggattacaggtgcccaccacctcgcccagccaattttttgtatttttagtagagatgggattttgccatgttggccaggtgggtctcaaactcctgacctcaggtcatgcacccgcctgggcctctgaaagtgctgggatcacaggcatgagccaccgcgcccagctgtttttttttttttaatcagtttcttccactatattataagctttacggcacaaggatgggggtctgtctggtcccccagtttctagcatcctgctgggcatgaaggaaacacttggtaaatgaatgatgacctccaatttgggaatggtctcttctgcttttggcacccaaatagcccattttacttacttgcttctgtgttaaatcctttgtctcaactcacctggatctgaggttcttagatgaatttcaggttttcgaagcaaccaggatgggagacccccctgagacaaacataaagagaacaaagaagcatgtaggttttgttttggggtgtggtggggaagctaggaagggaaggaaggaagggaaggaattgaatatagtgctggagatggccctagagtgtgggcagatgggagtagtctaggaactgcacaaggataactggttctatcccttctccagctaactcaccatctcccactctgcacagatgtaaggtcctggtctcagtatgaccaacaggttcgctagagctgcctcattcagaaaggcaatgaggtcccggctgccattaaagttatagaccccaggctgtggctcgtggtagttccagggcacataactgagaaaggaagaggttaataggaaccaaggtgaagagacgccagggaggcctaacggctcaggccttgcagggaatctccaggaagcggttggaaggaggtcctggcctgccctttcccacccttggcctaggagtcctggcagtcttcctgtcccgaccttctttataagggggcggtagaaaaagtagatcccatccctccgcggctcttgcgagcacttcttacaactgtatggcgttgaggccgctccatcgcatcttcaaaagccggtcggcccaaagcacccgcggtacccgaaagtagtgcaggctgccagacacatagcggaacggggccccgtctaggagaaaccggtcatgacccctatccactacgaacgaccgagtgtctgcctataaagagaaagagacgctgctcagcagacgcctggagggagcgtcgagggtcagcgcctgccaagagcggaagagatggaactagccctgcgggttgtttggttgttactttggactttctctcatccgctggatctgatcccgctcaccgcacccggcaggctggttcaccgtctcatcttacctggggcagcagtagcgtcaggctgagcggcagcagcagggaacgaaggcaggacagcttcttgggagccatggcgtttacagcgctcctctagtctgagacggcggacagaccgtcacgtgtcggattcctgggagggaacctcagcgagcaagggggcggaaaccacctcaagttgccaggcgtttagcctggacttcctctccagcctgcagccacccccttactctactagtttgtaaaatttctacatcatgttaaagtgcagttcacgaaccagcttcatcgacgtcacctgggaacttgttagaaatggagaatctggctgggcacgatggctcacgcctgtaatcccaacactttgggaggccgaggcgggtggatcacttgaggtcaggagttcaagaccagcttggccaacagggcaaaaccctgtctctactaaaaatacaaaaattagccgggcctggtggcacgcgcctgtattccaagctactccgagggtgggggtgggggtgggggtgggggtgggggtaggggctgaggcaggagaattgcttgaacccggaaggcggaggttgcagtgaaccgagatcctgccactgcactccagcctgggcaacagagcgagactctgtctcaaaaaacacaaacaaacaaacaaaagaaatgtaaaatctcagatcctacctcagacctatagaatcagaatttgtattttaacaagattcccaggtgatcctaggcaccttcaaaattgagaagcatggctttacttgactgggctccctgaggacagggagtgccctgttcatctcaaatcctcagcctctagcacagggccgggtatatagtaggttaaatctggatgaatcaatgtcataaccaaaaggctaaaacaggttcagaaccaggggaaaccattggaaaatcttcagggtgatccggggtgtggaagggaggaaccaggtcacaagaaggacctctttcctggagagtcctgtttcagcaaaacagccattccctcctggccattccaccttctttggaagtgcacccctctccagcttacccctgcctgcctccgcaacagatattaaggacaactgctttgtgccaaagctcgaaaatctgtgaatttccgttccttttgcctttacagtctcaagaatgggatgtgaagatcagggtaataataattacggtttattgacacgtactgaaggctatgtgtcagatattgtattaaacactgtacatctcatttaatcttcaactccatgaggtagataattatttccattttacagaggaggagaggaaaggacagaaacattaagtagcctgtccaaggtcacacaactacgttaacggagctgtcatttgaactagtcagtctggcctcacagttaagctacttaaccttatgtactattatacctattttacagctaccaaaagtaaggatccgagaggttaagtaacttgcccgaggttacacagctagcatgctattaacactcaatttagaaactggaagtctggttcacaagcctgagctcttaaccactgagactaggggtagtgggatacaggccagagcccagaaggttgtacgggatcaggagaccaggccaccagacccgcccctcactggatccccctccaggctgcagtgtagttggccgctttctgccccagagcgccagaggtatgaagcctcctacctccaacattgggagatggaggtcctgggggcctcgggccgagcccggctttgctcccctttggcgtaggtgcctgcgtcttgacccccaccgaaggccaagtagagaaccctcaccagggtcctgggacccgtccacccctacacctagctagcccggagcctctcagctccgcgtccccacatcctccggatgcccagcggttgctgagataccgcgggccgttacgccggcgcggactgatgatgtcagcactgcttccggtcggtggcgcttctctctggcccgagccaggtcagtccggsagkgcagatggcccatcccgggctctgggctcctagaccggggtgggccctgccaggagtgggcctgagcctcgcacgtcctctgaaactacgctatgctctgcttttgcggcgcgatgggcgtgggagcgggggctgcccaaagatgggctggggttggaggaagtggcccggtagccgctgtgtgtcctgaggccgtaaggcgcctgaccccacccctgaagctggcgacggagcagggcctgttttctctacactatagtgtaggttccagagacctgggcctgagctctccgcattggtacttcatgggtcgtctggattgtgccggacctgtgaccctgccgttgttttctttccagcatgatccgctgggcccccagcgcatctcctggaagagcccactcaccctggacgagctcttcggtagcctcagaccgtccttgaagaggatgactgagacattatgggccacgcgctgtgtgtctgctctcggggaactgtcatcattgacaataagcgctacctcttcatccagaaactgggggaggggtgagtgtttggaagtcagttaactagtcctcaagtttatgatcattgaaggacagcggtgtgcatatgcttggggcacaagggttttatccctatccctgtcctctctcacctgacagaacctagctacacagtatcaagaaggtggattctggagccaggcctgctaaatccacctcgtgtgaccttgataaaccatgtttttttcatcagcttaatggagatgattattatccctcactgatggagttgtgaggattaaatgagataatgtgtataaaatgtctcacccaatgcggggttgacaagtacttgataagtgttggctattatttatttagcatctgtcaagtgcagaggtctctattacgaccataggacctcaaagatttctatatctctgctcctgaggagctcacggtgtaatattcttcagatttctcttagagccacatcttgggaaggtttctgctaaatgggaaggacaccccactccccaccaggaaatttctctaggtccaagccatgtgggagatgaccatggccctttattgacccctttggcccacagtgggttcagctatgtggacctagtggaagggttacatgatggacacttctacgccctgaagcgaatcctgtgtcaygagcagcaggaccgggaggaggcccagcgagaagccgacatgcatcgcctcttcaatcaccccaacatccttcgcctcgtggcttactgtctgagggaacggggtgctaagcatgaggcctggctgctgctaccattcttcaaggtcagaaagactcctggttatggagggggttgcagcagagccacctactcaagggctgtgtgagcagtccagcatgttaggaagcagggaccatgtcctgggtttggccactttagattttgagtttgaggtgtgtatcatgaaagggctgataggctttgacatagggaagggatcaggcctaaggagcagaggctccaaaaacatctccaactgtagggaaacttgtgttgcagagaggtacgctgtggaatgagatagaaaggctgaaggacaaaggcaacttcctgaccgaggatcaaatcctttggctgctgctggggatctgcagaggccttgaggccattcatgccaagggttatgcccacaggtcagtgggaggaccctgtgtgcttgctggggcccagaggaagagcctcaccaggagacatgggaggtctctgttctcccaagaaacagcctgtatgattcttttgcttgctgggattccagccttcctgtccagagatgctcataggtcacttctacttctctacagagacttgaagcccaccaatatattgcttggagatgaggggcagccagttttaatggacttgggttccatgaatcaagcatgcatccatgtggagggctcccgccaggctctgaccctgcaggtaaaagagtctccaggttccttttctcacctgttccccattcccaccccttctggtgcatgtcccagtttggtcacatgaccatgacctgtgccccacttttgagctctgggatcactgttccaggactgggcagcccagcggtgcaccatctcctaccgagccccagagctcttctctgtgcagagtcactgtgtcatcgrtgagcggactgatgtctgggtgaggagcatrtgggtgggtatctgggtagggagggctgtggctctgtacccaccgtggagtagagtaggttgttggtttctgttgcatggggcgccaggaaccacaatatgtccccatccacttcaacttccttcctgggaaatgtcactgatactgtacccagttgtaccggatgtggtataatctgtgcccctgaacaaggtgagtacagctcagtgtcagtagtgaaggcactggctaagcaggggctaagctaaacaggggctgcggaggcctccagctgactggcagtttctctggaccctggtggtgccatgtggctgaggtcagcgtattctttttagcttatggagtctccttttaccacagaagtaaagggagagatgtcacctccactggtccccttctagggactaatcaagttatgctcagtccctaggctgcgtgctatatgccatgatgtttggggaaggcccttatgacatggtgttccaaaagggtgacagtgtggcccttgctgtgcagaaccaactcagcatcccacaaagccccaggtgagtgagcaacgaatagggcatcaagtgtttcagactcccccctggtattagctgagttgacagataggtgtcatccggtcaccctgggctcctycctccacaggcattcttcagcattgyggcagctcctgaactcgatgatgaccgtggacccgcatcagcgtcctcacattcctctcctcctcagtcagctggaggcgctkcagcccccagctcctggccaacatactacccaaatctgaaaaagcagcatgttgagaagatggccccttgtgccttggaaagaggttcccatccctcattggaatcaccacccattccatccaggacttctcttacacttgrgggtagcggggtcaggacaatcatctcagtcctgcatcttttyttctgctttcttccctccaagagcaaaacctgggcaaggggacttactgagtgggggtgggtgggggttgggaaaagggaaactggtgggatatggaacatggctctgagcaggactgttgagctcacatagtgttctgactccaaatctgggagcaggagaatgtgtaaacaagaataaagtggaagcaggttggtgtaratcttagtctcagtgttcctggagtgagagaagaggtgcaaggggcccaaagtcwggttgccatttcaggcgaactgcctgggaaggaggaatggtgcaragtcggcaatggtgtgacttcattctacaggaggttggttagcagtggacagttctagcttgtcttagatcaaaacttaaagctgcttgggctcaagctggcatctgcctgtgtcaagaactagggccccctaaaaacactcaactagttctttccttccttcactcctggggtgagtagcttagtcaaagctgcctagccggtttgctaggcaagggcctctgggtggagacacctgaggaagctttgagacaggtagattacaggtctcccatcctcagcctaggggcgaggggagtggaggtggcagcggcagctgttttggcctgtgtctccctgatcgttcaagctcatacatggttaatgattaatgaggcagtgtggtgtggcagtatccagctgccacttcctgcctactctgctgagtaaacaggggccctgtcttagctgggcttcaaacctgttccctagggaagggctctgttccctgaatcaccagggaggaaaggcaagggcagggttggcatctcctgctcttttgtgatccaagcctcctcccccgaaccatgtctaccccacagtatgacatcagcatggggcctggggctcctgttagcaaagttgaagctttccccagggccctagcaggagtctcccactagctagcacagaggctgaggccagaaagaaatcacaaacagaggggagatgacctgacttttaatggcacagccccagctccagcaaagcagcaagacaggaagctatgcaaagctgctcagaggtgcagtggcacaaacaactctaggagatcgcctgtgttccctcccatcccccaagcttatgacgtggctccatgcccaggaactctgggccagcccagccccactcccaaaccctcataatgcacagaggagcctgggccaagccttgcttccagagttggtaaatgtagaggcagcaggaagaacagggtagcagtctaactttcaaagacagaaaccactggattatactcctacttggaaaggagctgaagactcatccttcaacagtttgtgcctggattttggtcctcatttcctccctatactgagtaaccctaggacttcaatttaaagtccctggggttatgcttcctgggcctggcaagaacccctttgcaggtctcaccttcagcgatggaagggataagggtcatgaacagcaaacagagcagcagcagcatgaaggggaaggcagcagaagctcaagcactcagagggaacaagaaaccgtgcaaggaaactgtttatttcgaaaggattttgcaataaacatagtgaataggctccaggcagctgctttattcttctccctcatcctcgtcctcataggagtcgatgcccacctcctcataatccttctccagggcagccatatcctcacgggcctcggagaactcaccctcctccatgccctcacccacataccagtgcacaaacgccctcttggcatacatcaggtcgaacttgtggtccaggcgggcccaggcctcggcgatggcggtcgtgttgctcagcatgcacacggcacgctgcaccttggccaggtcacccccaggcaccacagtgggaggctggtagttgataccaaccttgaagcctgtggggcaccagtccacaaactgaatgctgcgcttggtcttgatggcggcaatggcagcgttgacatccttgggcaccacatctccacggtacagcaggcagcaggccatgtacttgccgtgccggggatcacactttaccatctggttggcaggctcaaagcaggcattggtgatctctgccaccgacagctgctcgtggtatgccttttctgcagagatgactggtgcataggtggccagggggaagtggatgcgagggtagggcaccaggttggtctggaactctgtcaggtccacattgagggccccgtcaaagcgcagagaagctgtgatggaggagacaatttggctaatgaggcgattgaggttggtgtaggttgggcgctcgatgtctaggttgcggcggcagatgtcatagattgcttcgttgtccaccatgaaggcacagtctgagtgctccagggtggtgtgggtggtcaggatagagttgtagggctcgaccacggctgtagacacctggggggctgggtagatggagaattccagcttggatttcttgccatagtcaacagagagccgctccatcaggagtgaggtgaagccagagccagtgcccccaccaaagctgtggaacaccaggaagccctgaagtcctgtgcactggtcagactgaaaggcaagaacgagaaagaacagtttaggtaggggaggggcctgagggactctatcacctggctccataaagcgtaagatacatcagcagtcagggcaaatactgaggatgccatagcagcaccacactcgagaccatgtatagttagagatgacctcctgaaaggatctgaaaaaaaatattcctgaccattagcacagtctcaaaagttccctccctcccaagacacactctcaccagcttgcggatccgatccagcactgggtcaatgatctccttgccaatggtatagtgaccacgggcatagttgttggcagcatcctctttcccagtgatgagctgctctgggtggaagagctgtcggtatgggccatttcggatctcatctggaagggcaaaaaccacaaagctatgctcagcagggaccttcctcccccagggtggtagctgtggccagatgcatggaaggactcatcctcctgccagcctgagataccagagtgtgagagaaacccagaccagctgcccaggccagtctcagatcagcttgccttctgcagcttcaagtacggctaggaattttcagggctaggaatgcctggtctaaataccctctctctccagggagaagctttgagtcatgctccacccccttcaattttgtccccacttcctctcaccaatgaccgtaggctccagatccacaaaaactgcccggggtacgtgttttccagcaccagtttcacagaagaaggtggtgaaggagtcgtcccctccaccaatggtcttgtcactgggcatctgcccatcaggctgaatcccatgttccaagcaatagagctcccagcaggcattgcccatctggacacctgcctgccccacgtggactgagatgcattcacgctgagggatagagagaggggacacagcatgagccccacatccacaagtcctcaccttgcgagtctctcttccaccctatcatctaccagctaggatgactcagttggcaagagtggagggttggggctgggcagaggtgagaagagagtagcagcctgcccgggctcccaggtacaggactccccacctggaggcacccagcaatgcaggccaacctcttagcccacttctcagtggggaatctgtcaagtgagcactgtggctccacatgacaaaaggtttcctagaggtatgggtttacagctagaggccccccccccacttgattaattatttgctttgagtatgaacagctagaattcatagaaccctttccctctttctttcctgtaagctgcagaggtgtctcagccatccaatctggcatcaactgaccacacgccatcaggatgccctcctccctcacctttaaatcccatctggctctggggatcaatcccatctggctcctctccccacctccacccccgcaccctgggtgtcttcaccactttcatctcccgtgtcagcccgcacggaaatagcggcggtaatgcttgtaagctcagacagcaggggccagcaataaggtttgagggtactggggcgctcactgccttaggctccgtccctgtcagcccgaaattaacccctaaagcactaaagtccggcagggcccgcgcgctcttcccacaccgaaatggcggggtgacggtttccaaatacccagaaaggaagtggaacctgcggtgaggccccagaggtgacccgccttgtcccgggcaggatgggcgccatcctgcagcccagccctacatccgctctccctctggagtctttacagttatttcccagcccaaagcggggattgggtttcggcccccgctcctgggctataaataccaccccctacatgcacctctctcccctccccccaacctggcctcggcccgcgcagtgctcagcgccagctgtctctgcccatccgcgcacccgggcttcggctggagagggccagctcgcttcaggaggccgaaccccgttcccaccaaccctctcagctcagacgcggggtgctgagtcacggggggggggtggttctgtggatagttggaatgcatacacagaggaaagggggatgcggcaccaggtaacctgaccccttccaccttctagcgccaagcacgtgctcggtcagtgctgaggaccagggactggggatgtaagagggcagccaaacccgtcttcttttgcccgcggaaaggacggggcgcgggcccgcgtgactctcatacagagtcgggacacaaatgctcgtaaggcaggagcagagtgccaggaagggttcctctctgttactgaagagtcgcactccaccccaagccccaaccccagccaccgaaggtgaactatacggctcggccaaagtcaccaggagggggttggggagggaggatgcaaaaccctcgcacctcctggagacccggaacgcccggtggaggtccccgagcatgcctggaagaagtgtcccccaaaggacaggggcaattaggggacaggcgcgaccccggccgggccgcactcaccatggtgagtccgggcggtgcgtctcacgttgagtcggggtgacaggtctcagtgagaactgcgctagctgcagtgccgcaccgcccttataggcggggggggggcggggcccgcgttccccgctcgcccactagaggctgggcggcccgcaggccacgcctcccgggagggtaagcggcccccccgaggggcggagcctggcctggtaccctccccaagctgcgcgggggtccctcacctgtcccgctgggattaagagtcgcgattcgggctttaaccattctttcctcgttttgagcagacacgctgggctcccgagggcctccgcggagatgcagggtgctgtggcagggcgagtctcacctgcacctgcgtcctggaggcaccggtcatccaggtgttctgacttaggtcgggagcaggcgaggcggtccttcccaagcggccacagctggccttcacccctgcccttccagccctgcctcccaggagactcgggccggctgtgaggctgtggcgcgtccccggggagcccttgccagctgcctgacgcttcctggtccccggccggggcggcagcctttcgccgacgcctgtgggcggccgaggacccagaactgcacagcctgagccccagattgccaatgccttaggcgctcccgcagagtcgagccccgcagcctgtctgccggggccgaccccggaatctgccgcggctcgccggccgcccgcgggtcagtggcgctgtcatcagcgcagtcactatgatgccctcgctgcgggcacctgcccactcccctgctgccagaactgcgggagcgctgaccgggggacctcaggacctggattctcctccaggctaccctgtgtgaccttgagcaagtgacttaacctcactgagtccttgacattttcgtgggtgaaaaggagacagtgatgtcatagtggaaacattgttgtaagctatcaaaatgtctgttgcctctgaagagaaaagaagaaaatcgagattctcatatcttggatgattctgactcttggtctcttctgtctctaacccaagagcaggatctgcaacccgcaccttaatggtctcagcactcagcccctggtctccgcagaagcccttctttctacatttcattccgttctctccaccccatcttttcaagctacttctgctttctctttctctctctctctctctcttttgagtcagtgtcttgctgtgtcacccaggctagagtgcagtggtgcaatctcagctcattgcaacctccatctcccggctcaaggccatccttctacctcatccttccacctcagcctcctcagtagctgagaccacaggcgtgcaccaccaccatgcccagcttattttatttatttatctatttttgagatggagtttcgctcttgttgcccaggctggagtgcaatggcacgatttcggctcacctcaacacctgcctcgcgggttctagcgattctcctgcctcagcctctggagtagctgggattacaggcatggatgcctggatgatttttgtatttttagtagagacggggtttcaccatgttggtcaggctggtctccaactcctgaccttagatga

SEQ ID NO: 96198 - DNA, 19576 bp, Homo sapiens
  misc_feature (1)...(19576): n = A,T,C or G
agaccaggaggcagaatttgcagtgagctgagatagtgccactgtactccagcctaggtgacagagccagactccatctcaaaaaaataaacataaataaataaaaaaatacaatacaataatatttttgtaaggacaggatctcactatgttgccctggctggtctcgaactcctgggctcaagtaattctcccaccttggcctcccaaagtgttgagattacaagcatgagccaccatgccttgctaaaagggctgacttttaaatctccatatatttgacttatgcgtctttccatcaactggtttcaaacttgggaagggaaaaggtgttactctgggagcccttcacaccccaagaaatagccgtcatttagtgagcatctactatgtgctaggtcctgtatccataagatcttgtttaattctgaggttaatacagttattacacccactggaacagaagctctcagacaggccttggactgtttttcattgttctactctcaacaccccagtgttgcccggcatattagatgattaacatttgttggatgaacttgttcaatgaacacctattttatagatgtggagactgagactcaaagactcgcccaaggtggtaaatggaggagttgggattcaaacccaggttagcctgcaccaaatcatatgttgctcccccacctttttcttaggtgccctcacttcctgctcacagtggttccaggcagccctccagacaccacctcttctcagcctgccaggtcccgagtgcccagacagtgactcaggtgcctcaggggcagggagtgggtgacgcttcacaatgccctgcccaggctctgggaaggagggcatcgatgtagaggggagagtcccagcttctgggtctgaatgggggtagaggcttctttggggccagattttggggctatcagtgccctttggaaaacatcccccaacatctcctaggaggtggtgagggcctgggagaggccaggattgggggtggggagggaggtgagctcttcacctgccaagacggctagggatcgagagaggcagctcgtctcccttcctgtctgctgaaccagccagcccaccctgggcagctatatagccatctccctgaggtcttcctgctagtaatactctgctggcaggccctggcaggcctgggttggactgggtatggctgtggagaggtggcaacccagacctcctgaggcagctaggagcaccacccagcctggctcctggggactccctcagtgcaggggaaatgctttcatccctgatgattctgagccaaagtacaattgcctccttcaggcagacaaaagagacaggtttccaagctcagattctacccaacaaatttattccctgggctctgatgtgtcaggaacacgcctggcttcaaagctgtgttgtcaccattctctccttctggaacgccacctccccctgcttgtctcaatgttgccattccttccagcttaggtcacagccatccagaacctacccagccccagggagctctccctcttctgaattctttcagcacctacctcggtctctatttttcatttggcacttggtgtgggctgccttgtatgatatcacttggcttcttgtcaatgtcttatttccccaactcaatttttaacaattagtatgaatttgaacagttattaggtgcatatgcttcagaattcaaaaagtatcagagagatttaggaacaagaaaaataagtctctttcattttgttcccctcttggcagccaccactgttaatgtttttgttagtgtttccttccagagatgtctacatatatataggttgaatatcccttatcggaaatgcttgggaacagaagtgtttaggatttcagattttttcagattttgaaatattcgcatatacataatgaaatatcttggggctgaaacccaagtctaaatacgaaatttacttatgtttcatatacacctgatacacattgcatgaagggaatgttgtataatgttttaaataatttttttgttttgttttgttttgttttttgagatggagtttcactattgttgcccaggctggagtgcaatagcgtgatcttggcttactgcacctccaccttccaagttcaagtgattctcctgcctcagcctcccaggtagctgggattacacgtgcctaccaccatgccagctaatttttgtatttttagtagagacagggtttcaccatgttggccaggctggtctcaaactcctgacctcaggtgatcctccagacttcaggtgatcctcccgcctcggcctcccaaagtgctgggattataggcctgagccattgagcccagcctatgttttaaataattttgtgcatgaaacagtttgtgtatataaggtcaggtatggaattttccacttgtggcatcatgtcaggtactcaaaaagttttgaatttttgaacatttcacattttgggtttttggagtagggatgctccatctgtactaccatgcttgtatgcacatttagtatacactttgttctacaccttgttttttcagttaataataaatctggaagatggtccatatgaatactgttagctatgcctcattctatttggtcacaatataatattccatcgtatagcataccaacacttgttttaccagtctgctattaacgggtatttagattgtttccaatcttttgctattaaaaagaatgctacaacccttgtatgtattttttttgcacatatatatgaccatacattcttagaattgagatttctgggtcaaagattatgcattttaaatcttgctctctttaaaagtcacaccaggccgggcacggcggctcacgcctgcaatcccagctacttgggaggctgaggcaggagaactgcttgaacccgggaggcagaggttgccgtgagccaagattgcaccattgcactccagcctgggcaataagagtgaaactctgcctcaaaaaaaaaaaaaaaaaaaaagtcacatcaaattacccaccctcccactaccaatctataagaatgcctgtgccctcagccttgcccatacaatgtattcaacttttttcttttttttgtctttgtcaatcatccaataagtgaaacaaagtattttgttagggccatgtgcccgggtgcagtggctctggcctatagtcccagcactttgggaggctgaggcaggaggatcatctgaggccaggagtttgagaccagtctggccaacatggtgaaaccccatctctacaaaaaatacaaaaattagccaggggtggtggcacatgcctgtaatcccagctacttgggaggctgaggcaggggaattgcttgaacctgggaggttgcagtgagccaagatagtgccactgcactggagcctggatgacagagcaagactccatctcaaaaaacaaaaccccaaagtattttgttgtagctttattattattattcttttaaaaattattattatttgagatggagtttcactcttgttgcccaggctggagtgcaatggcacgatcttggctcactgcaacctccgcctcccgggttcaagtgattttcccgtctcagcctgccgagtagctgggattacaggcatgtgccaccacgcctggctactttttgtatttttggtagagacagggtttcaccatattggccaggctgatctgaaactcctgacctcaggtgatctacccgccttggcctcccaaagtgctgggattacaggcatgagccaccatgcctggcctgttgtagctttagtttacagtttttttgtgaatgagattgagcatcttttcatttgtttaaaagccagtatttcctcttctgtgagctgcctgtccctttgtccttttaaaaatgtcattgtctttcattagttggcatttctttgtggacaaaggaaattaaacctttgtctgctagatgtgctccatataatttccctcagttgtcatttgtctatgtcctatccccttgagcacagagattggaatttaaacttttttatattctttttcttaatataacaagacatacacggtaggtgctagacaaatgtctgttggcacagcagagtaagaagaaaaaggcagagatctggaaaatttggagtgacttaacccaaccactccttcctcttataccaagtctaacccttagtctttgtgtcagtcaggactcttataaacagcagaagctaactggcaaattgtttcaagtcccctgcccccaacaattatagagatatcggatagcacacagaatcaatgcaagggccagcaaacaagggtcagcaatcagacaggcacctagggaagctgggcagccagtaccacagtcaaggttgggcacaggacagcctgtgtaggagactcctgtcccctccaccctccgcagtgatcctcctactctcgtccctcacctgcggcagtagcgctgacacttcctcctccagacactagaggccgctgttggccccatcgcctccaccgccgccgcagaaatgaattcctaaaccagccttgctattccgtgacttgctccagattcaaagtcccagttggagcatccgattggcggagctcatgtcttctgcctgcaaccccagagccgagtcagggagagcaagcattggggctttgtggcaaatggtggcctgctttccattagggcccttgcgatgggaattccccaaatgtaggcaggaggttctgatggtgggcagccaggaaaccaggacactcacaccaccttcttctctcacgtccgcctcaaacccttctcgttggcgaagtattcctgggtcccccagcctaaagcacttttctggactcacataaccattattgcttgagccaatcacgatgccagcaggaccgcagtaacacctaattcgtaccatgtctcatttgactttcaaacaaccctaggcactacctatatttagtgagaaaaaaagagtgctcagagattttcccaagtctcacagtaatgccaggttgtactctgtttccaaagcctcgggtttcccagcgggctacactgatgggctggtatcttatcaagttcaagctctgcaaaggcagggcttgggccacattcttctttatacggcctggcagcatcttgaatgcagaaaaatgctcagctaacgcctttggattggcctggatgggatcaagcaggagccagttctggaaggtttcctaactctccaatgaggcctgaacccagggagcattttgaagtggaataggcctactcaggatcagtttgggaagacttgaacctggggaattccgttgtacggccccctttacctcacctcccccaaatgtgtcaaaactgtcaacaagaggtttgcaggtgttcattatttattcatcccacgggtagttttgaacccctacgactgctctaatagaccagtgagaaaaaacacacaattcctgtcctgtgaaatcgacattctagtgggggaggtgaatggtaataaaaaataatcaaaccaataaatgctaatttgtggctctaacaagcctgatgaaggaaatgccacgagatgctgtaaaaggcagttctgacctactcaggaaagccagggcagcctgctgggggacctggggctggagctgggagctgaagaagggggaggagttagaaccgtggtggggggagggagggaagagtctgagtcctcgaggtgggtgagtaagcatggatcatcgctcatgtttataagaaagtgacagaggaacctgggggccgagcggcttgtttgtgggctgccccagcctccgtgcgagcgcttctcgcttggatggaggcggggccgcagtctcccaggtcccagctggggctgacgtcgtcctggtgtgtgcccaaaatagccggctccgccctcttctcccggcagcccctgcaggcccccacccccccaggggacaggcggagccggccttctccccgtctctagtagtttccgcaccgctgacgcatgcctgcgcgcacagctgggccgggcgcgtcctacgcagcagccgcgagccgggctgcgggtgccagacggttcccggcggggggcaggggcggggcgccgcaggaggccgggactcctggcggaggaggtgcggccgggggcccgggtcaggctgggggccctggatcggactgctggagttggggggccccgatagggctcctgggcctgggcgtcgagatagctcttggccccggcctgcgggggcagataaggctgccggagggagcctagtcaccggccgcaagcagagcccgstgtgctccgcttccaactgggagcgccttccgccacccggggagggggactgctgcagccacagggtggggctcttggttctttccgcctgactccttctcttctgcagccccaaggaggcccgcctgacgactgaccagttgccatggcatcctactacgagatcctagacgtgccgcgaagtgcgtccgctgatgacatcaagaaggcgtaagtgcctccgtatgcaacagaagacctctcaccctccacccgccacsaccatggggcacttcagagtgacacctgtaggtgtctgagggaaccaggtcgttagaaagcactggggtgcttcttccgagtgacacctgcagggaggaaagagacccctggtagagtacaaggagaacgtccagagagtgaagtagttagttcctctgggagctgcactgtgttatgggttgttctccagttgatcttcccctcctcctcctcctcctcctcctttcccctcccctcccccttccccctagatttgggcattctcaggctgcagtgcaaagatgcagtgcaaagaggctctatgaggaggaggggccggtgtccctgtactcttcgaggccacatgtgccccaacctttgcagccccagtccagtgagccctagggaggggctagggaccctggcattgtatccgcttgtacatgtggtcccagcactggtggcggaggagagagggtggaacttgatgaaaatatcacagcagcggcagccctagcagctggggtggactgggacccgggggtgaaaggacagtgataggctaatgggaaaacaggtcgttcggttcctgggtgggaagtgcctgcatttgtcccccgactctctcctctgcayccactttctgcaggtatcggcgcaaggctctccagtggcacccagacaaaaacccagataataaagagtttgctgagaagaaatttaaggaggtggccgaggcatatgaagtgctgtctgacagtaagggccggggtcaggcaggacccagcacatcaccccctacttcatgccccagctcacattttcttaaagcaatgtctctgccacctagtttcctctgtgcctttttccagcctgacatttaagctcccccctcccacagggacagctcagtgtctgctccccagagtctggtaggagtggctggcatgagacctgaaaggggaaggaagcagggcaggtaactcatgtgagctgagcctcctgcgtgccaggcattggtgggtgtcatctccatgagttctcacagccgtcctatgaggcaggttctatcacccctattttacaggcaaggaaactgaggctgagagaggtgaagtaacttgctcaaggccacgcagagctggaatatgaatccaggtctgcctttttattgattcattcgaaaagtaattcagtgaatggtgacagtgtccggcactcgctgggtgctggggaaactggaggacaagcaggcactgtctttgcccagaggggcagggaagaccaacacctaccaggcacacacacagacacagttacagcttgtgaagagtattccgagggaagaaacagggcaggtggagtgctagggaataatgtgcacttgctttagttctggtggttgtagaaggcctctccgagaaggtgacatttaggctaagccctggtgaataataatgtagtaatcattagctaacatttattgaacactttctatgtgtcaggcactggtaggcagtttacgtggatggtctcatttgatctgtgcaacaaccctgtgcggtaggtgttgtgatgacagccattttccagatgagaagaggccagctgtgtgaaaggctgagttgctgcctaaacctatagcccgtgtcccctgggtcccctgctgtgcctgctttcccccgccaagtgtcagagtgtcagtctctggacaatcctttgaacgtcctagcctgggaggggagcccatcycagagggagggtgaaatgatctggtctctttttgcagagcacaagcgggagatttacgaccgctatggccgggaagggctgacagggacaggtaggtggagtggtgaggcccaggaatggaggtggggcagggaggagaggggcagggcagattcttgcaatggaggctctctcaggctcctggctgtgccttaggtgaggtcccccggctcagggcaggatgcatgccctaagctctctcctcatcctrcctttccaggaactggcccatctcgggcagaagctggcagtggtgggcctggcttcaccttcaccttccgcagccccgaggaggtcttccgggaattctttgggagtggagacccttttgcagagctctttggtgagtggactctggaagcctctgaatggctcaacttccccctccaggcctgtccttccatcagctgggaggccctgaggtggaaggctgagaggggacgggaatgccacggacagaagattttgtggagctgggtccagtgagagccgggacagaacctcacgtgtgccagaacccccgtaatccaacagtgacacttcacagactcaccttattaaattacaacaataatacattgttagacttctatagtaacagccatgaaagcaagactcaaagcatcttgtgacaatattgttattattacctataaaacagatagtgktattttttaatgatagatatgtgccaaatattttacatttcgtaagtctctagtgaaycctgacaggtgggcaattttctccccatttgcagatgagaaaactgaggcacagttaatagcccagagtcacataacacatggcagagctggactcctagctgtgtctgcctgtcatcgcgtcatgatgatttgcctgtactgaaagagccatctgtcctccatccctcttccccctccttccttcctttattctttattgtggacagaattaaccagtgagtgttttcgaattcaacattaaaaaggaatttataaataagcccaactaaaaagcggaaaagaaaaaccctacccagttgcttagtggtttatacttccagacttgggctcacacacttttgaggggaaatgtcattaccagatgactgctaatctgtttacttgttgcagatgacctgggccccttctcagagcttcagaaccggggttcccgacactcaggccccttctttaccttctcttcctccttccctgggcactccggtaagttctgccccttcccacgtttgcaagctccgattcctggaacccctggcttgagcttgttgcttttccaagcctgtytcctgtgttgggagccctgcctccagcagccctgygaggcggcctggagcctcggtgaccacaacaggcagcgcagtcttcttctaaccacctctcctcctcctcccttgtcccratgccagatttctcctcctcatctttctccttcagtcctggggctggtgcttttcgctctgtttctacatctaccacctttgtccaaggacgccgcatcaccacacgcaggtgagagctccttctggggccatagaggggtgagaggtctgctggggagctgtgttcaaatagaaagttggctccttgagggcagggcccagtctgcgctctctactgcggtggccagaactgggaccagcgcctgcaggattctgtcactgctcgttgcctgaactgtgctgtctcccacagaatcatggagaacgggcaggagcgggtggaagtggaggaggatgggcagctgaagtcagtcacaatcaatggtgaggagcagctcccctacccagcccctggcaggaagccccagccccaacctcagcagcctcctccccaaactgctgctctctgaactcacttagggcttgggagggagtggcaacaggccagactggtaggatcagagatggcaatgtcgggaagggggtgaaggagtctcacgaagccatcgccgtcactgtgagtggggtgccttacatttgcaaagcactttactatttttaaagcacttccagatatacgatatcctctgtattcttcaagcatctgggggagtacacagggcagatggtatccacttagttttaatttggggagcctgagctgcagcatagttaaatgaccctaacttccaagtagcccaggcccaagactctttccttccaagtaaggagtagagccaggagtcaaactcaggacgcacgattcccggagcagaactgcccctgcaacaccatgctgtgcagggccgtcaccacagctaacctttcacgcctgctgactcccagcactgcgtaccaagccctttacatgggctgacatatttaatcattggaacaatttgagtatgaaggcactatcatcattcccattttcttttttttctttttttgaaacagggtcgtgctcagcccagcacgattatggctcactacagcctcgacctcctcggctcaagcagtcctcccacttcagccccctgtgtagctgggactacaggcgtgtgctaccatgcccagctaatttttaaactattttgtagagatggggtctcactatgttgcctaggctagtctcgaacttctaggctcaagtgatccttctacctcggcctcccaaagtgttgggattacaggcatgagccactgtgcccggccatcattcccactttctagatgaggaaagggaggggtagggatgttgagtgacttgcctaagggtaggagcttctacctggtagagctgaatacttccttgtgctcaaaatcacaagcctaggtgccaaaatgcatgtgtgccaattccaaataagagactctaagtggtcagggttgttactgtgtgaggcagcctggcagtaatacccctggctcaggttggggcctcatggtggctgtgactcttgcaggtgtcccagatgacctggcactgggcttggagctgagccgtcgcgagcagcagccgtcagtcacttccaggtctgggggcactcaggtccagcagacccctgcctcatgccccttggacagcgacctctctgaggatgaggacctgcagctggccatggcctacagcctgtcagagatggaggcagctsggaagaaacccgcaggtgggcgggaggcacagcaccgacggcaggggcggcccaaggcccagcaccaagatccaggcttgggggggacccaggagggtgcgaggggtgaagcaaccaaacgcagtccatccccagaggagaaggcctctcgctgcctcatcctctgaacaccgggcccaacctgatctgatccagatcttgactggggggtctgactcactgtgggaagagaagaggggagtatsctgagttgtaggaactgctttccaactccaagctccctccacaagtttccctcccaggccccccacaccccagtgtggacttgggatttgctgtgctcagcccagggctgataggtccctggtgaagcccagggtggggggtgtcagggcagtggaggggcccgaggagccaggttgcatttattggatggggagctccaaggggcattagtggtttgggctgggccttttgtgccctggtactctgccacctgtgttgctgatggtgtcaaggaaggaggacttggcctagggttgtctgagccggagccggcagctccactggagagcagtgcaggcagagtggagcctcctgctctcctggaccagctgcagacccccaaccctggtttctgtgccatgttgcgctctgaccgtctctgttgcttctcttctggtgttgcttctcctccctcccattctctctgcaactccctgcgggccgcatcgcttgctttcactgccgtctggctaggactcccttcttccttccttccccgagaaggcctcaatgtggcgaggaagatgctggggccggtagggctgtgagatcttctggggaggctagccgggtggggcgggagcctctcagctgtccagattcagaactggagcccactcctcctccctctcgttgcctcagcctgccctcaccctcaggactaggcagaggtgaggctggctcaccctgaagaggtgggataggaccgggggaccccagagggaggcctaggaggggactgcacccatactgcttccctaccacaaatcagggctcagggagaggccatgcggccagcccaggtctgcatgctgagccccatcctccacagcttgccgctgacgctctctcctgtcaccccgcccctgctctctccccagatgtgttctgagctggatgccgggttccagaatcgctgcacagttccaacaggacagcgccttcccccatgcrctgggaggggaccctccatttctccccctcacccatgctgagtgtagagccggggcctgggtggcgggtgggggccgggtgggaggtggcagtagtcttagcctgtgcactctcttccttgggtgtttggtgctggctcctggggactacaaatcccagagtgcggtgtgcccggcctcatttctgatagatcccgcttgggggaggtggtgtatggttacggagctgtgcatcttgggacatgtagtagcccaggtcggcttgtcactcgctgtgagatggggagattttgtcttttgatttatccctgtagggctggcagggttgtagatgaagggggaatgatctgagccttggttcccctgacacgtcttgctagccccagggttagagtgggcagggcagagccgcgcagcacctgggagcggtacctttcccttgggcagcctggggtcccaggaacaagccagggcgagtggcatgtctgcctgagcagggtgtggccccagaaagctgaggagtgtgggctggcagagagcttcgagggcaaggccacccgcgggggcgtgtgtgtggtggggcttggcatgtgatggcagctccaggcatgccgctgcttgtatggctttctttggcctctgaccctgctgcccattctttccaacatcacagatgaactgcctctcctcctccctgcctggggagcccagtggccagggaggggagtggtggagccagtcgctgtaacactgagcctcagagacgaaccaaaaccagctgggctgagctcagatccagggggaaatgctggaagtcaataaaactgagttttgagagcttggtggtgtgttgtgttcttgggttcctactttccggggtggcccaggagggcctctaagggacagtgggtgacacctcaggcctcacacctccctttatgcccctacagctagaggtgcaggccttgccagttgaaggcagaaatgccctctttgaccaggctgccctccccaggtatgttatggaaccccaagcaatgcttcattctttgctttcacctcttgggggcctacaactggctttccctagcagccgatgttccccttatgagtggcctcaccccctagtactccacagcacagctaggaccatactcaagttaagacttaactgaggctgggcgcggtggctcacgcctataatcttagcactttgggaggctgaggcgggcagatcacttgaggccagaagtttgagaccagcctggccaacgtggcaaaaccccatctctacttaaaaaaataccaaaaaaaaaaccccccaaaaaacaacaaaaacacaaaaagctggatgtggtggtggtgcatgtctacatgcctataatcccagctactcgggacgctaaggcaggagaatcacttgaacctgggaggcggaggctgcagtgagccaagatcaagccactgcactctaacctgggcaacagagtgagactgtcacaaagaaagaaagaaaaaaaaaaaaagactgaaagcacagaaagctgagaacacacagtgaaacctttaaactgtacctgcatgaggcccacagactaagcccctgggtaggtttcattggctcagcccgaggtgtgagccagtggcatgtggtgtggcatgagtccagcccacccagggcccaggccccaaactcatcagggcccacggaagaaaaagccaggtaccccttccctttcatctctagccgctgtgctgggacaagcacctttccgttgtcaggcagggccaggtggctccccaggcctctcttctattccaggacaggctcttgcttcaccgtcaatcaccaaagggcctctactatatttttctcaaagtgaagaagcagcctaccctgaaagaggaatttcaaacctccatcctgagtcgggtggaagtttgcaaatggctgtttcttctacgtctgtctagcccttgagatggctatcactgacactgagcctcagcagagcgtgggtgagacagcgggagggcctgtggtctgctggcgggtcccttcactcctgctcagggcagatggtgcttgccctgttttttaattaaggagactgagtctcagcacaggtaagtagccctaacttccaagtagccccaggcctaaggctctttttgccttatttcatgtccaccccatttgtccaaggacacctcctgacatgcaggtgagtgtgccttctgggactatacagggtggagggttctgggagctggggtgagacagaaagtgtcctttatccccaggggaacgcctgtcctagcatctcacaggcctagcctagactcactggcagagttttgctatagttttgcctaaggtgtggcagacactttgctaatatcactttgttcaggcctcacctcaatctggcagcagaagggcacaaagcagctgccaagaactgagaggaggctaggcgcggtggctcacgcctgtaatcccagcactttgggaggccaaggcgggcagattgtctgaagctcaggagtccagaccagcctgggcaacatggcgaaactccgtctctactaaaaatataaaaaattagccgggcttggtggtgggtgcctgtaatcctagctactcaggcggctgaggcagggaaatcgctggagcccaggaggcagaggttgcagtgagccgagatcgcgccactgcactccagcctgggtgacagagcaagactctgtctccaaaaaaaccccaaaaacaaaaaaagaattgagaggagaggtagtagagaggaggttagtcagccaggtgcaaactctnnnnnnnnnnnnnnnnnnnnnnnnnnnnnnnnnnnnnnnnnnnnnnnnnnnnnnnnnnnnnnnnnnnnnnnnnnnnnnnnnnnnnnnnnnnnnnnnnnnnnnnnnnnnnnnnnnnnnnnnnnnnnnnnnnnnnnnnnnnnnnnnnnnnnnnnnnnnnnnnnnnnnnnnnnnnnnnnnnnnnnacagggtctcactctgtcacccaggctggagtgcagcggcacactctcggctcactgcaaactccaccttccgggttcaagtgattctcctgcctcagactcccaagtagctgggattacaggtacccgccactacacatggctaatttttttgtatttttagtagagacagggttttgccatgttggccaggctggtctcgaactcctgacctcaggtgatatgcctgcctcagccacccaaagtgctgggattacaggcgcgagccaccatggccggctaattttgtatttttagtaaagacgggatttctccatgttggccaggctggtctccaactcctgacatcaggtgatctgcctgcctcagcctcccaaagagctgggattacaggcatgagccattgcaccttacaatcttacaagttgtgttacgtgttaccacaagcaagttctgtgcctcagtctttccatctgtaaaatgggactcatcatgtaaagcaccttggagactgctggctgcataggaagcctcgttctaacgtagtgttcccacctagaagggccttactggcagctggcgctctcctgctgtgctctctgcacctcctgagagaccagcagggaccggctccgggctgaggctggggctggagtccagatgcacagcggacagaaatgcgtaggagtctgggttgcagctgcacagacaacacactaactttattcacactggtacaaaagtagttttttctagaaatgttctcttgcgccagaaggagagaggttgagcagcgcatggtgggagggtggtgggaggaggctgggcgtgaggccagggagggcagagcgcccaagtgtgagtcagaggcaggcccggggctgagaagcagggggagccgggtgtggcgaccctccaccccattcttccatactggagcatagggggacacacacagatgttcagggaactcccagaaccccaggagagctacaggagagccaggccagggaatgtaggcaggagaaggctctgggtagaattgctacccatgtcctttcctctcctcctggctgcagcacccccatgggatgccctgggctctgggatgccccaggctctggcatgcgaggctgggcaggcgtgccccttctggctttcccttcctgactcttctaggaagggctgagcatgcccaagaggtggctggtggggcagtgaggagtgggtacacagagatgctcacacaggcaaagagggacagaggctgggctgcccgccaaggggccccagggtctcactggggcagggccttgaggatggcattcacttcctccgccacggctgtcagggcaaattcaaactggtcctgaggaagggcagtggtaggatggtcatggagagggctgacctgtgctctgccctcaagatggggggcttttggtggggggagggccctgggcaggtcccctgggaggaagggagccctcctggaggaggcgcagaagcaggtgggaaaggttggcagctgctgctttccctggggtggccaagaagtgggtgctagggaagggtgggagctggggttggggcaggaaggcatggtcaccttagagcggacaaggccaggccgctggtcacggacatgctccagggtggcagcgatgtcaatctccttcactcctggagatggaggtggggatggggctgctcagggggtgtccagaggaggacaggacccagaaaacctgaggcctcctggaggcaaagagccttggagggctgggcagagcctggaggttgacaacctgctccttctgagctcccaggaccctgtgtgctggggagcctctaaaaagggcctgggggctgcgggcaccgtggggaagctccctaccttttgccatgcggttcaggaccatgtcgatgaggatgtaggtgccggtcctccccgcaccatcactgaaacaggagttagtgacaggtttagcttgagatgcagcagaaagggggagggacggaggaggcgaggaggcctggaggcctgggggaggggaggacactgggtgacccgttggggttggcttggagagggacagtgagccgaggatgaaggaaagctcatagcacctgcacgctgggacttgggccttgagaggggagtctgtgacctgtgggtgtcatttgggcaatgggacaaccaaagaggagagccatggctcagcccagaagcagaggcagcaggagggaattggatgggcctctctagccttcagccagctttttgtgtatagggggccaatggtcaatattttcaactttgtgggccacatacagtttgtatcacatacttttcttcttttttcttcacccatttaaaactgtgaatgccacgcttaggtcttggccattaaaaacaggtggtgtgctggatttggactatgcctgcagtttgctagcaccaaggggacaggcaggcaatgtgcacaggagacgcacacagggagtgggaccagagagatgaatctcctctccacccacctgcagtgcacgatgatggggcaggagcggccccggtagcacttgttcaccttcctgcaacaagaaatgggtgtgagggccagtgggcaccagcagagagggaaagggaagctgaaacacatgacgtgggcctctctttcttccttttctccccacctgcccggggcagagagggaagatggttggagaaaggagccagggctggaggcaaagaaccagagctggtgtgggtggcattgggctcgccttgtcacttgcaagctaggtgcccaagctatgcacctggaacaactgatttaacctctttgagcctcagttttcttacctgtaaaatggaggatagtaagaaaaacctccttagggttcttacaatgatcacatgagataacccatgtaaagagctaagtgctaggtctggcacacaataggtgctcaatacatggtagcaggtggcaactattaatgataatacatcatcatattaagagacacttctgcccaagtccaaggggatagctttctggtgacttcaagggtgtcagtcttgccacatccctgctctggccctctgccattctttatgaccacccaggctgttttcctcccgactcaggctccagtggtccttaccagttgtgacatcaggctgccctgggcatagtgttccctgggccaggggaggacaaccccaacccctcaactcgggacattgtgctactgcttgtctccctggagcagtctcacttcagcacaggcattctgtggctgcgttatattcagacttggggtccccttggacctcagacctttctccactgcccctgaccacaactcagtgaggagcagggggcttctccgtctctcaatggacccatctaacctgcccttgtcctttatgacctttctgctttgggagtcacctgcatactcctgatatccctgcaagccagaaccagggaagaccttcttaggggttgtcagattgaagtttggaacttcacagtccttcagctataggaccaggtgacttagaatggcttcataggagtccacatggttttctagctcattggctgttacgtcagagggctagggtagaagagtaatcacaatagttgtttttgctcatttaataatgataataggcagcatctagaattaacggagcccttgctatgtatcaggcacttacactagattttacatactttatcaaatcttgcaacagccctctaaagcaggggtccccaatccctgggccatggaccagtgtcagtctatggc

SEQ ID NO: 96199 - DNA, 22245 bp, Homo sapiens
acgagaaacaccacacagctcctccctccccaaaccctactcctctcccttcgctcacttctgtctcctctttcagcaagtcaaacatgttctccatgtcaatgaagttggtctggatcatcctgcaaaaaggtgctggttaggacttctctgagtagccaggaaataataatgtgccctggacaggtgagggccagggctcagattacctgtagtaggtgccaaaccaattgaggggcatgtacagctggataatgtaggtgccaaagagcacatagtccccaacctgtggcaatcaaggaagcagagcatgtcacggggggcctgcaggccgctcttcttgtgtcaccctgcccacttcctaccgaagagcctggtgaccagacacaggccccaggcccccttttccttgtgccccactctctcatccaagatcctgcctcacctgtagcttctgctcagtgacaaagtatgcgcaaagcagggagccggcgaggagcccgagcccaatcaccaggttctgggtctgatttagtaaaaccagtgaagcgctcgacttccactccaaaccctgagggcaataacacaggaagaggaatgtcctatacacaatggccatcagtgagtccaaacctgggcccaggccccttctaccccaacactcgactatcactcttggccctgaaaattctaccaggccagggcattattctccggaggcctcaaactagcatcctcacctgatatttgatgatggcctctcgatagcgttccacttcgtaactctcggcgttgtaatacttcacctgatgaattcaaaccaaatttatttggcatgggcacagcacatggcactcgggtcattccccccaactctcaatcctccttcctgagttcaaacatcacacacaaacatcacacccccagctctctgtcagccccagtggtcctggttacactcctccacatctccacgcctcacaccactgccaccgggccctctgttaccgtctcgaagtttagcagagagtccactgctcgtgcccgggtagcgttctcctgtgtgttcatagcacgacgaaacttggttctccactcagtgaccacaatggtcagggctggagagtgacaggatggggagcagaataggacatcatccccaaaagcagagaccaaatgtcaatgtccactacctgccatgtacacactaagcctatgctcaagcccggacacccagattccacagggaggcacctctgcagcctgcacaaagtctcatgtgtagaaaacgcttttggtaaatgaaagcaagctgcatcttgttacacaaacgaggcttccttgacctgtgtccacggctcagacttaacgtgacaagaatgtccttccccagcccctcagctaggttaaggtttgatttgacagaagagacccgcccatcacatgacgagcactaggagcccattcaagtccaccaatccacagcctcccataggtgggtcacttgagtgggggcacagctcatggccaagggagtccctggatagttcagggagacggtgtctcccagcagcactcactgaggtaaagactcatgcacaggaacacaatgaggccaaaccaggcgttgaagaacatgctgaagtagatgatgccaatgatgatgtcggccagcgtggggatgacattgaacaccaggtagctaggagggcaggtcaagtgaataagaaaggtctgggggcttagacccagcaaccctgcctctaggcatttcagggtagtgttttattttcaagcaacagactggaaccagtcttaattaattctaccctcaagaggtgggtggctaaatcaaccatgctcaaactacagaattctctgtatcaattacaatgaatgagggagaccttcaggcatggaagaaaaatatatctccataatgttctgttaataagcaactctgagaatgatggctatgtcacaataccatttgttttaggaaaaacctccacaatgccatattagttctgtgagtctgcatatataatatgtatgtaaaaatgcaaaaaagcagaacccagctgggcacaatggctcacaactgtaatcccagcactttggaatgctaggtgggcagatcacatgatgctaggagttccaggccagcctggccaacatggtgaaaccctgtttctacaaaaaatctaataattagccaggcatgctggtgcacatctgtaatcccagctactcaggaggctgaggcaggagaattgcttgaacccgggaggcagaggttgcagtgagcagagattatgccactgtactccagcctgggtgacagagcgtgaccctgtctcaaaaaaagagcagaacccaacatactaaacagagtgggaagctctgaaaaagtaagtgcagctcgaaagagatttgccctctgcccgcattacctaagttattaggagagcatgtatacaataatcctatactttaaaaaacaccaaggtgggagcggcagcttctcaggcggggtctgttctcttcctcccacgggcccctatccctgcttctccggctccaccctcccacatgccctttccactggggcggcacctgagcagccctgtgacactggatgtgccccgatccgcgatccgcagcacctcccctgtgcggcgccccaggtgccagcgcagtgagagctcgtgcaggtgggagaagatgagcagctccacccgccgagacgtgaactgctgcacccggatccacaggaaggtgcgcaggttgctcacgaagcctgcagggagccgggggacgcctcagtagggcctgggagctgagggacgtcagcccagcaccaggatgtgaaaggtctgagagtacatgggggctggggaggaatgctgggagaggcggatgctgagggaatgcctgtgggagggacctatacctagcagggtgagggcggagtctctcatacctgtactgccagtgccacccccctggaggaacttgaggaagacgtaactggtaacagtccaggccagagagttccaaggtgccttctcagtcagcaagttcactgtggaggaaacgagtcagaacccacttatggcgcccaggactctcttcaggcaaaatggccccaggtaccagccacagtctctttctgaccacccagctctgtcccacctccctaggtaaggaccatcccagccaccaggctgatgaaggaccagcacactgagctggtgctcctcctgctcaccaatgttcctatagaatataggcaccaacacattgagtgcccgttccaaacccatgagccccaggcagatgagcaccaccagctgcagagctggactccctcgaggccacaggtagccactcaggaggcggagcttcctgccaaaatctcgccaggtagactgttgggctgctgaccgaacctaggatggtgaaacacgtaggaagggagctcagaaatcaagtaagtgcactagccagaaacccttcagggaaaaacctatggggttacagctcccaggtatctcagacccacaagtgatccttgatggggtcagaaaaactaagttgcaaactgagatttggaaaagaagcatttcattttgggggaaggaatgatgacagggaatgaaatgaagagactccaggattcagaaactgaggtggggtctggtgcagtggctcatgcctgtaatcccagcactttgggagtccgaggcaggtgggtcacctgaggtcaggagttcaagactagcctggccaacatggtgaaaccccatctccactaaaaatacaaaaattagccgggtacacacctgtaatcccagctacttgggaggctgaggcacgagaattgtttgaacccaggaggcagagggtgcagtgagctgagatcgcgccactacactccagcctgggtgacggagcaagattccgtcttaaaaacaaaaagaggccgggcgcagtggctcacgcctgtaatcctagcactttgggaggctgaggcaggcggatcacgaggtcaagagatcgagaccatcctggccaatgctgtgaaaccctgtctctactaaaaatacaaaacttagctgggtgtggtgtcatgcacctgtagtcccagctactcaggaggctgaggcaggagaatcgcttgaacccgggaggtggaggttgcagtgagctgagatcacgccactgcactccagcctggtgacagagcaagactccgtctccaaaaaaaaaaagaaactgaggtgtacctggctcctttccacatcttggtcctcttcatgaacctgcaatgtataggactggggacgaagtccaggggcccagagacccaggacaaacagccctccagagaccacataccgcagcacccacaggctaaactgaacctagaatgaaatataagtggagagagtatcattgaggataaaatttcattgtattactacttataatagggccggggactggtgtcatgaacacattcagcacttacaggcttaaaaaaaaaaaaaaaagcaaaaccacagtgactcagcaaagacacaccccaccagctggctatcagctcccggcaggactcagcccctcccttctccctttgcttagaggcatcctaaagcctggaagcagtgtgactggacatgcagtgctttctcccaagcccggccagcagaggcttcccccttcccacagagtccctcacctgctggcccaagtctgcccttgcccaccaccactgtgggctgttccaagacaccagggccaagttctcagctgcaaacgccacagtccagaggagcaggagaccagggctgtgcctgaacttgatccagatgcccattgccagacgctgccgtgcctggctccgctccacgacaagcagccacaggccacaggcgccggccagactctccagcacggaggccagaagtagatagcttggcagtggggccccccgggcagtgcccacccggccagccaggccggccaggggcagcgccgcctgaagtgtggccagaagcagctgcagcacgtagggagagatgcgagggccggccccccaagacagcgaatcagcaccagcgggccgctcccggcgtctgcagggaagagccagcaccaaggccagagtccctagagccatccgcgtcgagggcacgagcgtgaagaagaagcagggactcaggccatcctgcatccaggccggacccacgggcccttcggcctcgcagtagttgcccacagtcaccatggcaatgcgtggacgccggccgaggctgcgggcactgcgggaccggaggccgggacttgtcactcggagaggggcgcggacatccgggtgccttggctcacgtagccgctgggcgccaagctgcgggggtcccgggaagggacgcacgtggaccaggcctcaccgcccactcccctagcgcacgcgccgccgccacgcactcacgcagggcacgtacgccgtctcagcacggccccgctggctctgggcccgggacccttctgccaactgcaggcccacgggaatgctcggtgttggactcgcaccgcgctccacggctgtagccccgcccacagcccctacccacggctcccattggccaaatgtctccgaggggggagcggggggaatggtgcaggcaacgaatgcaaattagagaggcagagccggcttggtcacgtgcccagggcgggaaatctgacgaccaggccgagctggaaacctccacggaatcgtggctcggggctggaaacagacctcacggaatcctggctcggggcaggacacagacctccacggaactgtgggtcggaagctgcccttccgccagccgccttgctcagcgtatctgagcgacggcctaaacatactttcttctagaccccggcagagtccccatcccatttctcttgttcccaggattctagccgcgcgagacaacaagaagtctggtcaaactccctttttattaagggttatcaagctgtacacggtccctaccctgctccgctccgagttcgggcagcgcaattcaccaytctcccaaagccggaccacagctgggtgaggggtgggacagagagtaggagcagtcccagcatgcagtgcagcagcccaaagcctcgggcgaggcatcgcccttcatcccccttcagggcacagcgagatgcgggccaragctcttttgctgggacgyacacagccaaggtcaccctccagcccggtctgtcccatgtgcaggtgatggggggtacgataagcagcaatgagggcccaggaagacctcagtctcctgggggcccatcctaaaagatrgcaagggcagcaaagtatttccatcctgctcctacaatttagaaaccttcttttttagtgtcaaaatatagcgttgaggggagctggacgctagggtcttcaccctaacgcaaagcaaaagccgaacggaacgggagcaagcgaacagaacaggagcaagcagcacacacaggccagtgatgtgcaagaagcggagagaggtgagccggctgcagcactgggcgagaactgcgggtgaggtaagggccacagcctgacctgctcatctattgagggggctagggaaggttgcaggggttgagggtccaggcccaacctccccactccacagttggcacaggttctccctgcttggcagcttctatcgtgggcagccctctsgggacttgcagggrtaggtgtaaaggtggcagtactggggctgggctggggrccagtttctagcaccacactctgagccaagggggtyctggggatgaggctagagtcccgtgtgccctcggttcctaggccccaaattcctctcctggggctgtggcaagcccagtgttggcacctcccttggccaggcacagacacacaaacaccacacacgtggggccagggaacactcagaggagccgtcccatggcaggcagacgggatggcagggcagcggtggcctccatcctgggccacaggaaccctgctcagccttgtctatacctgtggggagaaagggttggtaatggagatagtcttcagcttctggttgatacctgctagccccatagaaacctagaggtaaagggacaggaaaggttgattcctggggaggtaaggtaaggaaaaaccaagccctgcagagcagttgagaaaagaaggggtagtgtgttttggaagggagggtacagtatctctgtgtgggggtggggcatatcttccttcccctgaaaagctgttacctcaccctggaagttactatttctggcagtttttcctaggccccggggcccttaccttgtgcacctgagggggtagctcatcctccgagccctcttcgggcacgggctcagggtgccttgatgccgactgcccatcttctgcccaccctccaagaggcagccgagagaaatgagagggaaccctgggcactgtgccaggatctggagagacaagtaagagtaagcatactcatagaaggaacacaagaatgaggaacagggctggggggctgcttggggggtgagtctttgggcctgttctctcagacctctttcctccccttgagaggccctggaagaaccacccttccctgcagcctctgtttcctcctatacccccactggatacctgtgatgccaccgtagcgcctctggaagcccccatgcagggcrgtggtctcaggagctccaggccggggtgctgcacagggatagctagcagagcgagggatagactggggggcccgggcgccctctcccccttcatcaggggcgctttctccactctcatcactctcccggcggtgccatacatgccgctcaggttcagcctgggcctgctgcttgtggagctggagaaatggggggctcgttagtgggggacagacggatgtccatctgaaacagctgccctccaacctggtatcagtcagttcccgctttaccccttccctgagaatccttgcctcagagcacctattatgttaatagtgtgtaatatacctctgatctttacaggttacattcacagcagatccccggaagaagcctgtgttgtaatggccctcattttacctattcatttgattcaggaacaaactgactgatggtctaagtgccaggcactcttttaggtgtggggagatagcagtgaacaaaacagacagaaatgccagcccttgtgaggcttatatactggtagaggagatatggaataagcaaataaataaggaaaaaacatgatatgtcacatggtgctaaatgctatggagaaaactaagacaggaagattcaggagggtgggcaagggagccttttactgagagtgatcagagaaagtctcagggaaacggcagctgcagagacccaagaagaaggaggaggccatctggatatcccagggaactggattctaggcaggggaaactgcgagtgtgtgaaggccctggatgagagcaggcttagctaaaaaggatattaagaaggtagatatgggagtggaggtggcagaacaagtaaatggcagagaagggtttggaaccccggtcttgcttctccgcatctaaaccctctactctcttttttagctgtgcactcacctggtgcatatagagggcatgcaggctcatctctgtggatgcatattctgacagcaccaggctctgcagctgtccttcccacacgctgctcccggagctggctgtcctggcatccaccctgtctctcccaacagagacagacagcagctgtgaacttctctgagacccacacaagctgctgagggctgccgtgccctcccatcttggccccgatttactcacccagagcctgtcatggtgctgtgagcccggcctgtgggcrcctgcccgggwtgcagcggggagaaggagcgcagggcagaggcgacttcagccctgtgcctggagccctgcaggtctctgggcagtggagggccccggcaggatgagccagctaccacatttgcgataaggctcaggggctatgaacgaaacgggtaggtagaattcttgaggcaagagaaaggtctctggggtcccctagtattctgtatctcaggccccagtggcacatactgaagagacagcaggaagccttccaccccatgcccggtccctcaactcccagctcctgaagtccactctgcccatcatctcccagtcmccaggaacacacctcagactcagattgtaaggactggatagacgtaaagagggcattttcagggagcagacccccttgggcgaggcyagcagctgctccatcccgctgaacctgctccttgaggaagcctaggaaggctgtgctctcacgtggtggctgccagccagggttggtgatggcaaagtgcatgagtgacaactctgtctttccatcctcagcttgctggtacactgaggcctctgtctgcccagcagatagccactgcacaaggaagagcagagtaagcagggctgttctcttccaggagccttcctgcacctttcctgttagtggggaggccttacccttggagaacggagaccacagtatactgtcaatctttcccagggcactggtgcccccccagacccaggaggggctgcactgcatgctgagccagttmcttgtgttgtgccttttttttttttttttttgagatggagtctcgctctgtcgcccaggctggattgcagtggcgtgatctcggctcactgcaagctccgcctcccaggttcacgccattctcctgcctcagcctcccgagtagctgggactacaggcgcccgctaccacgcctggctaatttttttgtatttttagtagagaaggggtttcaccgtgttagccaggatggtctcgatctcctgacctcgtgatccacccgccttggcctcccaaagtgctgggattacagacgtgagccaccgcgcctggccgtgttgtgcctttcttaagggagcttggccaagggtgcgaattagggctgaaatccagcccaggctcccaagcagtgtgcccctggtataggactgcctttgtgtgactcaggagaggtgtctttttgcggttttcccraagacactgtatgttccagcatcatcccaggccacctggctccctcctctcccagtacctggggatgaccatgctggcgaacatccatctgagcaaaggagcaggtatctcccacaccaacgacctccacggtgaagtttcggaagaagtctataatctccagggcccgtgggcgcaggcagaagatgaggatgaggggtgtgacaatggggctcagcaactcttccaaaatgaacacctaaaagggcgggaccaaggtmacaagcgagcaggagggagcccagccctcaccaccgagctaccagccagtctctagcaggccctaactccaactccactcactgccttgtactggaagagctgggcaaactcgtcccgggtctgcgagcggtgggcattaccctgccagtggtcaggcatgtagtggatgtgagcgaggatcacgcggagcagctgctcagggcagaacaccatgtgctggtccgggataaaggacctagtgggatcaggatcatggtgagatgtatgcctttcccaggaatgctagccggcttgctcccgcctgtggccctggcccacctgcacacggtcacggtgacccccaggagtgtgacggtggtcagcacatgttccacagccaacacatcttcgtcataaatggtgagggcaataagcacagccaggatggagccagcgaagaaggctccattcttggccagcagtgtcaaaagaggtgacaagaagcaattcatgtacttggaggcgggcttgtagccacggttgaggcgggactgcagctcgtgctccagctcgttgaagtggcggaggtagcagcggccatagagtgaccagcagcgtgctcccagggcccccggctcccgcttcagcacctcagcatagctgaagaaggcatagaggatttgccatatgaggatgagggggcacagcaggaagttagcgatgccaatccacaggatgcggttgctgaggcsctgggccagctctagccgttgccccccacgtttgtactcggccttgaggctccattcattgagaaacagagagccaggtccccagaagaggatcagctcaaagttgtacttgagaccacgggtgaagaagacagcttccccgaggccaggcaggcggaagcgcagaggcaggagggatttgttaaccagtgccaccatgtagttctggaaacggaggatgcggtggtagatgtccagttctgtcagctcacgtttgtggatgcagatctggtgctccttctgcgtctgcacgatccgggcctgcacttcttgccacgtgcaatacggaagggcagactgcggggtggggtggggaagagacaaggtacggaaggtggggttgttgcctcgacccctttgccctatattagaagtgagattcaggggttgtgagcttaagagacasttcctgatttgtcaatgacagataaggataactgatgcccaggaatacacccacacctcccaatacgtcttagactatgggctaactgcccaacttcccagtcttaccatagggatgcgcagagcgtgcaggtagaaggagtggatctcccagtagcagcaaatgttatagatgaacttgataagccggtggatccagaagacaccagcaatgaccaggatggtgataagggagccattttcctgaatcctggtggggaaaaagaaggggaggagaggtggccctcgaggaaggagtcttggcagagacgctgctatcctgaagtatttttgctagaccaagcctgagtcagttctggagtatgagttgctgcctcagactccactctattacccacctgctagcagaactcaaggctatggtgtcctcttgacttgcagcccttacctggcactacagacytgagcaggcaaaaaggcgtctggcagagtgaccttgacgggttcagtagggtgaagactgtggttcaccatcttgttggcaaataggatgtcatagtccacgcagctgaccaggaaggtagtgaaggcaaccacaaagaggaactgcctggggagttgggaagaaggggtgcagtctgagagccagagaggctccagtgaaacccagtgggaagaggagagtctggaggtggcagaacaagactgggaactggaagggcctggagaactcccagtgggccctctctgctcctcagccccacaggactgtctcaggcccactctttgctcttagcctcagctgccacagctgcagcctactttcctcacctcatggtaacctcagccaccactactggactctcgaaggtttcatcctgtgggtctctgatctccagtctctgatttccttttgaggttgtagttaaaagcccttgggggagttttctgattgagggagggcttcctaaccccttcccccttcggcaatgctatatggcttctctctcccaggaggctctctgcctaggagcaggccatggaacaggcaaggcagaacagaggcttttctctgtggctggcatctctgagacctcctgactgaacaatgtacgttccattggagcgttgagatgatcaaggtcaaggcctgcattctttttttttttgagagagtctcactctgtcagccaggctggagtgcagcggcacaatctcggctcactgcaacctccacctcccaggttgaagcgattcttgtgcctcagcctcccaagtagctgggattacaggcgtgtgccaccacacccagctaatttttgtatttttagagcctcctaaagtgctgggattacaggtgtgagctgccgtgcccaaccaaggcttgggttcttttcatggaagagataaggcttggaaagcttttcttgtaagaaagcttggccgggcgtggtggctcatgcctataatcccggcacttcgggaggttgaggcgggcagataacccgaggtcaggagttcgagaccagcctggccaacttggtgaaatcccatctctactaaaaatacaaaaaaaattagccgggcatggtggcacatgcctgtagtcccagctactaaggaggctgaggcaggagaatcacttgaacctgggaggcagaggttgcaccgagccaagaccactgcactcctgcctgggcgacagagtgagactcactccatctcaaaaaaaaagaaaggtgaagctgtaagttttggtgccacacccagtccctgaactacaaaggtttacggagttttagcctaggactgagttgtactggcaggttgggccaagtgtgagtgcaaggagaggaaagactaagatgtattctttcaccacatcatctgtcccttcttatacttacatgagctcaaagatctccccgatgagcatacatgtgaagccattcttctggtgcagattataaacgtgtaattgttaagaaaaagtagtcagtaaagaaagcaggtaagagcacagactttggtgtcaacacactcaagcttaagtcctggctctgtgactttctagctgtgtgactttaccaagttacttaacctgtctaaacttttgtctgtccatggtggtacattaggaataaataacacttgtctcataggagtattaggtctaagataatgcatgtaaagcatttaacacagagctgacacagaatgagtcaaaagacgttacttattacgattatttacatcccatcaaaaaggaggctcggctgggtgtggtggctcacgcctgtaatcctaacactttgggagggcaaggcaggtggatcacttgaggtcaggagttcgagaccagccttgccacatggtgaaaccctgtctctatgaaaaatacaaaaaatagctgggcatcgtggcaggtgcctgtaatcccagctacgtgggagactgaggcaggagaatctcttgaacccaggaggtggaggttgcagtrtgttgagatcgcccctggactctagcagcaacagagacagactccatctcaaacaaaaaaaaaggaggctcacccttagaaaggcttctacaaattaacaccacaaagtggacacaggcacacagatcttggtaaatgtgggctatcattacttaacgatgatttcaccagcctctttcagcctcaggatgagctccattcccgtttccaggtattagagtcaaacctacccccacctcccaccagagccccggcttagagagacattaaaggtcccagagctccaactcagaaacacaaaggatattcgagagaagaagaggtcaaggttttcaatatggtgccaaggtgctgtgggataggaacagagatgtcagagccctgggagaacacaagccccttgctctctccatgttcttccatcaaytctccctatggctgtcatatccaagaactcacacttgctcccctcggcgacgtgcaccaacaggtcctcctcccctgggggtgaatcactataggaggcctctaggcgctggtattcagtgtcaaactgcgccatcaccaccgccccctgtccaccttgaccacctgccaataaggaggaagaagagaccctgattcagttccagctgctgcccatgggctgcccygcctactgccaaaaggagaaagtacccttgggctttgtccactaccagcctccttggctcagaggcagaggagtagtgacacaagaaaggcagtaagctcagggctgggggagccttaactctggccagtctgggtgtctactgctgctttcctggcccaaagccagaatctgtccctttgttgggggctgtttcatcttctatttaacggacagaagagtccctcccccgcccatcctgggaaccctggtctcccaagagactaacagtttggaagcacttcacaaacaaatgtttgagaaaagcacatggccctaccagctccatggacagtatgtgctcctctccagccctcgatgctctgcagctgctggaggagaagatgtcaggccccagagagtgggcagtggggataaaaaggaacccaaccctcccagccatccacaccccaccaagaggaggccaagcatggggcaggaaggctgcagtggggaagaagcacccttccagcccaggactacgagcacttcctctggctgtgctaaaccgggccactcttccaactccagggtctcaagaagtaacgtagggaccccatggagaatgagtgggtacagacctgaggccaggggcgcctctggactatttctccattgccctaccttagcctcagaaatgacatacttctcagggtccacaaaacctcaagagtctttcctgaagaggacctttctggtcaaccccttctcttacttccctagcaccaaagatccagccggtgagcaaaccttctggatgggaaaccttgactgggtcagtgtagacccccgatcctaggtgaatttgtgggttccctaggtcctgtaagccaggcatggtcgaggtggtactcacctgtccgtgcagcccctgggggccgtggatcttggcccagcctggccccggtgggattccctgggctagtgagagccctgcccctcagggaagtcaccactcacagggtcagtgtggaccagggcccgtggagccccggccggctgggcctgggctcaggggttcctgcggatgttgcagggatcgagtcagccttacagctgatagcccgggtgggttggcttgcctccccacacccagccgcggcgaccgtggaccggagtccacctcgccccagggtcgcccggccccaggccaagggctggcagctcccaacagcggacaacctcgcgcgcggccccggcgcccgcgcgcgcccccgtctgcgcgcgccagcaatcaaaacattccggctgcgcgcccccgccccgccggcggcgccccttcctccgttacccgccgcgagctcacttagggctccgcaggcacccctgggcaaggccagacacggggcctgggattccaataaccggtctcacgtcttacctcaggaacagcgacccgggtgattccagaggctccgccggctccgctcgrctcggctcggctcggcgcgacccgcggcgctaggccgggtgtctgccactcactgtcacccgcagccaggctggccaataagcacggggggcggagacacaacggccaattctcggcttcagggacgggactaaagtctcgaggcgggtcttggacagtcagcggcccaatagtgtgctctacgtggggcggggctcaggtgcggacgccgccggttgtcctcttcgctgctccgtagtgacggggattgttgtgttgcagaaatccggcaatcgacctgaggacttgcgagccgctcagctcccgggacgtttggtgcgtcttctaagggcgtgggcgagtttacgcgggccagttgttgctggtcgcatgggtaacgaagaaagttcggctaggcaagctcagtgatttttaactctgttggactcgatttgggagccgaatgcctatttcattcttttgtgggctgagactgggggtttgagaaagtggacgggggccaaggtattcatctcacagttggtagcaggatgagagacgagaagtcttgcggtgcaggagaaaccaagtcaggcaggcaggagacgcagcagtaggatctcgtttgcaggagccctgtttcttacacgctttctactccaggagctgctgctaaataatttctgctcagccatgtcgccggctccagatgcagccccggctcctgcgtcgatctccctgtttgacctcagcgcggatgctccggtctttcagggcctgagcctggtgagccacgcgcctggggaggctctggcccgggctccgcgtacttcctgttcaggtatcctggaaggtttcgtgtgaaacgtgacagggctccttacagcgtattgcccgttcagggaacacattcttattggtattcccgagcttaggaggccaattgatttatctttctgcttgattaaattcacttaatctctgggtaatgtccagcacagcccttgttttcaaacaagtctttttgccattgcatgtatctcctcacgttaacaccattcccttcaaaaacactttaaactttgtagagataaaattctcagatgtattccacatttaaccaggccccactcaaattattcctttttgctgaatatgaaacaatttattatttgtttcgtatagctttattttttgagagtctcgctctgtcgcccaggctaaagtgcagtggcacgatctccacccactgcaatctccgtctcccgggttcaagtgattctcctgcctcagcctcccgagtagctgggactacaggcccgcaccaccatgcccggctaattattgtatttttagtagagacggggtttcaccatgttggccaggctggtctcaaactcctggcctcaagtgatccgcctgggtcagcctcccaaagtgctgagattacaggcatgagccaccgtgtcggtcctgttttgtgtaactttagtttggctacatcttttcttgcacctctccttagacaaactgtacactaattggaaatgtaaactttaaaaagcatttgggaagtagtttttgtgcagtgaaaaataattttaaactgaacagaaattattttctttaggattcacctaaacaatctgtttggctaatttaaattagacaagactcaaactcagccagtggggaggacttgcagacgctggatctcgggagagggctacgttggagaagtttaaccgaccccaaggcttttaccctcatcggattcttttccagaatgcccagggccagtttttatttacattcgttttatttattttatttttcttcatcttttttgagacagagtctcgttctgttgcccaggctggagtgcagtggtgtgatctcggctcactgcaagctccgcctccccggttcatgccgttctcctgcctcagcctcccaagtagctgggactacaggcatccgccaccacacccggttaattttttgtatttttagtagagacggggtttcaccgtgttagccaggatggtcttgatctcctgacttcatgatccgtctgccttggcctcccaaagtgctgggattacaagcgtgagccgctgcacctggccaattttattttatttacattcattttacgtacatgttttcagaagcatgtttattgcattaagtgattgctgtactgtttatttcatgactattagagtgtaaattccttgaaggcagtatcatgccatctcttttgtatcctcctctgctttgtatatcacactctgaatataattcttgtcactgtggatttgggctccctttctatgtccaattcctcttcccttatttaggctcaggggagagagaaagcccagaaagaaagctactccagggtcctatggatatttcagagaagttattttgttcaacttgtgaccagaccttccagaaccaccaagaacaggtaataggtcaggtgcagagctagatgttagaagcaaaagtgtaatggtgggtggggagaggtagacatttgatttgtcttaataaaggtccatgctttgactgaggcagttggtgttacctggttgtacttcctagaatactataactggtcttggccagtacaaggccaggctggggcatatttccacctttatctcactctttgtctttgtactagagggaacattataagcttgactggcatcggtttaacctaaagcaacgtctcaaggacaagcctctcctgtctgccctggactttgaaaagcagagctccacaggtgatgagtggtagggggacctatgtaggagtaggacatggaggtataagaaagcactagtttagagtttgaggaaagaacaaaaatggggtaccaaacttgtgtatctcatattgtctgtcttcaggagatctttccagcatctcgggatcagaagactcagactcagccagtgaggaggacttgcagacactggatcgggagagggctacatttgagaagttgagccgacccccaggcttttaccctcatcgagttcttttccagaatgcccagggccagtttctttatgcctaccgctgtgtcctaggccctcatcaggcaagtgacagtacaggttgcatggctaaccccagccttttgtacacccagcctagatttcccttagcctagtgcatttctccctgcttctcttccttcctgttggttgtgggtatcacgcttgacaacatagtcttgaattgaaactggcctgaattgtggaagggttaagtgtaatggaattaagtttggaaacaaaccaatttaggtttgaattgtgattctaccacttcatcttgactgcctcgccaagcctcaaatttccttgtttgtcaaatggaaacaagcctcagggtggtaatattaaatgagataatgtttgtgaaaattggcccttagtttcttgctctcagtgaatgcaacagatatgtttctgatgcttctctgtcatcaaggatcccccagaagaggcagaactgctgctacagaacctgcaaagtagaggtcccagagactgcgtggtgctcatggctgcagctgggcactttgctggtgctatatttcaagggtgagagggtgctgcatgggggtaaggatggagtggatcctgttagccagggagcaccagctggtctccagtactgagtctgtgctgtctacagaagagaagtggtgacacacaaaacttttcaccgctatacggttcgggccaagcggggcacagcccaggggcttcgggatgcccgaggtgggccatcacactctgctggagccaacctgaggcgctacaatgaagccacactatataaggtgagttaagccttttagatctggtggtactgatccatactttttttgcatctctgttcaactcactgttaagtagggaggtttttgactcatatccttccaattttcattataggtagacaaaggtagatgagggattccccaggagccttagtcctctattctttctccgtgttatcctctactttccaccccttgcacttctgtgggccattttttttagttggagatttataaatagcaagtgaaggtatgcaggactgagttactctcttctctaggatgttcgtgacctgctggcagggccaagctgggctaaggcgctggaggaggctggtacaatactgttgcgtgctccccgctctggccggtctttgttctttggaggcaagggagcacccctgcaaaggggggatccccgactttgggatatccccctcgccacccgcagacccaccttccaagagctacagcgtgtgctccataagctgaccactttgcatgtctatggtgagcctttgctccagatcccaattccctagaccttcctgttctctccaacctaagcctccattctcattggtatatccagaggattttctaagccttggactgcagcccagctacatctgcattgagagaaacctgcgctagcttctcctcagctaaggttgagaaagatcttttcttttatggcagaagaagaccctcgggaagcagtcagactgcactcacctcagacacactggaaaacagtaagagaggagagaaagaagcctactgaggaagaaataagaaagatctgcagggatgaaaaggaagcgctggggcagaatgaggaatctcccaaacagggtttgattactatctggcaactgtcagatctgagtttctgtcctaaaaatgcactggcaaattccctactctcataactgacccatttccttatttaaacacacacccacagtgtctatcttagcaattactgagacatgtttagtgacctttccaaatctattatctcttttgttatggatgtttccccagagctaagaaaatctttgtgtggagcagatgcgtggatgtgttgcatggatctcacatagtttatctttgattggatgctgtggtttgaggctgagggctgcttccatgctttcctctattgtgcggcaccctaaggctactcatacggagagtccagggacttgttcttgtctgggctgagagcctcatttctgcatgtgatataatggactcagctcttgatgtgctacttttatctgggtgacaaaataaaaacaatttcatttcaggctttcattcttatgcatctgcttctaccctctgagtactccctagatggatttcacatgtcaggtttttccctaggttcagggtcggagggagaagatggctttcaggtagagttggagctagtggagttgactgtggggactctggatctttgtgagtctgaagtattgcccaagcggaggaggagaaaaaggaataagaaggagaaaagccgagaccaggaggctggggcacatcggactcttctccagcaaactcaagaagaggagccttccacacagtcatcccaggcagttgctgcccccttgggccctttgctggatgaggccaaagcccctggtcagccagagctctggaatgcactgcttgctgcttgccgagctggagatgttggagtgctaaagctgcagctagctcccagccctgcagaccctagagttctgtctctgctcagtgcccccttgggctccggtggctttactctcctgcatgcagcagctgcagctggaagaggctcagtggttcgtctgctgctggaagcaggtgctgaccccactgtgcagtgagtaaaggtccccatcctgagtcattttgggtatagagaggataatttggaggttaaagttggcattggctacttggcaatattcccttggtctggttgggtgatgttgggaaaggcaggaggcaagttaaacccatttttggagtttttgcacctagggactctcgggcccggccaccttatactgttgcggctgacaaatcaacacgtaatgagttccgaaggttcatggagaagaatccagatgcctacgattacaacaaggctcaggtcatctggaataggaaggacaagcagagtgggaaggcat

SEQ ID NO: 96200 - DNA, 95141 bp, Homo sapiens
tctaaataatctaaataatgctagttgattttggttctcataaatttattttttagggattctgtgcagtcaagcttgaggatagggatacattctgagaattgtgtccttaagcaatttcatcattcctacagaaacctagaccgtatatcctactatacatacacatctaggctatatggtatagcttattgctgctaggctacacacctgtacagcatgctattgtactgaatagacaattgtaacacaatgtttttgtatatctgaacatagaaaaggtacagcaaaaatagagtataatcttatgcgaccactgtttatatgtgctccatctttgaccaaaacgtcattatgggtgcatgactacatttatataagtattcattcttgagcttcagtttatggacaagctaaagttcacgaggagaaatacaaatattgtgtatactacctaatggaaaaagttgggcatacaaattgttcaaatactgagagtaggcccagcatggttgctcacacctataatcccagcactttgggaggctgcaggagttcaagaccagcctgggcaacatagtgtgacccccatgtggaaaaataaaatacagagtaaattgttatgatacaactaacacacattgtaaatcgacggattatccgctttaacattactttagtgtttttttttgtttgttttttgtttttttttgagacggagtctcgctctgtcacccaggctggtgtgcagtgacgcaatctcggctcacattgcaagctctgccttccgggttcatggcattctcctgcctcagcctcctgagtagctgggactacaggcacccgccaccatgcccggctaattttttttattttttagtaaagatggggtttcaccatgttagccaggatggtctcgatctcctgacctcgtgatccgcccacctcagcctcccaaagtactgggattacaggcgtgagccactgcgcctggcctgctttagtgttttttgatacattttatggaaaaggtggtaataaaaattgaaagtgtttttagtttatttaaaaaccagttgtcatagtaaatagtgaattccattcttttttgcattttaagttaaataacaaaccagcttattgcaaagagaaagtgactttgaaaccttcagtcttaataatgtttaagtaccgtttttgtccttaactcaaattaatacagtggtcgtttttgatgctcgatgaatgctgggaattcagaggaatgtcttcacttatacttggatttgctctcttcccatttctgattgttgtatagctttcgattttgcttacagtagttcccccttatcttcgggagatacattccaaggcccccagtgaactcctgaaacctcaaacagtaccaaacctttatacactgttttttccatatatatatacctatgataaagtataatgtataaattaagcatagcaagagattaataataatgtaatagaacaatgataacatactataataaaagttatgtgaatgtggttggtctctcttgctttcaaaatatcttcttgtacagtactcacctattttagaatgtggttgactacaggtaaccaaaaccacagaaagggaaactttggatgaggggggcactactgtacttaggaatacaactatatacatatgattttatttttaagaccatattatatttgggtatctactaatattttgtataaagcaattttttgttccattacgtgactttttgttttattgtatatgtaatttaacacacaataaagggtaaagttgcttccccaaaccacacttttaatcaaaacctagaatcatctgcagtccttgttaaaaatgcaggtttctagaaccctctgaagttctgattaaataaatttattgcaaaccactgtcctgtgtcactgtgtcatttgatatgaagtataccattgtgcttggtgtcagtatgcatatgtcatcttgagttcagtttttcatttattactaggtataggcctttctgtattttcatataatgcttggttctcttttaaatctcagaataatgaagggaaactttaattgttttctgtaaggcaaaatcaaccccaagcaaagtgaatgaagcaggctattaagccaagtgcagtttccaaggtgtaatcactcattaaggtcaacagttctgcttttaggatataaaaagaacaggcagtgactcgggaggctgagatgggaggatcacttgaacccaagagtttgaggctgcagtgagccataatcatgctgctgcactccagcctgatggacagtgcaacaccctgagtcaagggctggggaggggagcgttggtttacactgaattattggataaatgtttaagtcttcagccttgatctttgggatgtagaattaatggtcacacttatacgctattctgttcaaggattccatggttgtggaatgtcatgttggccagcctgatgtgcattttaaagattagatgtattccaactttattaatagttatgtctgtctttgacattcaaaatattgtccataatactttgttaaaaaaaaccctgcatttttaccaccatcttcatatattaaattctataaatttattacatgctatatgaaatacttccatgctcagatttttgttttgttttgtttttttaagaccgggtctccctctgttgtccagactggagtgcagtggcatgatcatagctcactacagcctccatctcccaggcttacacaatcttctcacctcagcttcctgaatagctgggactgcaagcacacaccaccatgctggctgattattttgatttttagtagagatgaagtctcactacattgcccaggctggcaatgaaattgagctttcataattttataattttagtatattccttcttgaactttttagatatgggagtctcaatacatggtatttctttatgacagttccctaaacagataaatccccaacttatgggataatatacttctcttaactcttctcattttagactaagtcctttgcatatcagtagtttaactgaatattgttatctggttaactgggcagaataacttcatgcaaaatgtattacagctggaactcagactgctttcagtcagccactttttgtgctcccttcatgtataaactagatgtaattttacctcttacctacctagacagtttcaaggaaaaaactgatataaaattgcttttaaaacattcttttgactagtgctctgtcaatatgaaaattagtaagcttgagcttgatgttagcacatcacttggtaccctgtaaactgcttactgactgcacacactgaaaagcacatctttgtccatgggaaaagcactgaatggagatttgttcaaattcagccctgcccctcaatgactggccaattcactttatttcttttaacttcagcttctttatcaaagtggaggaattatgattataagtaatcacagggattatagagataacagtgctttaagatagctatcttaagagattggagttatgaaaaattcaaaaatgaaatcagaaatgaagccaggagtggcggttcacacctgtaatcccggcactttgggaggccaaggcgggaggatcgcttgagctcaggagttcaagaccaatttggccaacatggtgaaaccctgtctctactaaaaatacagaaattacctgggtgtggtggtacatgcctgtaatcccagctagtcgggaggctgaggcatgaaaattgcttgaacccaggaagtggaggttgcagtgagctaagattgcaccactgcactccagcctgggcgacaagttgcctcataatacataatacacacatgtcctcacccttccttagaataagctttgtgtaataagtttaggtggcatggttatttgaacagagaggactgaaggatgagaaagaacattaccgaaacagaaaacactccatgtaaaagtcatggggtggaaagtgagcttaatcttgttcccacttcagaatcaagcccatgtgactcaaactttatgacaggagggatagtgggaggagatgaggttgcagaggtgggcagaggccagctcacttagggtgttgtgatgcaaagccattgggacagtaagcaggagagtgacctggtctgatgtgaagaattaccaggctgttgtgtgagaatagactatgtaggacaggtagcaacaaagaaacaacagaccgtctgtaatagttagtggtaatggtggctgggccagggctgtagttgtggaggtggtgagaagtatctggctgtgggacttactgatggattggttagtaattaagtgctcagtaaacaacatgggctttggtgtaaggctttgggtccaaatacgtgcaccaccccttgttacctggctaagtgaccttaccaggcctcactttatctccttgtttcttggatgatatcttcttttatctctatgaagactaaagtgatttaaaaaaattttttttttattttatagagccagcctctcactatattgcacaggctggtctgaactcctgggctcaagcagtctgcctgccttggcctcccaaagtgctgggattacaggcatgagccactgtgtcctgccgagcattagaatttttgccactaacagtgcttggtagcagaccgcaggtctgtaatttaagtgcaaaagggaaagagaaatacatttacagaactgccagacactgtaaattaactttgatcttcatcatctattttaactagtttgaaattataaaactgaaataaatttcctgacaagtaacctctattgttttattcatctgaattgtattagtattttgtcttattcaccttttcatccctgtgctgagtatggtgcctgactcataaccagcactcagaaaacgtggaattcatgaaaaggaagagggaattttgtctttcatttactcttttttttaaagaggaagaggtaagtaaatcttggttgcaatgcactctgaaattttaattacattttttatagttaaataggagtaatcaatttacttagcagggaatacagcagtccgggataacagaacagtagcagcgttttaaaaaaatattttatttatgggccaggtgtggtgtctcatgcctgtaatcccagcactttgggaggccgaggcgggcagatcacttgaggtcaggagttcaagaccagcctggcaaacacggtgaaacccatctctactaaaaatgcaaaaaaattagccgggtgtggtggcgggcgcctgtaatcctagctactcaggagcctgaggcaagagaatcgcttgaacctgggaggcagaggttgcaatgagccaagatcacgccaccgcactccagcctgggcgacagagcgagactctgtctccaaaaacaaaaaacaaaaaacataaatacaataaaaatttaaagtatttaaatatatatatacatatatatgtgtgtgtgtgtgtgtgtatatatatacacacacacacacacacacacacacacatatatgtatagtgtagaggcagggtctcactgtgttgcccaggctggtctccaactcctggcctcaagccatcctcccgcctcggcctcccaaagtgctaggattacaggcgtgagctcccgcgcccggctgatgccagcgttttaactctacaacaaactgaaactcaaacgagaggaagtggacctctcacaccaactcttatgcccaattggtcctctgccagtgaaggcggggaaggtgaacctgtggccgtcggcagatctgcagatctgccggactgcgggtcggggcgtggcaggggcctagtccccgccccggccgtcagcctgtcgcctctggctcgggccgggcgacgagaccctccctcagcacctgcagtgcagccagagccggtgcggcggccgcgacttccccgacgcggggcgctgagaagcagtgagtgcctgtgtgtacctgccggccgggaatataggacttgtcgcatctcagcccttccctcccrgagcgggggcgagaggtcgaggcggggaggcgaaggggcggtgggccgcgagggagarggagcgatggggtggacgtccttcaaggccggggaacacgcggggctttccaggccgcgggggacggtggcgggtgtcggggcgcggtggcaacgctggagttcccgggtccaccggcgcggtcagccctggtgacccaagccaggggctggggagcaatctgagaccattgcggctgggctgtggggctccccagtcccggcaggtcctggcgccgctgtacatagaaaccgttgccacggcgggaggatgccgtttcttttcggtctccgactgcagggggcggtcggccctgtggatgcaggaaagagggtgcctcggtgggagagacccagcttttcgcgttagtaggcccgagcagtttgaactggaggtattactaagctggctacgaaatatgggaggtggatgtggatcaggatgatggagaaattaaatccagctaggatcgaaggttttcccaattagaaacaaagactgcaaacagaggtggaagagttctaaagtattgtataacttgttttttggaacttgagatggacattcagtagtcttgagaaggtgtatcctacagaaagaaagaaaaaaagagaatccttttttttcaaaaaggattctcagagagacttggtccaaaggtagtgagttctctcacttgattgttcagttatagatccacctcctcgttgtactctttctccccttctcactactgcacttgattagtcaaaaaaaaaaaaaaaagattctcagagaaatgttaaaaygatgttcagaatgaaattcatttgattaggtaagagatggctctatcatttcatgtgtttttaatcacattttattgaaatcataaaatctcaggggttgcaaaataccttcaattcaaggtaatctattttaatcccattagatgcttagatctctcccaccaaagatcccttgctctttggaaaaatccttctaaggcaacccattctattctgggcagcatcaataatttacgagttcttcatcttgctttcctgtaacttctacccttgaggttatccttgtcctgggagccattcatcaataggccctgaaggtatggtgtgaaagccacatctaatttctcagctagatctcatccggaagcctaagaactgtcatctatatcatatacctaagtcaaagccggcaggaatttggagaagtggacagtgtcatccttttctgcagaggtctgatatatgaccagactcccagagggctgaaagaaatacttctatgaattagacccattgctacttcttgtttttaaaatcattgcccaagtacagtgggttttctttaacctttgacagtgacccacaataagaaatatagtttactttgtaacctcgtgcatttatatacacacataatttccatttatatagacatgaagtaaaagtttgtataaagcaatatttactttaatgttatatgtcaggtagtctattttttattctattccatctcattataaaacaatgttaattgcaactcactaaatttatttatgggttgctacctgcagtttgaaaatcactggtacagtggttaagtatgtgggctctgtagttagcctattgagactcgtatccttagttcacatgtcgacttgctcatttgtaaaataggagtaattattaatatcctttatgagagaggttttgaagattaggtgagataagctatggcacatggtaatttagctccataaatgttaactgttattactaatgtcacttaaaacctacccrgtacagtaattgagggattaaatgaagtaatatatgtaaagtacttagaatggtgcctagcacacattaagaactatatatttgttgctattattattatcattagcattagcagcagtatctttaaagtgatgttctccaagacctccttattcccaattcaattaaatgcagcgaatgtttctgaaggggtataggcactacttattatgttagtcctggagctgtgaggataaataaagtaagttctttcacaaactagaagggaagacaaataaacataattcaaatttgtgctaagagagaggtatgtacagggcacggcacggtggctcacgcctgtgatcccagcactttgggaggccaaggcaggcagatcacttgaggtccgtagttcaagaccagcctggccaacatggtgaaaccccatctctactaaaaatacaaaaattagttgggcgtggtggcccacacctgtaatcccagctactcaagaggctgaagcaggagaatcgcttgaacccaggaggaggaggtggcagtaagccaagattgtgtcactgcactccagcctgggtgacagagcaagactccaactcaaaaaaaaaaaaaaaaaaggagaggtatgtacagagtgcccttagaacacagttcattgtgtagtagggagaagaagtaggcagggagtgggaaaaggattgtgttaaggcaagttacagaaaggatgttattatttatgtttatggtgaatcacaaagaatgattgggatgttaacagctaaactagcagaaggtcattcaaaattaacattaaaaaatcttaaaaagcaatttgggcaccacaaccttctctgtcattgtattccagctttgcttaagtgaagattaagtgaggtaatctgtgtatggcacacagtaatttaactccataaatgtcaattgttgttatcagggacagagaattcaaaattagttgacttcctccatggaaaaaaacctctaccttctttttctacagaagtacctagaagggctgggcgtgatggctcacacctgtaatcccagcactttggaaggccaaagtgggaggatcacttgagtccaggagttcgagaccagcctggggaaaatggcaaaaccccatctctacaaaaaaatctaagagaaattagctgggagtggtggcacgtgcctgtagtcccagctactcaggagtctgaggtgggaggatcaccgagtccagaaggtcaggctgcagtgacccacgattgcaccactgcatttcagcctgggtgacagagtgacaccatctcaaaaacaaaaacaaacaaaacactccacctccttttatacagaagtacctatgtggcaggccaggtctcactaacacagacctccataacaatgatttcggtactgactgagtggttaagttaaatattaaaagccagtgcccttatacaaaggctgggatgtaacaaaagcccaccaagagttttgcctaggcctttcctgggccttaaagcatgacaaaatagaaaaggaatttttaatgacccacttaggattaaacaagttttactgtgggtctgaagaaactccccagacctccacaaacaagtttatggagggtctgaaggaactccccaaacctctgtgatttagcaggagacaagataagggtaattgccccagcacctggacccatttaaattaagtaaatttactgagaccccagaggaaggtcttcagcactcagactttagatatagattaaaagaagttaatcacttatgtctttagatgaatgcacgcttacacatggacatatggcktagaaggtatataagctctggaaaactttgtaattttgagttggtctggtgataatttccaggccttctccctgtagccagttgcagaagtaaatamcgtcttcctcctcggttcatctgcatctcgttattgggccacaaaactagcaggccaaccctcagtttggtccaggaacacctaggtgggacaggcacaatggctcatgcccataatcccagcactctgggaggctgaagcaggaggattgcttgaggccagaagttagagaccagcctgggcaacatagggagactctgtctctacaaaaaatttttaaaaattcaaaaaaatacaaagaagtacctacatggttaccactatccaaattgagtattatttatacattagattaataacttttaaatattgtatttcagctatgaccaccaaagattatccatcattgtggggctttggaacaacaaaaacattcaaaattcccattgaacatctagatttcaaatacattgaaaaatgttcagatgttaaacatctggaaaaaattctttgcgtgctcaggtaagcattttaaaatcattacatgttttagtatgacagttttaattatcttgttgttaccttctaaaggtaaaagctacattagaaatatctgtttttgcccatgcatggtaggtcccaaaatagtggttttgatcctatggttagtttggagagttccacctaggtctactgccagcatgagacgcaggctaattaatatccaggagggtatttttcttgccttctctacattttytaggagaaggtaaagtagctgtgaaagcagccattaggatgggctgtgatggctcacgcctgcaaccccagcactttgggaggctgaagcaggtggatcatttgagctcaggagttcaagaccagcctgagcaacagggtgaaatcctatctctacaaaaaatacgaaaattaccttggcctgtagtcccagctactcagaaggctgaggtgggaggattgcttgggccttggaggctatagtgatccctggttgtgccactgcactccagcctgggtgacagagtctcaaaaaataaaaaaataaaaaataataataaaaaaaataaaaaaagctattaggaggtaagcttatctcaccagcctaggctggtggcactttcccacttcatatcacctgacaacaagggagggtgacccaccgcacactgatcacatggagggtggtggggaggcctgacggtaataccagaaggcagggaattaggaccttctcaggatagagctccattctagtgactgtccaactgaatatacatcaaatgtggttgttaaaaatgcacatttgagggccctattcccagcgattctgcttcaaaaaatctggggtagggccagggaacatgtgtttttaacaatggagctggctgattgatatgtaggtgttcaaggaacccacttgaagaaacactgtcctgagtaccaccaacctgtgacacctcttttggatttcttttctttctttctttctttttttttttttttaagactggatctcactatgttgtccagactgatgtcaaactcctggacttgagcaatcctcctgctttggcctcccaaagtgctggggcctctttgggcctcttgagctattttcatttggataccagagttctattgcagaagacacttgtggagcatgaactgctttccaggacatctagaattcctattaccctgtggtggttctttatttcctctatccctattccttatcactgggttcttccctttttctctttcatcacctttagcttcctttcttccctgttggtccacagccagatgctgatgtgataacatcatcatttttaaaatggaaagtgaaaaatcaataatatcaattgttttcccttttttagcagaatattatcatgtatacttggtcaaggacggataaataaaaatgaaaagtttattggatgaaacagttggaaagctacagttataataatgttggttccaagaaattttatgaatagcctaattcagtgataatatattgaacttggaattgttttttaaaatttaatttggaaatgaaatttatttatatttttctrgaaatgtaagagtgaacagacctaagaaagaatgggaaaggactgattttccttaaaataaaaggaacagatgtctccatttaactctctaaggaaggaattctgttccttgagtggttggatttcagggtgttttgtttaagctgtttatctgccattttcttcctacctctttgaaataaaaaaatttatgaacagaaactccttgttgaaaaggaagtccaaattctctttctgctagtctctaatattgaatttatgagcttaatatcatgtacaaaatgaacatatgaacatatatatgttgaagagaaaatattgtttttgttagattaaaattttgtttctttggttgatattaaactgaaatttatatgatacatgagatttgaaacttagaaaaagtaaatgataaaatttttttttatttttattttttgagatgcagtctcactctgtcacccaggctggagtgcagtggtgcgatctcggttcactgcaacctctgcctcccaggttcaagtgattctcctgcctcagcctcctgcatagctgggattacaggtgcctgccaccacgcccggctaatttttgtacttttagtagagagtccatttcgccatgttggccaggctgttytcgaacacctgacctcaagtgatccacctgccttggcctcccaaagtgctgggaatacaggcctgagccacagtgcccaacctgataaaaatttaatatagttaactattcattgatatgtttattgacttcatcataagctatatatttaattaaaaatcaaactatgagtctgcaaaccagatgctatcaagcaaattaccatccatgatccataattctttttatatttttaactcagacaaatatgtaagattcagtaagttttaatgtttcaaatgttttccaaaaaattatcagaagctcccagttataaaatagttggagaatccattcaccccaaatgaactacctgtttgtgtgtgaggtagcaatcttctgtgacactattacccttaattcatatgaattccctcttcacatgaagagtacagacaacaaacagggacagatgagtctcattattcattgactcttggtgttttcatagtgtgttaaatgcctgatttcaattttacagcaacaaaaaataccaatatttattctgaaaggtaattgtatgttccaagcagccgatattaacaacttccatcacgactctaggaataattcgcagttctgaaccatgttttagaaaaacatttccagcaggtctgtgcaggattttttcctattccatcattggtaataattgcacttcttgcagcaggaacttgaaattcttctgttgcaaactgtaagactgctgtgaaaggtgtactttcaggaacagagtactttgtacgccagccgcgggtcagacctcagagtgatcttaaaggaaacctttgacatggtggcgccgggaggaacccagaacccacgccaactccgcggagcaaccccamttcctccayggtgccggggaccacaccgccccactcacccttatccagtttttaaagtgtgtgatgaaaattggttactttggagttcctttttttcttcttttaatcattccatagattaacgggtaaaaatggagactatgcgggttaaggaaagagamtgggaagcagcccttgagatctccacagaacctcagggttccatggaacccagcctgcaaaccgctggtctagatgatcctaaataaggtgctaactctaaaacttatttatttctttttaagatctggtgaggaaggatattatcctgaacttacagaattttgtgaaaagcatcttcaagccttggcccctgaaagcagagctttgaggaaagataaaccagcagcaacagcagccagttttacagctgaagaatgggaaaaaattgatggtgatataaaggtatatagtaataccaattttccatagatattgttgagacattctatatatgtttacttcacttatcggaaatcctaggcttcttgtttgtccgtaaagggcttttagtgtcaattaggcaggattggttgctttttacacccaggggaacattgcgaattcgcgtgtgtgtgcgtccgtacatgtgtatatttaaattgattraataatattctgtcctattaaaaaacctataatttaatcatcttcaataaatagtgctgtataaacatgtttatttgtaattttttttcttttttttttgagatggagtcttgctttgttgcccaggctggagtgcagtggcacgatcttggctcactgcaacctctgcctcccaggttcaagtgattctcctgcctcagcctcccgagcagctgggattacaggtgcatgccaccatgcctggctaatttttgtatttttagtagagatggggtttcaccatattggccagacttctcgaactcctgacctcaggtgatccacccacctcggcctcccaaagtgctgggattacaggtgtgagccaccatgcctggcctatttgtaattwttttgcacctccctgattatttcctcaggataaattattataattcaaattgcttggtcagatgtggttgctcacaccacctgtaatcccagcactttgggaggctgaggcagaaggatcacttcaggccaggagtttgagaccagcctgggcaacataggtagagctgtctctacaaaaatataaaaattagctggacgtggtggcatgtgtctgtartcccagccattcaggaggctgagacaggaggatcgctttatcctgagagaccgaggctgccgtgagctgtgatggtgtcattgcactccggcctgggtgacagagtgagaccctgtctaaaaacaaaaagcaagagaaagagaaaaagaatttaaattgtttgatcaaaggatttgaatatttttaagccttttcaaacatatgttctcagaaaagttgtaccttcatacaccacccccaacagtgtataagaatgcccaagccaggtgcagtggtgtgtgcctatagtcccagttactcagggaggattgcttgaacccaagagttcaaggccagcctagacaatacagagagacctggtttctttattaaaaaaaacaaaaacaaacaaacaaaatgcccatttttaggtactctttgctggatactgtaatcatttttagtcaattaaatagttgaaaaaatggtagtaccatagtcccttcttatctttggggcatactttccaagacccccagtagatgcctaaaactgcaaatagtactgaagcctaaatataccatgctttttcctctatatgcatatctatgataaagtttaacttataaattaggcacactaagagattaacaataaaaaacagaacaattataacagcatactgttgtaagagttatgtgaatatgagctctctttctctcaaaatatcttactgtattgtactcacctatttttggatggcagttgactgtgggtaactgaaaccacagaaagcaaaattacagataaggggaggactattgtagtatattttttgattgctagaaaagttgagttatttttcatgaatctgtcacttaaatttcttcttaaatatttacagatttcttttaatcagctttattgagataaaatttacattccatataaattaccaactttatagtgtacatttcactgagttttgacaaacgtatatgatacagaacatttccatcaccactaaaagttttctcttgcccatttgtggtcagtgtagaccccactgcctggcctttggcaaccactgaactgtcagcatagttttgccttttctagacttgcatataaatgtaatcatacagtatgttgtcattcctgtgtgtcttctttcacttatataatgcttttgagattcatctgtgttgttgcatgtgtccatagtttgctcctctgagttgctaagtagtatgraattgtatgaatatcccacmgtttgtttacccacttacctttgataagacccgcagtggatgcctaaaacctagataatactgagccctaaatatactatgttttgactgccaaaatgttttccaaagtggctgtaccattgtgcaatcctgacagcaatatataaaatttccacctgctttacatcctggtcagcacatagtattgtccgttttgttagttttagccatcctaccaggtatctcattgtggttttaatttgcgtatctctagtgactaatgatattgagtgtcttttcatgtaacttctattgtgaggtgtctttacatcctttgcccgttaaaaaaaaattgccttgtgttcttattgagttgccaaataattgttctttatcagatacgttgcttttttgcccaggctggagtgcagtggcaccatcacagctcgctgcagccttgacctcccagactcaagcgatgctcccacttcagccttcagagtagctgggaccacaggtgtgtaccaccacacctggctatttttttttttttaattgtttgtagagacagggcttcactatgttgtccaggctagtcttgaactcctgggctgctttggcccctcaaagtactgggattacagcatgagccaccatgcccagccatcttttttttttttttttttttttttttkttgttgagacagagctttgctcttgttgcccaggctggagtgcaatgacacagtctcagctcattgcaacctccaactcccaggttcaagcagttctcctgcctcagccttctgagtagctgggattacaggcatgcgccaccacgcccagctaatgtcgtatttttagtagagacaaggtttctccatgttggtcaggctggtctcgaactcccaacctcatgtgatctgcccatctcggcctcccaaagtgcggggattacaggtgtgagccaccacgcccggcctcttttcatttttttttaacagtatctttggaagagtgaaagttttaacttttgatgaaatcttttttttattgtttgggcttttgtgttttatctaagaaatctttgtttaatccaggacatctaatttttctcctaggaagtttatagttttaattcttatatctaggtctataatcagttttaatttttgtattggtgtttgaacaaaaagtgttcaagcaccatttaataaaatattatctttaaatttcttggtaccattgtcaaaaatcagttgaccaaakctgggtgtggtggcgcatgcctacagtcccagtttctctggaggctgagacaaggggatcacttgagcccaggagttttaggctatcatgcactattaccaagcctgtgaatagctgcttaactctaggctggacaacacagcaagacctcatctctaaaaaatcttttttaaaaaatcaactgggctgagcacagtggctcacgcytataatccagcactttgggaggctgaggcgggtggatcacttgaggtcgggagttcaagaccagactggccaacgtggcaaaaccccatctctactaaataccaaaaattagctaagcatggttgcgtgtgcctatagtcccagctactcaggaggctgaggcacaagaattgcttgaacctaggaggcagaggttgcagttagctgagatggtgtcactgaactccagtctggatgacagagcaagactgtctcaaaaaaaaagaatcagttgatcttatgtgtgggtctatttctgactctttcaattctgtttcattattttattttttatatttatttatttattttgtactccttgaggagcaaggctaccccctaggcagcctgcccacagtagcctgtttcattattttaaatgtccatctttactccattaccttcttgtcttgattacaatagttttacagtaactcttgaaatcttactgtaataagaggctggaaaaaaaaaaagagactggaggtagtacaagtcttccacctttgttctttttaaaagttgttttggctattctaggtcttttgcttattacaaaataacttgcttgtgtttgaattgggattgtgttgaatttatggatcaattttggaagaactgacatcttaatattgaggtttcggatccatgaacattgtatatttcttcattcatttaagtcttcaattttttttacagcaatgtcttatagttttcagtatgtagttcttgcatatttttgctaaacttattcctaagcattatatgtagctcatgctattataaatgttaatatttttataatttcaattttttgctcatcctgtcatctcagttatgaaattttgtttttttattatagtgaaatacatattacataaaatttattatcttaaccagttttgagtgtacagttcagtagtgttaagcatattcacatggttgtgcaaccactcttcagaactttttcatcctgcaaaacaaatgctatactcattaaacaacaactycccattttccccactcccctgtcccctagcaaccaccattctattgctgttcctataagtttgactactttagatacctaattttaatttcaatttttaattatacaagtttgtatttatctaattgctttttcatattgacttcatatcctgcaattttgttaaattcatggattagttctaggaatgtttttgtagattcattggattttctacctgcaggatcatgccatctgtgaaaaataagagatgtgcttcttttccagtctgccwtttatttatttatttatttatttatttatttttttatttttttattttttacttgctttattgaactggctagaacctccagttcagcagaagtggtaagagcagatcctcgcctatttcccagtcttacagggaaatcgttctgactttcactgtgaaatataacgttagctttaaattttgtgtagatgccctttatcaagttgaagttttcttctgttccttgtttgatgagaatttttatcatgaatgggttttgaattttgtgaaatgctttttctgcatttattgagatgaacagatgattttctttgtagtctgttaataaggtaaattatgtagattgttttcaaatattataccaaccttacattccaggataaactctacttggtcatgatatatcttttacaaatatattcctggatttgatttgctaaaattttgcgaaggatttttgtgtctatgatcatgagagatattggtcaatagttttattttcctgtaatatcactgtctggttttggtagcagggtaatgctggcctcataagaggagttgggaagtattgtctcctcttctgttttctaaaaaagttggtatatgattggtattatttctttcttaaatgttttcaattcattgttgacactgtataggcctggagttttctttgtaggaaagattttaactgtgaattcaatttttcaaatagatacaaggctgtttaggttatctttagagctctctttctgtacggcttcctcctttctgatatttttttcccccgaatcctcacagtcttggcctccctaacgtccaaactttgtctgctgaattcagcaagaccacagggttctgtctgggtacttttcctgtgctgcagcctggaaactgcagtgagttggagcaaatgtagggcttacctcatttgttcacccttctttcaagaatcactgtcctgtgccacctgttgtctagtgtctgaccaccatcactccatatatcttacccagttttctagaatttaggtaagagagtaaatctagttcctgactccgtcaggccagaagaagtccctttattgatttttctttttttttttctgagacggagtctcgctctatcgcccrggctagagcgcagtagcacaatcttggctcactgcaatctctgcctctccagttcaagtgattctcccgcctcagcctcccgagaagctgggattacaggcacgtgccaccgcgcccagctaatttttgcattttttctattaatgtgtttctcattgttttgtaagagttctgtactgtatattgtaaattttcctctagcttgttgtttaccttttaaatgttgtgtgtggtgttttttatttttttaaatttttatgctatcctcttaattttattctttaagaacttttcattggcttttatagttaggaaggttttctctccaccagatacatatttacttatattttctcagagtttcttcagtttcattttgcttaagaaattatttttgggctgggcacgagtggctcatgcctgtaatcccagcactttgggaggccgaggcaggyggatcacctgaggtcaggagttcgagaccaccctggccaacatggtgaaaccctgtctctactaaaaatacaaacaatcagccaggtgtggtggtgcatgcctgtaatcccagctactcaggaggctgaggcatgagaatcacttgaacccaggaggtggaggttgtagtgagcaaagatggcaccactgtactccagcctgggagacagagctagactctgcctaaaaaaaagaaatatatgtgtgtgtgtgtgtgtgtgtgtgtgtgtatgtgtgtgtgtatgtatgtgtatatatatgtgtgtatacacatatatacctcgcagatkctagagaaccagttttttggtttactttattytatttatatttttctggggttaaaaacaattttaaaacatctaaaaacaatgttgaggtatatgtattctgtaacttagaatgctgctttttaaactttcwgccttctcattttattggcttgagctcaaaaatatggtaattaatctaccagtcaaaaatagcactttatgtccagactttttggctttgttttcaggatgcagacagcttgattttagttgaagagcctaggtttttccccattgtgtgtctttgctcttcttgaccacttcttttttttttttttttttttttttgagatggggtcttgctctgtcacccaggctggagtgcagtggcacaatcatagctcactgcagccttgaactcttgggctcaagtgatcctcctgattctcccaagtagctgggattacaggcattcaccaccacactcagctaatttttttgtagagacaggggtcttgctgtattgtccaggctggtctagaactcttgttggccactttgcaagttagtctccttctcacttgcctttctttcatactttgtttgccacttgtccccttttctccattctttctcgctcccttcctcctctataagtcttcctcttatcttttaccattcttaccttattgcttttctttttcttctcatatttctcctctttgcccctttccaccctccctgccttctatacagatagaacagataatatagttgttgggtttttttgctgtatcccagtgcttttaagagtgtctaacaaatattagaaccctcaatacatcttttctgaataataagtaatacagtttcacagataataaatctcttactcaattttttttctggcacctgtgacaatttaataaatgttaagaacctactatatgtcagacactgaatcacaaagatgaaattaagacataggccctgccctcaaggaatttacagtataagaagagagactaacaatagatgatttttaaatctttatgctaatgtattatggaggagaagcacttttagcccaactaggaagttctgggaaatcttgctgaaaagaatgatgaataaggtattgcaagataaataaaagtaggaagggcaacaacaatgtatatatacttaacaagactgaactgtagacttaaaaatggttaagatggccaattttattatgttatacatatttaccacaatttaaaataaaaggtaggaagtatgttccagatagtgaggatggcatggatcacattgtctaaaaaattgactcataggaaactatgataaatatagctgactcttgaacaacacaaggagttaggggcgctggctccctacacagtcaaaaatctacttacaacttttgactcccccaaaacttaactattgatagtctatcgttgactgaaagccttaccaataacatgaacagttgattgacatatattttgtatgttatatagattatatactgtattcttacaataaagtaagctagagaaaagaaaatgttattaggaaaatcataaggaagagaatatatatttacaatgtattaagtggaagtggatcatcataaaggtctttatcctcgtcatcatcacattaaataggttgaggaggaggaggaagcataggaggtgttggttttgctgtctcaagggtagcagagatggaagaggtggaggagatgaaaggagaggcaggtgcacttggtgtaactttatagaaatcaatcataatttctgtctgacttttgctttttcatttccytaaaaatgttactatatggtaccaatccttcttccaccgtttgctttagttttagtccccgtatcacagagggtagatgttgtgaaagaagtcaaaaacagtcttgtgtaatcggagcccttctgccagattgtctaatgttagtttattttctggcattgcttcttctatgtcttctcattgtctggcactggttcagaagcacttaccttcatgaagtcatcttctgttaattactgtggtatggtgttagcacttgaatttctccaacttccatatcttgaaacacttcactcccaactttttttggcatattcataatctcttttatgatttccttgatttactctattgtaaatcctatgaaatcccggacaacatctggacagtttttttctagcagggatttattatttcatggcttttttttttttttcttagagatgggatcttgccatgttgccagggctggaacgtaatggctattcacaggcagggtcatagcacacagtacagcctataactcttgggctcaagcgatcctcctgcctcagcctcctgagtaagtggggctacaggtgcatgtgccaccactcctggcttaatggctttttctataataatgatggcatcttcaatggtgtagtccttctagacgttcatgatgttctatcagggttctcttctgtagtgttgacaatcctttccatagagaagggcgtgcagtgaagttcttttttttttttttttttgagatagagtcttggtctgtcgcccagcctggagtgcagtggctcgatcttggctcactgcaagctctgcctcccaagttcacaccattctcctgcctcagcctcccgagtagctgggactacaggcgcccaccaccatgcctgactaattttttttgtatttttagtagagatggggtttcaccatgttagccaggatggtctcaatctcctgacctcgtgatccgtctgcctcagcttccaaagttctgggattacaggcataagccaccgcacccagctagcacgcagtaaagttcttaaagatctttgtgaccccctgatctagaggttgaattagagacgttgtgtttaggggtaagtagaccacttgaccccttcggtcttgaactcatgggattctggatggcctgggacattgtccaacatcagaagaactttaaaaggcagtcccttagtggcaaggtacatcctgacttcaggaacaaagcattgatggaaccaatacagaaaaagtgttcttgaaccaatacagaaaaaggccttcttgttgtacagccaaaagactggcagctgatatctatcttttcccctcaaggcttgagggttaacagctttacaaataaggtcagtcctgatcataaacccaactgagtttgcacaaaatagttgagtttccctatcccttcctgccttaaatcctggtgcttgcttctgttccttactaataaatatcctttgtggcatttttttccccaagaatacagcacttttgtctgcattaaaaacctgctcagacagatattctttctctttattgattttctcaatggcgcctggaaacttgtctgctgccttttggttgggagaaggtgcttttcctgttctcttgacattttaaaagccaaacctttttctaaaattcaaaccatcctttgctggcgttcaattcttcagctttataggtccatcatcttccttttgctttaagttgtcatataatgactttgctttttctggaatcatattagagtctataggaatgtctttctttttttttttctttctttcttttttttttgagactgagtcttgctctgtcgcccaggctggggtgcagtggtgcaatctcggctcgctacaacctccgcctcctgggttcaagtaattctcctgcctcagcctccccagtagctgggattacaggtgcccaccaccacacctggctaattttgtatttttagtagagacggggtttcaccatgttggccaggctggtctggaactcctgacctcaagtgatctgcccgcttcggcctcccgaagtgctgggattacaggcgtgagccaccacgcccagccaggaatgtctttattacatcaattttgcacccacatgaaggctgcattttcaataaaagataaaaaggcatttcacaagaagtgcaaagtctttgcacctgatggtgtagccgcagtgatgcaatgatggcctcataaatttccctctcctctcctctcctctcctctcctctcctcttctctctcctccctctccccttccccctacccctccctctccctctcctcctccccctccctctctccttttccctcctcctttcctctccctctcctctccttctttttttcgtttctttcttttttttcaatggtccttactctggattcatttattttgaaatggtgggcaactgcaayggtagcttatgccagatcttaatctctggcacatatcaagcaattcagctttttcttgtaatatcatgtgttctctctgcttcttgggagcacttccagcatcactagtgacactttatatgggtcccatggtgttatttaaggtttacagtattacactaaacatcataaaaatatgtgagaactgtgagagatcactttttatggcaagatgcagtttactagagacaaactgctcctgcagagatgactagtgtcacaaggcattttaagcagatacttgtaactcttaagcttaccacaatagcaacaggaggtggctgtgaaattattacgtattatagtgtctcctacagtcagttttatgcagctatgatttaatactgcatcttcatgtctttttttttttacatttctctttactgtgaatggtgccatttatggtctgtaagtgtttgtgtgggtaagttttgataaattttaactttttataacttgtgtatactttatggtagtaaatgataaaacagactagtatctacatatattttatgcattcatgaaatacctaactttatcttaatttttttgatatttctaattcatctgtgagttttttcaaatcgtcacaaatctccaaaaatttttccaatatttttactgaaaaaaatccacatataagtggaccaatgcagttcaaacttatattgttcaagggtcaactatagttctttcttatgcttggttataattatttcaaactatatatttacccttttctctattctcagagttgggtatcagaaattaaaaaagaagaagataaaatgcactttcatgaaactgagacatttccagcaatgaaagataatttgcctccagttcgtggttcaaacagctgtcttcatgtaggcaaggtaggcttctttgatatctttgtgggtggtagcaggagaggattgctgctgtttattaaggggcaatctcagtttaattggagcagcctatgtgtgatgtcctctaggagaattggggagtttgttcagctggctgggaactatcggctgggaactatcacgttctttactgtctcattacttggaaatcaaaatgaaacagttttttcctttgaagtcctgcatcttgggcttatttactgcctttagtcttttttttctttttttatacaccctgtctcttccgtccagttttgatgagagcaaaaggtctgattcagtgtgtgaaaatttcagggaacaattgtatatatctagtagggctacagaggatatatcatgttacataatttaattatggatttaaaacagtaaacagatactttcagtacttataaatgtcattcctctgtttagtgcatgttttttcctcttattcccatttctctgtcgttggtccctattttgtcacatagacctctcctttttaatctgtgggctccacagagaaggggcctcttgaagttccaggcccattctatttaactttaggttgaaactggggttcctggcatccatctgaccttgtaatttctcagatgactccccaagccttttcattctaggttaactcattcttgttattctcgtcttttctttgaatcaattttattttaaaaacatccatggctcttcatcactctgctctctgataatttaccttcctggatctttttactcctcattaggaattatgcaggtaatggaggtgtacagtaatctggtgaggatgccactatctgcaatcagtgaaattgtatttattgaatagttggccaggcacggtggctcacgcctgtaatcccagcactttgggaggctgaggtggatggattgaggccaggagttcgagaccagcctggccaacatggtgaaaccccatctctactaaaaatacaaaaacattagccaggcatagtggcatgtgcctgtaatctcagcttcctgggaggctgaggcacgagaattgcttgaacccaggagatggaggttgcagcgagctgagattgtctcctctgtctcaaaaaaaaaaaaaaaaccacaaaaacaaacaaaaaaactctgggcatggtggctcacacctgtaatcccagcaccttggaaagccaaggagggtggatcacttgaggtcaggagttcaagaccagccgggccaacatggtgaaaccccatctgtactaaaaatacaaaaattagccagccatggtggtgggcccctgtaatcccagctatttggaaggctgaggcaggagaatcgcttgaacctgggaggcagaggttgcagtgagctgagatcacaccactgtactccagcctgggggaaagagggagaatccatctcaaaaaataataataacaataataatagtcccggtgtactaagactgtgccttgaaaatataacaatgaacaagcattgctgaaggagcaatggggtggatggactagtggtacagtagttcttaaagtatggtytaggaagcccttgaagtcccagagattcttccagggggtccagaaagttagtgctattttgaaaataatactaatgctttgtccttgtcactgtgttggtatttgccctgaggataaagctgctattgctttaacatgaagcaaggcaggcaccacgttgtatatacagtaaaaacaaattccaattttacttaaaaatacctttgataaaataatagaatatttactttgttagatcttgaacttccaggacatgtcattttagtattttgtgacaaagtgagaagtatgcagaaagcacttccctgcatagtcaaatatgatggttatgatatgatgcatagccacgtcttcctggaatgctgtttttacttgaaataatggttgacaaactgtcattattcagacttaggattttggcaaaaattttgttggaagtgaatgaaggaggcctgtcgctttaagaaaaacaactcacagtatttgttgstagtaagaaaatctgacctttcaagtgcaaattaggtccaggcacaggcgggcagtggctcatgcctgtaattccagcactttgggaggccaaggcgggtggatcacttgagcccaggagttcgaggcctgggcaacatagcgagaccccatctctacaaaacatttttttttttattagtgtggtgtggtggcacatgcctatagttctagttctatctattcaggagactgaggtaagaggattgcttgagccctagtggtcaaggctgcagtgagccatgatgacaycactatactccagtctgggcaacagagcaagaccctgtctctaaaaacaaagtgcaaattagggcttgaggtattaaatatttagtataatataacartatctaataatttagatattatgtgtttctcaaatatctgcttgtgacagaaaatagcccttaagggggatacttgtcaaaggacaaaattacaacaaatttcaagatctaattggcttctattaacaattcatgaatcaggatggcatctcctctaaaaatttagaaaatatgctccaatggccatggcagaacagctggtttttataaggtagcttgagcagggataaggcatacaaaaaatagactatttaataacaggttactttccttgtaagggttaaagcagaaatttggctattatctctgtctcttgatttctccagtcagataagcaacttagttttggtttggtgatatggaacttgagcactagtgactgtatttaagtctgttggggcctagtgcaggagcttagtccaaatcattgaccttctataaattttatttaacatacttgaaagtcttttttgatgatctccatgcagatattaacaaattgtgatttttaaaattgcataatgaaatctgtgaatatttggaaaatctgtataactccaatgaccaataattttgaggagtgcgagagtgtcatgatactgaaaagtttgagccccactaatgtagcatataatggattatgacagtaaatatgcagtgttatgagaatacatagaaggcacatgtcccagcctttcaaagtcagggagcattgccttcttaaaatatccaaatataatattacacattagaatttatcatgtatactgagtccatgtcttgagacttttattgctccacattctttttttatttattgaaaatcttcttcttctttattcagtcataattgataaaacttgcatgtatttatggtgtgcaatgtgacattttgatatatctacacattttgaaatgcttaccacagtcaagccaattcatgtccatttcttgatccctaaagggggatattttttgtcacaggtaggtatttgagagccacatatgaatattaaatacccctgattttgaatcaatgaccttttgaaactaagtgataccacttgtattagtttcctagggctgctgtaacaccacaggaagtggttggcataaaacaacagaaatgtattctttcacagttctaggggctagaagtacacaatcaaggtattggcagggcctttcttcctccaaaacctgtaagggaagatccttccttggctcttccagcttttggaagccccggccttccttggtttgtagcggcacaactctaagctctgttttcatttccacaccaccagcttccttctattggaacttcttctcctctttgtataaggacacagtcatactggattagggcccaccctaatgacttcatcttcatttgatgacattgcaaagaccctatttccaaataaggtctcattcacaggtaccggggttaggacttcatcatattgtttttgggagacacaattcaacccataacatcatcttagcattgagaacattgtctttatgagtaggaaatcgagttcaagcatcaaatgatactttttgagcctgtaaggactgcatagtactcatttatgtagtttatatagttyttagtattgctattagcaaacctgagcctaatgagaatgaagatatgtaatagtttaaaaacaaatcagtacctactttattattataaattctgctatacttacctttcttcagactatatagataaatattttaaagttaatattccttagtacttatctagcaaaaaattgtaccctctctgggagactgattatttgtgagcattatggctattgtttgcctttctctcattctgttctggtgcagaacctgccctctgtctttagcagtgggaatgtggctaytttgggccactgttagtgcttggttaggatgggcccatgacccaagctagccaatcagtccttccttggaatttctctaactgaagatggagagaagagtcactctccttttcctctggtggagagagctgtgaggttataattccagaatgcttgtggtgatgtttcctgccacatggagaaagcaagtacccatcagggaaagtgaaatcagtaggtagagaggagcagaacctgggaggggcagggagagctggagaaagggcataggaatcccctcatccagcagcacccttgcccttccatcagtttagttatataagctgataatttcttcttttttaatgtaattattccaaatcagattactatcattgcaaacttctgactaatatagcaattattcttgtttctccaatgcctaggtttgaaaagaatgaatcagaatttagtacttttttattataagaaaatcagtaataatcatattcacacataagttttaaaattttatatgtatatacttaaaaacctatagattgtccccagaattaactataaatttaaaattctttcttttacatgctgtatattattatgttaataactgtaatactgaagttattataacttccagggtacctatttttcttatccattccatttgtatatctttattttatttttatttttttgagacagtttctctttgtcacccaggctggagtgtagttgctcgatytytgctcactgcaacctccacctcccaggttcaagcaattytcatgcttcaacctccaagtacctgggattaaaggtgtgcgccaccatgcccagctaatttttgtatttttagtagagacggggtttcaccatgttggccaggcgggtctggaactcctggcctcaagtgagctgtccacctcagcctcccaaagtgctgggattacaggsgtgagtccccgcacctggcttccatttgtatatcttaacccaatactttccattgcatttacagtaaaacctgataatcttatattaaatatgtctcataaaatatkattttattcttttaggaaaaatattctaaaagaccaactaaaaagaaaactccaagggattacgcggaatgggataagtatgttttacatgtctttatataaaatgtatcactaaaaaagttatctaccacaaaatactgcaataatttcttaaataattattataaaccttaacatgtcaagaataccaaattacttcaatagagtactgagaatatctggcctcagcacttttgatgtttttttcagtacataaaaaacttctacatcctatttttttataaagtcagccaaaaaaactaatgtattttttatacccatccaaactaaaaaggaacaaaaatttaaaattgagataagttagtcaaaattttaatttcaaagttctgaccagtttagatttgattaacgtttaagttctcactaaattgtatgttttcttaagaaggaactcagatgacttgaactattaacttactacatatttttgaatatgtatccaaaggcatacttgtacaaatataagaatatcaatgataaatttattttcttgcctgtattgtacttttttggtttttattgttctttcatttaagatttgacgtggagaaggaatgtttaaaaattgatgaagattacaaagaaaagacggtaatagacaagtcacacttgtctaaaattgagacaagaatagatacagcaggtaattggagaaaaaataataatttagtagtctttaaagtttttcaattataataaaaagtgtcaatctagaagacattgtctttgagtactgcacagattaccatgaaaagtttatggattttctcttacagttgaccactcaacaaattcacttctctcttttacccacttaatttttaaatgtagtaaggctttaaaatataaacctatttttcttactgtaattcatttgtttttaattccttttttccaatcctctttttcctccaaattcctaaaattgttttctttttgcttcaaaacaaaaagatggggcagtttattggactagcacctataaagtgaaacgaaatcaatcattaaaaaaattctgaatcctcaaaacttgtgaatgatttaaaaagaaaacatccctaagcttggggaaccttttattttcttttgtttattttatgatctttctgctttcttctgcttctgttaaaataagcattcttagatttaaacttgaaaaattctgttaaattatacrtttacatatagcagataacatttatttctagstctaactgagaaagaaaaggattttcttgccactcgtgaaaaggagaaaggaaatgaagctttcaactcaggrgattatgaagaagcagtgatgtattataccaggtgagcagatgtttgttggggtttaaacttgccttttaaaaaatgataatgttttaattgttgaaacaatataaataagcgaaagtctatgtcagaatctctcaatgtattgtacttgtgatttatcatatattcacttgtgtttctcctattttttcaataatttttctcaaacctctaagctcccactccactcctacttttgacagaagacttaacttcctatcttgcagagaaaatagaaggcatctgacaggaattcaacagaaggcccatatgatatagaagtgaataacttgggttccattgtagactgcctggatttacttctagtactttggtgctccttcctaccacagggcctttgcacatgctgggtgcaccatcaaaaatgcttttcccatggctggtctgagtacagtggtgtttacaactaattgatcacaaccagttacagatttccttgttccttctccactcccactgtttcacttgactagcctttaaaagagaaaaggaaattaagaaaaaaaatgctcttccctcgttccattatctagttaattctgatttatccttcagatcttagtcttcaccttacttctttggagaagtcttacttcaccttccaaactaggttaaatctccatctcaccccacccacctcacctcccaatttataggctcttatagcagtcttacctctcctttgtagcacttgtcagaagtataatttaagcttgtgtgatttgataataactagaatgtaagatttgtaacagcagaacccatttgtcaaggatttttacaccattgtatccccaaggcccaacaaagtacctggttcatagtagatgttcaataaatatgtatatgaacttctgaagttcttaacagcctatgaaaagtagactragtttttaaaatgttgttacagataaactgttcttatagaatcactaatgctaccttagcactaaactctgtacaatcttttttccacctttggaaataagatagatttttttcaatgttgttggtgtatctaaagaagttttctcagattgtttaaatgaagatacgaggtaaagaggatatatgatggatcattcattcagtacagcctcccctgttcaggcaggtggatgtcagccttgataactgttctttcttttcttgtaggtttataccagagattctcttgtctattacaggttacaaagctcttttcttcttttttgaggagtcatatagttgaagaattaaagcagcatagtatgatggttaagggaattcagactaccactttctgaccttgggcagattcttttttttttttttttttttttttgagacagggtctcactctgttatccaggcaagagtgcagtggtgtgatcatagctcgctgcagcctcaaactcctgggctccagggatcctcccacctcagcctcctgagaatactgggactacaggtgtgagtcaccatacctggataattttctcttgtgttttttgtagagacaggctctcatgatgttgcccaggctggtctcgaacctctggcctcaagccatgctgtcacctcggtctcccaaagtgctgasattacaggggtgagccaccatgcctggcttcaaaaaatgtgtttggtatttgatatttgatgttaacttacatcaacggttttttttaaagtgatctataggtatttatctttttctaccttcattttttattccagtaactaaagctcagattccagatctatcagtatttaaattcccataatgcctctaaagcctgagttaactttaaggctattaactggatatttaagcatctgtttaaatattgatttagtatgcttgtagaattgtattttattatttttgataatataggctgtatttgtttgctaaggttgccgtaacaaagtaccacagactgagcggcttaaacgagagaaatttcttttctcacacttctggaggctggaagtttgagatcaaggtgctagcagggttggttttttcaaggcctctctccttggcttgtaggtggccgtcttctcccagtgacttcacagtctgtccatacatgtatgtccaaatatcttcttcttataaggaaaccatttttatgggatctgggccccctctcatgacttcatttcaccttaattagctttttaaagaccctatctccaaatacagtcatgttctgagatactgtggggttaggacttcaacatacgaatgttgggggatacaattcagcccatagacaggttataattgttttatgtataactgaagctgaatttctctacattcttatgtttaccttaggcttgcttgttgccagtaactgtttcttttctaggagcatatcagcgcttcccactgtagttgcctataacaatcgagctcaagcagaaatcaaattacagaactggaatagtgcttttcaggattgtgaaaaggtcttggagttagaacctggaaacgtaaagggtaaaaaatattatagaattcttttacatttacagcaggatccattaataaagaccatttgtagatacttgtaatgtttacattaaaaatatttcagataaactcaaatttctgtatgtgaatcaccaacttcataaagttgcttttaaattgaacttgtaagttaagctcctgattatttgtactgaagtagctaataatcccagaggatttaataaaatacatatatattttaaagaagtatctcaataaacaaaaaaccaacaacaacaaaaataaaataaaagagaagtatcttggccaggcacagtggctcacacctataatcccaaaattttgggaggccgaggtgagacgattgcttgagtctaggagtttgagaccagcctgggcaacacagcaaaactctgtgtctcaaaaaaaaaactcaagcttgcatttgaacattctttttctccaaaaaaaattaagtataacttaatatagattttctggtatttataaatataataaaataataagcccacactggacctctagaaccttctcccagcttctttgtggatatttscacctaggtggctatatataattttgtttgtttgtatgtttgtttttttgagactgagtctcattctgtcacccaggctggagtgcagtggcgtgatctcggctcactgcaacctctgcctcctggattcaagtggttctcctgcctcagcctcccaagtagctgggactataggcgtgcaccaccacgcctgactaattgttgtatttttagtagagagacggggtttcaccatgttggccaggctggtcttgaactcctgacctcaggtgatccacctgcttcagcctcctaaagtgctgggattacaggcgtgagctactgctcccagcctgtttttgtttttttgagatagggtctcactctgtcacccagcctggtgtgcagtggtgcaatcttggcttactgcaacctccacttcccagtctcaagtgatcctcccacctcagcctaccaagtagctgggactacaagcacgtgccaccacacccagctaattttgtttgtatttcttgtaaagatggggtttcactatgtcgcccaggctggtctcaaactcctgagctcaagtgatctgcccacctcgacctcccaaagtgctgggattacaggcatgagccaccaagcctggcctgctataaataatttaattttcattttaaattaataatttgaataacttaattctaaattaaatttgtccaaaactgactctttctgccaaaaacctgcactctmttttgattccctgtccctctgactgaccaccttgtcatggttcaggcctgaaatatgcaaatcagactctattctccttttctgttatcaagaaggagtcattccaagagggagtgacatacattataatagacacattatatttctttaaatttttatggattcaaataaatataaacacttttttcacatggaatgtatccctttttgcctataaacatggtggaggtggcagaagccatgggagtgctaaggggaagcctggtgcatcacctgccactgtcattgccatggattgccctccatttaccaataaagtcctgttgggcctgtgttttacgcaagctggtctctgtcacagagtatggctgggctcccagctttaggcagcagcccactgaaggttttgccaaccccataccactgctctgccaggccccgtgccaagcactttacatgtattaactctgttaattttaacaaaactctcggccgggcttagtggttcatgtctgtaatcccagcactttgggaggccgaggtgggcagatcacctgaggttaggagttcgagaccagcctggcaaacatggcaaaactccatctctactaaaaattaaaaaaaaaaaaaaaatggaggggtgcagtggctcatgcttgtaatcccagcactttgggaggctgaggtgggtggatcacttgaggccaggagttcgagaccagcctggccaatgtggcgaaactccatctctactaaaaacacaaaaaattagctgggcatggtggcaggcacctgtaatcccaacaacttgggaggctgaggcaggagaatcactggaacccaggaggcagaggttgcagtgagctgagatcacgccactgcactccagcctgggcgacagaacgagaatccatctcaaaaaaaaccataataaattttaaaaaaaattactagacatggtggtgggcacctgtagtcccagctacttgggaggccgaggcaggagaattgcttgaacctgggaggcagaggttgtactgagctgagatcacgccactgcacttcagcctaggggacaaagaaagactctgtttcaaaaaaaataaataaatacagaatatgttagcattaggtaaagctgagttaagggacacaggaactcattgtactatctctgcaacttttctgtaaatctccaatgattccaaaataaaaagttttaaaaaaggataatcattatgtcatgaatatttcttcatagaaattcccttcagaaatctgtgtagcaatagcaatagctaaattatatttaaagtgcagtgctacaattttaattaaatttataacaaaatgatttctcatttagattttcatagctcattctaacactaaaattcaaattggtcaaatttataattatgttttaaaatagcatattaaaatatgtcagataaaatttctaacttttcaggcaggcgcggtggctcatgcctgtaatcccagcactttgggaggttggggcaggcggatcacgaggtcaggagatcgagaccatcctggctaacacggtgaaaccccgtctctactaaaaataccaaaaaaaattagctggatgtggtggcatgagcctgtagtcccagctacttgggagrctgaggcaggagaatcgcttgaacccgggaggcagaggttgcagtgagccgagattgtgccactgcactccagcatgggcaacagagcaagactctgtctcaaaaaaaaaaaaaaaaaaattctcacttttcagaattaccaaacttgattctttttcaaagtaatgacttattacacaaagttctccttatataatagttaatgatgagtctagagaggcattcattgtcagtattaaataattaccaaattatacattgaaacgtacccaaaaaatcaaatgcgaattatcaaagtgcttaatttctgacctaactgacttaatcatcaggattctctcagttccctatgctaagtcactccttctaatcattttagagattgctatacagatgtcactaatgagccacattctgagctagatgctggtcagtaatatactttttttttctttttttttttttttttttggagacagagtcttgctctgtcacccaggctggagtacagtggcacaatcttggctcactgcaacctccacctcccaggctcaaacaattctcctgcctcagtctcccgagtagctgggattacagatgtgtgctaccatgccaagctaattttttttttgtatttttagtagagatgggattttgccatgttggccaggctggtcttgaactcctggcctcaagtgatctgcccacctcaggcccccaaattgttgggattacaggtgtgagccactgtgcctagccaatatactaaattttgataagggattttatgttttcaaaaagtggctaaataatactcgccataattataaaaaggaaaggattattatcagtgaaaatcattccgatattgcaatacaatgtgttgcctgtgaagggttgaggtatgaaatctcttagttcttggaaaagctggcggggcctggggctgccagagggccagagggttgttatagaggggacagctggctgatgtagcctcttttatgtacctcagtgtcatctcctatgtgtgtatcaacatgaaaaagggtgtagttgagctttgggtaattacatcctaaagtattctgtgctgctcatatcttccacttgccaaatatgttgtaaccataatgccacatattaaaaaacataacttttatattggtaaattttcagctcttctgcgtcgtgctactacatataaacatcaaaacaagctccgggaagctacagaagatttgagtaaagtactagatgttgagcctgataatgatttggccaaggtaagtatagaaygtgatttctcacctaattctgtagttggctgtttctgtatttattttaaagtggtatcaatcttgccaaacaaattatgttgaagatcaggtcacagctttaaaaggtaggtatattccagacaccccaaaacgttaacatctatttcaagtggaagaaagcagaatcttaaaattttttttcaaaactataaaccttcctctgaaagacaaatatcaatttttctttttcctatagtgttgtaggcaatgtttttctctgagccatgtggagtggtatagaaggtaccttcctaggtaggattaggggtgaactcygtggccattgaagagtgtttctctttgtaatgagcatggtagcatttgctacctgactgagcagactgactcagttatacacttaggggatctgtattcacgcctaaagagtagaggtaagtgtcaagaactgagattttcccctgcttacaaatgaacaaggtggcctaccagaggatacaagatatcctgagtcaaacacgaaaagactttgtcactccaagcagatgagcttcacgttcatgtcagttccccttgctcccaagtcccacaggggtgacayagagtggcccagatggatgttgcacactcaatggatttatgtgatggctgacaaatcaaaaatttaggaaaccagctgagtgcagtggctcacgtctgtaatcccagctctttgggaggctgaggcaggcaaatcacctgaggtcaggagttcaagaccagcctggccaacactgcactccaactggggcaacagagtgagactccatctcaaacaaacaaaaatttaggaaacctgcttcttttatgatgggatataagcaaacctgcccaatctctgctccatagggaagcatcacctttattacactggagrgccaacacacctgccctctccgctgcagatgaatactatttctgtttgccaaggttgttctcagtacaaacatccttagagatgtccagaaagaaggtggtttagtgcctctgctggcagtatagtcagaaataagagaaacccatggaaaaattgttactaagtttccacatacacctattgggttacctatcccactgtctctgagtggcagctaatgttcctagaatatcagctgctttgtcaagtcaacattttaggtttaggtttagggcctggcttagtatttcctttttgtaatggttatgtttatttatttttgagacagggccttgctctgatgcctcarctgtagtgtggtgggaacatggctcactgcagcctccacctcctaggctcaagcaatcctgccatctcagcctcctgtgtagctgagaccacaggtgcacgccacctcccaaagtgctaggattacaggcatgagccattgtgcctggtttcaaatgcatttttatcttaaccatatgcaaagattaactcaaaatggatcatatactttttgatgtaagatataaaatataaaagttctagaagaaaacataggagaaaatctttatgaccttagacaaatatttcttatgtaagacatgaaaagtacaatccataaaagaaaaagttgatatattggacttcatcaaaatttaaaacatatacttttcaaagacactattagaagaataaaagacaagccacagctgggcacggtggctcacacctgtaatccaagcacttcaggaggctgaggcaggcagatcacttgatcccaggagtttaagaccagcctgggcaagacagctgaacttcatctccacaaaaaatttaaaaagttagccagacatggtggtgtgggcctgtagtcctagctactcgggaggcaggggtgggaggataatttgagcccgggaggtcaaggctgcagtgagctgtgattgcaccactgtactccagccggggcagcagagggaaaccctgtctcagaaacaacaacaccamcaacaacaaaacaaaacaaacaaaaaagcyacagaccacagactgggagaaaatatttgaaaatcgtatatccaacaaaggatgatatatctatttttcatcagagtcagcataaaatatttcagaattttcagcattactctaaaacagtaatgtgggctgggtgtggtagctcacgcctgtaatcccagaacttcaggaggctgaggtgagaggattgcttgatcccacsgtttgagactagactgggcaacatagtgagacctcatctctatattttaaatmaacagcgtatgtagcatgatttcatttgtgtaaaactgtacatctctgtgggtatatatgcatagaaacatctagaaagatgattatcaaaatgttaatagtagtatctgaatggcaagattttaggtgattttttctttattttttatacttgttacaccgctttttgtgtgtgtgtgtkttttttttacagtggacatctatgattacaatcaaaggccaccaaaaaaaagccttgtcttagttgtattcatttttcaacatctttatgtttttaacctgaaagaatggttatatttattattagaggaaaatattttctttaatatggtaattatgttgcagaaaaccttgtcagaggttgaaagagatctgaaaaattctgaagctgcatctgagactcaaaccaaagggaaaaggatggttattcaggaaatagaaaactccgaagatgaagaaggaaaaagcggaagaaaacatgaagatggcggtggagataagagtaaaatattttttctatttaggttatgtaaaaagctgccttttaatatgatgagctggctcaatttttctattcgtacagaaattcgtaatctatcagtttttctagctttgccttgtaaattcacaagccagtttcgctcatctttttcttaatacagcttggtagaatctctcaaacccattttccttcttaacctgtcacctttttctagtgctcagtttaattcctggtcatcacctttaaatgtaaatggctgtgtttatttgacacagaccatttgccagttaactttaaatatctctctttgataattgttttgtatatatctacttgattgcaaacaaatgtgttggtttcaaaacaggtatgggtagccccatttatatgccaaaaatgaacgtattactagaaaattgctatgtgtgtttttcaaaaatattttaaatatgcaaaagaaataagtataatttaacacttgaaacaatattttaagagaatctagactagataaagggttatcttcataatataaaacatcgaaagttatgtcaactttgaggggaargatttgcctcctcacatgacaagggacataaaaacttttccctccgtcagctgggcgcggtggctcacacctataatcccagcattttgggaggccgaggcgggtgcatcatgaggtcaggagttcaagaccagcctggccaacatggtgaaaccctgtctctactccaaatacaaaaattagctgggtgtgatggcatgcacctgtaaccccagttactcaggaggctgaggcaggagagtggcttaaaccygggaggcggaggttgtggtgagccaagatggtgccattgcactccagcctgggcaatagagcgagactccatctcaaaaaaaaaaaaaagaaaaagaaaaaaaggtttttccctccttcttgagaacacctgagcaactggcagtggcggggcagtggaggggggagatattatcaattttgaaaatcattcacaagtaaaaatcaacttgtaagtaatttgacagaatattctaattttgagagagatacaaaatgttcagttcattcaattttaaaaataaagaacgagttttaatttttttaagtgacaaaaaataatgcaatgtatacacttcagattaaaatacaatcagttaagactggataaagacaaaggaacagaaagggagggagcgagaaagaggaagacaatcagagaggtgagaaggaagagagaacataaaaaggattgaaaagggagaaattaaggtaaccagtttttcaaggattcaggcttgccttttagccagattgtaaatacgatctggcagcaaatcttcttagggtttatattgagcttttgcataattaaccatatgtcttacagttaaaggaaaccattttaaatcttatctgaagtgagatgaagtataaactatattacttcctattattttaaaattgttattttaaaattttatatatagtaaaaatgaaccttttgaatatacagttctaatacatgtacggtttcatgtaaccatcaccatagtcaggatacagaacagttctaccacccaaaaaggccttcttgctgtcctttcagtgaaacccttccctcaccccagctcttctctattcctatagctttaccttttccagaatgtcctataaatggaactggaaagtatgtcaccttttgagtctagcttccttcacttagcatgtcactgagattcattcatgtagctgcatgtatcattgtctcattcctttttactgctgagtagcattccattaatagttgtaccaaagtttatacattcggttattcaaggacattcaggttatttccagtattcactaatcatgagtaaaaactgctatacacactcatttgcaggtttttgtgtaaacatatgttttcatttcccctgagtaaatagctaagagtgggactgctgggtcatacggcaagtatatgtttaactttattggaagttgcctgactgttttccagagtggctataccattttgcattgccattagtaacatatgagagttctagatgcttctcgtccttgccagcatttggtattgatttttttcccctttttacccattctattaggtgtatagtgktttctcatcagttttaatttgcattttcctgatgagaatctttttatgtgctcatttaccatctctatattactttttgtgaagtgtctsttcaaattattccaccaattttcaaaaattgggttgttgttttcctactgttaagtcctgagaattctttttataatcttgatgcaaagtcttaaaatttttttgtctgtagcttttttcattcttttaacagtcttttacagagcaaaggtttttcattttgtagaagtacaatttatccagtttttttaatggactgtgcttttaatgttatatcgatgaacactttgcctaagtcaaagtcatgaagattttcttgtaagtttttctttttcagagatagggtcttgctctgttgttcgggctagagtgcagaggtgtgatcatggctcactacagctatgatcactctttattattttcttccttctgcttgtttttatgttcatttgcttctctttttcttttcttctttttgagatrgagtctcgccatttcgcccaggctggattcaagctcctgggccaaagattctcccacctcaggctcccgagtaaatgggactataggcacaccaccgcactcagcttgctcctctttttctaagatagtttctcaagacagaagcttggaatatttatttgagaatttctcctccaaatataagcagtggatgctataagtttctttctgatagaaagaatataatttttaagccaggcacagtggcatgcactcatagtcccagggagctcaggaggctgagggttgcttaaggccagaagttcaatcccagcctgggcaacataacgagaccccatctttttttagaaaaataatataatagaaattttaagaccagtaagttcccttttatcagaaaagtcaattgagatgaagtagaataaatagccggaaactcagacataatcttttcatcttaaaatgaaatgaaatcaattgaactagtttacattcacctctagttacattgaactagttacattcaaacaagttacatatcaaacagtcattgtttgatagagtgtgaaaagaggtgctggagccttggacacaagagaagcaaccccagtcacttttaggaaaatcatgttaaagcccagaggaaagttatcaagttggaatctttacatgtggttctccatctcatcacattccgggaaagaattcccagtcattatggggtatgttccaggaccatggaaaaaggcagcaatttgtgttttttaaccttgtctggtaatgctgtccctttatgatctccactcgggttggccaggcccagttcatcccgactggggtataacataactgatgaatttaatttaacaactgacaattattgagcacctactctgtgtcaggtgctgagataagacaattgataggctttctttgcctctccttctaagggccagtattaacaaattgcctattggccaggatgattacacctggggatttgagttcatgggctttttcctggaagctccctatctgtttgccttctctagtagagatcatttagaaggaagaagtggccattaccatacagctgtagctgtcaaagagtttggtatttattccatctatctccttacagagacgcaatcagaggaaagtgagcatctaccctcccttgcagtgctgttggtgttgctacttaaaaatgaaagctaagaaaattaragtcactcacaaacagaagaataaatatagatcagtatttctcttgtgctagaactggcaggatcaggagagtggaagtcagggatttccaggagttcaaacaatcaacaaaatcataaaggtgaataattttgattatgtgaaaatgaaaaacgtgtatgttaggcrccataaaaaaaactaaaagacaaatgacaaactaggaaagatggcaaagggttgataaccttataatatgaaaagtttctacaaaacaataagaaaaagatgaggtgctagtacaaaactgggcgaagcatacagacaaatcactaatgaagaaatagaaatgatcagtaatctttgtattactcataaaaatgaaaatcaaatattctttttctttcctatcaaattggctgagatagaaaaaatagtaccctttgttgtcaaaagtgaggtaagataagcattaaaaatattttaatataatgcatatatagtaaaatccatccttttcaaattcagtgaattttagtatattcatgaagttgtacaactatcaccacgatctaatttcagaacatttttatcatccccaaaagaaattctatacccattggcagttactgcccattttacccttcccctggcccctggcaaccactagtctacttttgtttgtatggatttgcctatcttgagtatttcatacaaatggaatcatagtatgtagacttttgtatctgtctttcacttaatgttttcaaggttcatctatgttgcatcttgcattagtacttcattcctttttatgtagaaataatattccattgtgtagataataccagattttctttattcaccagttgatggacctttgggttgtttccactttttggctattatgaataatgctgtcatgaacgctcatgtacagatttttgtttgaacagatgttttagattttcttgtgcattatttkggagtggaattgctggatgatatactaactctgtgtttaactttgaggaaatgcagactgttttccaaagtagctatcccattttacattcccacctgcaataagggttccaatttctttacatatttgccagcacttgttattgtctgcctttttggctatagccatcttaatgggcatgtagtggtaactccttacggttttaatttgcattttcctaagaactaattatgttgactgtctcttcaatccctatgggctatttctatatcctctttggagaaatgtctattcaagttctttgccttttttttgttgttgttgttgagatggattttcactcttgttgcccaggctggagtgcaatggcatgatcttggctcactacaacctccgcctcccaggttcaagcaattctcctgcctcagcctcccragtagctgggattacaggctcccaccaccatgcccagctaattttttgtatttttagtagagatggagtttcatcatgttggccaggctggtcttgaacccctgacctcaggtgatccacctgccttggcctcccaaagtgctgggattacagatgtgagccactgcgctcagcctctttgcccatttttaattgggttatttatctttttactgttgagttgtaagcattttttatatattctagatactagacccttattaaatatgatttgcaaatacttttcccattctgtgggctatcttttaagttttttgataatttcctttgatgcagaagttttttgttttttttttagggtgcagcaactcattttgacttttttttttattatactttaagttctagggtatatgtgcacaacgtgcaggtttgttacatatgtatacatgtgccatgttggtgtgctgcacccattaacttgtcatttacattaggtatatctcctaatgctatccctcccctcactccaaccccatgacaggccccggtgtgtgatgttcctcttcctgtgtccaagtgttctcattgttcaattcccacctatgagtgagaacatgcagtgtttggttttctgtccttgtgatagtttgctgagaatgatggtttccagcttcatccatgtccctacaaaggacatgaactcatccttttttatagctgcatagtattccatggggtatatgtgccacattttcttaatccagtctatcattgatggacatttgggttggttccaagtctttgctattgtgaatagtgccacaataaacatacgtgtgcatgtgtctttatagcagcatgatttataatcctttgagtatatccccagtaatgggatggctgggtcaaatggtatttctagttctagatccttgaggaatcgccacactgtcttccacaatggttgaactagtttacagtcccaccaacagtgtaaaagcgtttctatttctccacatcctctccagcacctgttgtttcctgactttttaatgattgccattctaactggtgtgagatggtatctcattgtggttttgatttgcatttctctgatggccagtgatgatgagcattttttcrtatgtctgttggctgcataaatgtcttcttttgaaaagtgtctgttcatatcctttgcccactttttgatggggktgtttttttcttgtaaatttgtttgagttctttgtagattctggatattagccccttgtcagatgagtagattgcaaaaattgtctcccattttgtaggttgcctgttcactctgttggtagtttcttttgctggatgcacaagttttaaatttttatatgaagtccaattttttttttcagagccccccttaagaaagatttttttcagattttttttcttttgttgcttgtacttttgatatcatatataagaatccattgtcaaatccaaggtttaaaaacttactcctgtgttttatttctttttccttccttccttccttccttcctttttttagacaaggtcttactctgttgcccagactgaaatgcagagtggcacaatcatagctcactgcagcctctaactcctgggctcaagtgatcctcctacctcagcctcccaggtagcctggactacaggcacatggcagcatccctgcctaattttttcatttttattttttgtagagacaggggtctcacttcgttactcagggtggtcttgaacccctgggctcaagacattctcccacctcagcctcccaaagtgctgggattacaggcatgagccactatgcctgggcaactcctgtgtttttctaagatttttatgattttagctcttgtatttaggttattgggttattgatccattttaattcttatatacagtgtgaggtaaatgtgtgtggtattacatatgtgtgtgtgtatatccatatatatatgttttttggtcatagttcctgatttatacaactcccrtagcccttgttacagacttttgtcataatgctggctatctgaggcttcaggaaacaatctctccagatctcctttcaccttccccaaggcaggactctaatcttactctgcctttctgattgtgggtcagaagaccctccccagagagggtcctgccacatactctgagggaaggaatgctgacttcaaaaattttccttccgatagctgaacacagggaggttcctggaaggtgcctggccaccctaggcacctcttcctctgtaacccttgcagtatcctttgtaataagccattaaacatgttgtctggagttcagtgagctgctccagcaaattaattgaactcaaagagtrggggtcatgggaaccctaacttgaaacctgttggtgagaagttctggaggcccagacttgtaactggtgtctggagtaggagacagccttggggactaagccctcatcctgtggaatctgacactatctccaggtatatagcatcagaacttaactggaagatgctcagccagtatctgctgcttggtgcctggggataaaccctcacacatttggtcacagaagtcttctatgttgatgattattgtggtggtgtaagagtagaggaaaaacagtttgtgagagtttttccaaaagagcgtccaacttagttttgttttctgttttgtttttatttgtttttagtatgtggaaatccagttgtcacatcaccatttgtttaaaaaaaaaaacaaaaaacaaaacaaaaaaacctgttcttttcctactgaatagacttggcacccttgtcaagaatcaactggccaggccgggcgcggtggctcatgcctgtaatcccagcactttgggaggccgaggcgggcggatcacgaggtcaggagatygagaccatcctggctaacacggtgaaaccccgtctctactaaaaatacaaaaaattagccgggcgtggtagcgggcgcctgtagycccagctactcgggaggctgaggcaggagaatggcgtgaacccgggaggcggagcttgcagtgagccgagatcgcgccactgcactccagcctgggcgacagagcgagactccgtctcaaaaaaaaaaaaaaaaaaaaaaaaaaaaagaatcaactggccatagatgtatgggtttacttatcaactctcagttcctttccactggtctatgtgtctttccttatgccaataccacactgttttgattactctagcttttagtaagttttgaaatccagaagagtgagactgggtgcagtggctcatgcctgtaatactagcactttgggaggctgaggccagaagttcaaggctatattgagcctaccactgcactccagccttggcgtttgtgctggttaatactgagtgttaacttgattggattgaaggatacaaagtattgatcctgggtgtgtctgtgagggtattgctgaaagagattaacattaagtctggtgggcacaatctaatcagctgccagcaaatataagcaggcagaaaaacatgaaaggagagactggcctagcctcccagcagcctacatctttctcccgtgctgggtgcttcctgccctcgaacattagactccaatttcttcagtttcgagacttggactagctctccttgctcctcaagcttgcagacagcctattgtgggaccttgtgattgtgaaagttaatactgaataagcttrtatatatatatatctcctattagttctgtccctctagagaaacctgactagtatagattttagtacccggagtggttccagaggaacagactattaaggatgcagttctttcgttggttttggggtttctggagttggctacttaatatgattagacccaaaaatgctaaggactctacttctaatagtatggagaatactgatagtccttggtgtgaactgtttagagagttatgcaaaataaatgcatttgacacttctgattcatcactcatgagaggcaaggagtttagtaactctatacatagtacctttgaccatatgtggagaaccaaggaacataatgaagctggttggttgctcctaagttcagtggacaaagtagtgaaagaaaatgaactcagggattctgtctctcagcttcagaagcagatactgagcctcaaatctgccaagattgccctgagtgagagtcttatctcctgtagagaaagagctgaaattgtggaaaaacagacacaagctctcatcatgcgagtggctgacctgcaacaaaaggtgcgtgcacagccttgccaggtgtctaccgttaaaataagggcattgattagaaaagaatgggaccctacaacttggaatggggatgtgtaggaggaccttgatgaaactggggacactgaatttgtaaactctgatgaacctttcttttgccagaaggaacagattccccatacccagtagtggcaacatcccctccctgatccatgctgccatcagcctttccacctttgtctgaggagataaatcctgcactgcctgacgcaacagtgatggcctcccgagacagttgccaggcaagataatgttgattctcctcagaagccacccccaacaaccttgtttgcttctagacctataactagactaaagtcctgccagggacctctggccagcccctagaggtgaggttgagagtgtgacccataaggaggtgcgctacactcaaaaataactgtttgagttctctaatttatataaacagaaatctggagaacaggcatgggaatggatattaagggtgtgggataatggtggaaagaacatagagttggatcaggctgaatttattgatttgggcccatgaagtagggactctgcttttaatgttgcagcttggagagttaaaaaaaaaaaggttataatagattatttgcttggttagctgaattatggattaaaagatggcccactgtgagccagctggaaatgcctgatctcctttgggttaatatagaggaagggatccaaaggcttagggagattgggatggtgaactggattagtcactttagactgactcatcccagctgggagggtccagaagatatacccttgatgaatgccttgtaaaatagatttgtgaggggagcacctgcatctttgaagagccgtgtaattgctcttctctgtatgtcagacctaacagtggcaactgcagtcactcacctacaaaatttaaatacaatgggaataattggatcctgaggtggcaggagccaagtggtggcactcaaccatcaaaagcaaggtggacgtagctaccataatggacagtagaggcaaagcagcaatcagaatagtctgactcatgtagagctctggcattggctaattaatcacgatgttcctagaagtgaaattgataggaagcctactgcattcctacttaatttatacaagcagaaaacttctaggtcaaatggacaaaagactaatttgaattataaaaacagagaatcatggcttttcaattaatttccagacttgagccagtttgcagamccagaaccccttgaatgaagtggagtctgggtccccttgaggaaggaccccactacagtaccaacaatttatgcagtgaatctttctcccatccttccccaaggagacctctggccttttaccagggtaacttgcactggggaaagggaaatgacatttcagggactactggacactgcctctgagctgatactgattccaggagacccaaaacatcattgcggtcctccaggtaaagtatggacttagggagttcaggtaattaatggagttttagctcaggacttacagcgggttcagtgggtccccggactcatcctgtggtcatttccccagtgccagaatgcataattggcatagacatacttagcagctggcagaacccccacattagctccctgactggtagggtgaaggctgttatggtgggaaaggccaaatggaagccactagagctgcctctacctagaaaaatattaaatcataaataatatcgcatccctggagggactgcagagattagtgccaccatcaaggacttaaaagatgtaggratagggctggctgggcatggtggttcaygcctgtaatcccagcactttgggaggccgaggcgggcagatcacgaggtcaagagatcgagaccatcctgggcaacatggtgaaaccccgtctctactaaaaatacaaaaaaaaattagctggacatggtggtgcatgcctgtagtcccagctactcaggaggctgaggcaggagaactgcttgaacctgggaggcagaggttgcagtgarccgagatcatgccactgcactccagcctggcgacagagtgagactctgtctcaaaaaaaaaaaaaaaaaaaaaaaaaaaaaaaaaaaaaagaaagatgcaggggtggtgagtcccatcacattcccattcaacttccccatttggcctgtgcagaagaccratggatcttggagcataacagtggattattgtaagcttaaccaagtggtgaytccaattgcagctgctgtaccagatatggtttcattgcttgagcaaattaacacatctcctggtacctggtatgcagccactgacttggcaaatgtctttttctccattcctgtccataaggcccaccagaagcaatctgccgtcagctggcaaggttaccaatatacctttactgtcctacctcaggggtatatcaactctgcggctttgtgtcatagtcttattcggaragaccttgattgctttttgctttggcaagatatcacactggtacattatattgatgacgttatgctgactggacctagcgagcaagaagtagcaaacacactggacttattggtgagacatttgcatgcaagaggatgggaaataaatccaactaaaattcagggaccttctacctcagtaaaatttcctgggttccggtggtatggggcctgtcgagatattccttctaaggtgaagcaagatattccttctaaggtgaaggaagatattccttctaaggtgaaggggcctttggcccctcctacaaccaagaaagagacacaatgcctggtgtcacaaggcctatttggattttcgaggcaacacattcttcatttgggtgtgttactccagcccatttatcgagtgacctgaaaggcggctgattttgagcagggtccagaacaggagaaggctctgccacaggtccaagctgctgtgcaagctgctctgccacttgggccatatgacctagcagatccaatggtgcttgaggtgtcagtggcagatagggatgccgtttggagcctttggcaggcccccatagatgaatcacagtggaggcctctaggattttggagcaaggccctgccatcttctgcagataactgctttcctcttgagacagctcttggcctgttactgggctttggtggaaactgaacatttgactrtgggtcatcaagtcaccatgcaacctgaactgcctatcatgaactgagtgctttctgacccatctagccataaggtaggttgtgcacagcagccttccatcatcaaatggaagtggtctatatgtgatcaggctcaagcaggttctgaaggcacaaataagttacatgaggaggtggctcaaatgcccatggtctccactcctgccaccttgccttctctcccccagcctgcaccgatggcctcctggggagtttcctgtgatcagttgacagactaagagaagactagggcctggttcactgatggttctacacgatatgcaggcatcacccaaaagtggacagctacagcactacagcccctttccaggacatccctgaaggacagcagtgaagggaaatcttcccagtgggcagaacttcaagcagtgcacctggtggtacactttgcatagaaggagaaatggccagatgtgtgattatacactgattcatgggttgtagccaatggtttggctggatggtcagggacttggaagaagcacccaatgcttctgccaggactaccatccatggactcatggaatgccttatccgccatcatgttattccacacggcattgcctttgaccaaggcactcactttatggctaaagaagtgtggcagtgggctcatactcatggaattcactggtcttaccatattctccatcatcctgaagcagctgaattgatagaatggtagaatggccttttgaagtcacaattacaaaatcaactaggtgacaatactttgcagggctggggcaaagttctccagaaggccgtgtatactctgaatcagtgtccaatatatggtactcttccccccatagccaggattcatgggtccaggaatcaaggggtggaagtggaagtggtaccactcaccatcacccctagcaatccactagcaaaattattgcttcctgttcttgtgacattacgttctgctggcctagaggtcttagttccagagggaggaatgctgccacaaggagacacaacaatgatcctgttaaactggaagttaagattgccacctggacactttgtgctcctcctacctttaagtcaactggctaagaatggagtcacagtgttggctgggtgattgacccggactctcaagacaaaatcagtctactccacaatggaggtaagtaagagtatgcatggaatgcaggagatccatgagggcgtgtcttagtattaccatgccctctgattaaggtcaatgggaaattacaatagcccaacccagccaggactacaaatggcccagacccttcaggaatgaaagtttggatcactccatcaggaaaaaaaaccacgacctgccgaggtgcttgctgaaggcaaagggaatatagaatgggtagtagaagaaggtagtcatcaataccagctatgaccacgtgaccagctgcagaaacggggactgtaattgtcatgagtattttctccttttgttaaaaacatgtttgtgcatgtatacatttgtactaagaaatgtcttcattttatttcctttttcctttatcatgtgacataagatttattgacttcatatcagcatttaagtattaactttatattatagtatttgggttggggattggtgcatttctggttgtacaaaggatagttgtattatgttaggtgtaattatgaccttattattgtctttatttgaagattatgtataatctcaggaaatgtatatgggttcaaattgacaaggggtggttgaaatggttaatactgagtgtcaacttsattggattgaaggatacaaagtattgatcctgggtgtgtctgtsagggtgttgccaaaggagattaacatttgagtcagtgggctggggaaggcagatccacccttaatctggtgggcacactctaatcagctgccagcgaatataaagcagacagaaaaacatgaaaaggagagactggcctagcctcccagcctacatctttctcctgtgctgggtgattcctgcccttgaacatcacactccaagttcttcattgttgagacttggactggctctccttgcacctcaagcttgtagacagcctattgtgggaccttgtgatcatgtaagttaatactgaataaactcccctttatatacatatatatatatatattcctactatatatataatcctactaatatatatattatatatcctattaattctgtccctctagagagaaccctgactaatatatcattagagtgagaccctgtctcaaaaaaaaaaaaagaagaagaaaagagagtcctttgattttgctctattttttcaggatctttttggctattctgaactccttacaatattgtatgaatttaaggattgtcttttccatttctgcaaaaagttttgataggattgtgttgcatctgtagattgctttgagtagtattaacattttaaccttaataacaatgtctccctatgattacaggatatatttccatttattcaagtcttttaaaaaatttcttaaagcaatacttttatctccttggttaaatttattcctaggtattttattcttttggatgctattataaatataattgtttccttgatttcctttttgctctgttcattgctagtgtatagaaacactgattttggcttgttgatcttataccctacaacttagctaaatttgtttattgctctagttttttttggtgggggtggtgaagggggtggattctttttttttaatataaataggatcatataattatgaatagagatacttttactttctttccaatttggatgccttttatttcattttagtgcctaattgatcagtctacaacttttagtacagtgttgaatagccgtggtgaaaatgggcatccttgtcttgttgctgatgtttaagggaaagctttcattacttttatctttgaatatgatgttggctctgggtttttcataaatatactttattatgttgaggaatttcacttctattcctagttttctgagttttttttttttttaaatcatgaaagcatgttggattttgtcatgccttttcagcatcaattgtgggatcatgtatgcarttctttactttttctgttaatgaggtgtgttggcattgattgattttctaatgctgaactacctttgtattcctgggataaatcccacttggccatggtgtataatccattcagtatgctgttgaatctgttcgctagtattttgctgaggatttttggtctatcaactactcacactaccctacttgaggctacactgttggccattcattcctttgatagttgttattgttgactcctttcttcccaaactactcttggtgtttctgaggcagtatgcgctcctgtttttttctctcatttctaggcatttctgtgcctacactgtagatttttcctctcttcatcctttaagtgttagtatatctcagggatccttatgagcctttgagtgatcccatccacatccaaacttttatttttattttttgtagagatggagtcttgctatgttgcccaggcttgcttcaaactagtggcctcaagcaatcctcctgcctcagcctgccagagtgctaggattataggggtgagccaccttgccagttccacacccaaacttttttttttttttgagatggagttttgccctgtygcccagggtggagtgcaatggtgtgatcttggctcactgcaacctccacctcccggggtccaaatgattctcctgcctcagccttttgagtagctgggattacaggcacctgataccatgcccagctaatttttgtatttttagtagagacagggttcaccatgttggccagggtggtctcgaactcctgaccttgtgatctgcctgcctcagcttcctaaagtgctgggattacaggcatgagccaccgtgcccggccccaaacttttatatattagtaactcccaagtcactgtctctggataaggccacttctctgatctacatgtagagccaccctctgaacagctccattgcattgtcccacgggtatcccaacacccaacagaactcacaagtctttcatgtttgggcctctgtttacctgtccagagactatcaaagttgttcagagccatttcaatcttaaggtaagaatgctttgcattcagttcaaatctgggttatggctgggcacagtggctcatgcctgcaatcccaggactttggaaggccaaggagagaggactgcttgagaccaggactttgagaccatcctggacaacatagcaaggcctcatctgtataaaaaattttaaacattagccaggcatggtggctggctctcacctgtagtcccagctrctctggaagctaaggggaggattgcctgccccagaggttgaggctgcagtgagctatgatggcaccattgcactccaccctgggcaatagagcaagaccctgtgtcaaaataaatacaaacaaataataaaaataaaaacaagtccgagttatgctggcttctagctctgtgtactagagcgcattccttagcttcttgtttctctgttgcctcatttgtaaagtgggaatgataatacttggtattaggattaatgtgatccatatcaagttctaaatgaactgcagctctttagtgatagcattggtcagacccgaggggatactgtgcaaaggggtggaaagtaataccaagctgaccattgtttctgccgaccctgacttttgtgctttcacccagtttctggtggagaacctgattgacagaaaccagattaaaactggagccttactctaataaccctactgggtttaatctgcagatttatctttatagcaaaatctttttattgttttaataattaagatccctttggctggtgatccaaattggatgttattctgctgtatagaaaacagtatttattaatgtgtttttatacttgatgcttgtcttaaggtgatcatccactgattttcacttaaataattgtgcttttctattccctctgtctctgtgcttaaaatcttggctttaccattcatgaaaaagaatggaaaatatatccattaagaatcagataagaattcgttaaaagagaaagcttggaaatctctatatttaagtactttttaacggtgctgtgaaatgattaattgctttgttttaaatattgctaagacaccataaattaaatatttacacatcctttttatatttaaaaayagattcaacaattattaaagctattaatacctgaactcctaatcaaaatcaaagaaatttttagtttgaataaggcaatgggatggaaaatttgctgtgtttttaaggctccctttaagtttaaaaactaggtgcctaatttgtgacttttttgctaaattcacttttaaaatgacttaaaaatcacttacgctttatttttctttcaaatctttytctcctaatcttttaaaataaggaaaggtgcctccgtgttgggtattataattgtattcaagtttttgcaactccattcaaaaaagtacgtattttgtaagctcacctggacaggtggacttgatgaaggggatggctctgagatgccggttttcagccacaggcccttcagcgcttaaacagttagagacagggtacgtttctggccgaaacccgggagccgagtcctcaggaagccgcaggggcctcgagggagcggactgggccgactggctctagaggtccggcagcacaggctccgcccgcaggggcggtgcccgagccggcttccctagagcccgccctccgcgtcctgcacccccgcggcctccgcggcctccgcggcctccgcggcaactgctcccggtgatgcaaaccctcacttctcgcatccacttcctcacagagcccgcggagccggcgggagccgcgcgcgccgcccagccgtgcgtcatgggcaacatccagaagaagctgactggcaaagccgaaggcggcaagcggccggcaaggggcgcgccgcagcggggccagaccccggaggccggcgcggacaagcggagcccacggcgggcctctgcggcggcggcggcgggcggcggcgccaccgggcatccgggcggcgggcagggcgcggagaaccctgcsggcctgaagagccagggcaacgagctgttccgaagcgggcagttcgccgaggcggccggcaagtactcggcggcaatcgcgctcctggagccagcaggtaggtgcgccgcgccccgccgcttcctgggcccctcgcgctgcggttcacmcgacctcsggggcccccgtgggagaggcgctgccgcctcctgaatgacaggcgccggcatcgctgcattcctcccaggtgactaagagcgccgtgccacctgacctcagtgagcagcacctgggaatgcsggcatgttcccggccaggcacgtttgcctccgtccccgccgggttttcccttggtggctgttgcgggtagcagctccgtggagttctgcatgatcagtctgcaggactgcagtgccaccccaccggagacctcggccgtcttgtaattctggtgaactgtgatcttgctaatggattttaactgtatttaattaaatgtgatttttaggaagtgaaattgcagatgatctaagtatcttatattcaaatagagcagcatgttacctaaaagaaggaaactgcagtggctgcattcaagattgtaacaggtaaactgcacgttttcaggtttgtcaagagattgttataatttcattatggtgaatgcaatatccaagatcctaaattttctgcctaaggatctaatttcttaagagctttatggtatgttaattgattgatgcataaaaatcataaattatcttacgtatatgaagagagttatagaagattgtgcaaacttttttcatttccactgctaccgccctaattcgtgctcttttcatatcactcctagactactggagaagcctgataactaattccaatccactgcggcatcagartaactttcctgaaacattattttgttcagattgtttccaacaggcctttaatggctcagtattggcttcgaaataactgtaaacttctctgtcactacactgcctccaagcaagtttctccttccgtttggtctactggaccacttgcttactctcgcccaccttgttctctgagcccttgcccatgttgcccctaatggtggtaatgccctttgcacatcttatcttctgaagttcttgctcagctgccccttctctctaccttcttgrgtgccctagacttcctggtcatctgcaggcctgtaacacctacactgacactcggtcacacctctaagtcctgttatccactgaagggggtttaaacacatcgaggttaggaaccatgtcttttcttttttaatagacaaataatcactgtacatatttatggggtaccgagtgatgcttcgatatatatgatgtggccaggcacagtggctcatggccaggcacagtggctcacgcctgtaatcccagcattttggcaggccaaggtgggtggattgcttgaggtcagtttgagaccgtcctggccaacwtgatgaaagctagtctctactaaaaatacaaaaattagctgggcctggtggcatacccttgtagtctcagctactcgggaggctgaagcaggaaaattgcttgaacctgggaggcagatgttgcagtgagcagagatgccaccactgcagtccagcctgggcaacagacaagagactctgtaaactttwctcatatatatatatatatatatatatatatatatatatatatatatatatatgaaactatgtatcattgttaactatagtcatcctacagtgctatagaacactagaacatgtgcctcctatctagctgtaattttatatcctttaacaaatctstgcctgtccccctcttccccctaccctttccatcctctggtgtgctctgaggaaccctgtcttatacagcttcgtacccctcgaagcataatagtcacccgtggtactcaataagttacctgcctggatggtaaatagctacataaataaaacattgttttccaccatgaagtaataagaagccctttggcaagaagctactattagtacatctaaaaaagaagaagtcatgtcctagtttgactaacacagctctggcttactcctgttgtctcatataacactctcagaaactctagtttgaacagtaaattatgtggacactgtttataaggtgagtaatgtattattgttttcattggctgtatcagtttattttgtttttttgttttgttttgtttttgagacagagtctcgctctgttgcccaggcgccatctcggctcactgcaagctccgcctcctgggttcaccccattctcctgcctcagcctggagagtagctgggactgcaggcgcccgccaccatgcccggctaattttttgtatttttagtagagacggggtttcacagtgttagccagaatggccttgatctcctgacctcgtgatccacccgcctcggcctcccaaagtgctgggattacaggcgtgagccaccgcgcccggcccagtttattgatatgggtaaagcttgctagwatctgtgcctaagtttaaaaagaaggccttgaggcacttgaatttttttgccagttttacatatttaaatttgaagtgaataatacttatattctctttggcctgacatcagaccgcatcctcagttgtgctggctcacactcgctaatcattacatttttcaggattttgtgagctggttgatgtcaagttgatattttgaaatctgccatggtgggataccatttaataccatgaaatgagcaaatgccacaaatctgggcttcccacccctccttttttctttacccagagagccagttgttaagggcttttaccagtgctcctaacagaccagaccatgtgaatttgttggataccaagcccgtggtgatttgcagccaacatcctttcagctcaastgtctgtttctaatccattacccttcagacttgttttaggcctttcyacagtgagggaggtcaggacactttagttaaaacttgagacccctaacattagagctgctgcaaaagagtggatttgtgttgtccttatctgagatcctctaaggtgattaacatttactggctaaaattggctgtgtttcagtgtagacagaggagaaagtcaagtatgggactccagccatggtgtccagggtggctagagtaggggcttgtccaaggggagggcaggagatggctcaccagagagggaagtgggcgtcggtttaggtaggttgtgctaaccttaagagctgttttctaggcaaggaacctggccttgctggttggtgctgacctccgtagagaccgacctactcagatgttttctttgatagctggcctaccagtcccagtgtaagagaaatggagatgaggcccagcagggggtgattttacactaaagcagtgattctcaatcttgttttaatgccagagaagccactctgtgcttttgtgaacatcttttcagctcaagtgactatattcaaacagattgcatacatgttaaagggagtttttgtgttttcattttgttttgttttagtttttcagttaattatctttgctctttggagagttccatgagttctttttttttttttttttttttttgagactgagtcttgctctgtccccgaggctggagtgcagtggcgcaatctcagctcattgcaacctctgcctcccaggttcaagtgattctcctgcctcagcctcccgagttgctgggattacaggcactcaccaccgcacctggctaatttttcatattttttgtagagaaggggtttcaccatgctgcaggccaggctggtcttgaattcctgacctcaagtgatccacctggtttggcctcccaaagtgctgggattacagggatgarccactgtgcctggcccaaaagttcttatcaccagataagtggtatcaggagtcaaacactgagaaagaaaaacaggcaaaatttaaaataagaggagaaaattttacctatgaaaataatttttaratgtattttgggaaaaactaccatttgattttaaatgtcttacctctgaggagcattggttgttttccaggggtgtgtttggagagtggccatttggagtgcagagttggggttgggggggtgttgaagatcttgaaggtctctaagcctggcctctcccctcaccacagcatctccatgactcttttagacctccaggtgaaacatgaaaaggggttatgatgcttcagtttgaaagccatcattttacaacttttaaaatactcataattgtttataagctaaaatacttcacttttctcatctatcagaacctttttggtttatctaaaccacaccaaaaatcttttggtgactttccattgaggacatttcaacagactaaatacaaatgaatgttgcctagtaattctctcctttttcgtttttcttttcttttctttttttttgagacagagtctcactctatcacccaggttggagtgcaatggcatgatctctgctcactgcagcctctgcctcctgggttcaagcgattcttgtacctcagcctcccaagtagctgggattacaggtgtgcaccacctaacccagctaatttttgtattttttttttagtagaaacagggttttgccatgttggccaggctagtcttgaactcctggcctcaagtggtctgccarccttggcctcccaaagttctgggattacatacaggcttgagccaccgtgcctggccagttctctgctttttcttatctttgctactctcacagtcttgaaattggaagattttttagggtcttaactgtgttaccttgaatagatagcctcttttgtaagctctgcttcaaaagttctctgtgcttatttttatacatgggtggtttttttccttaatggaatttccattcataagttcatattcattttcaggattgtrgttaaagaaawaaatttactgggcagaaagtgctaaaaattaatacagcatctcatcagttttagatcccaagcttggcttaaggccatcttgaatagataaatggcaccttggtcattggaagtcttctgtgaagtgaaggtagtcacatggttgtgactctgctcatagagttaatattacctaaacattaaactaagctaaatttaaggcagtggtacaggtgacagatcctgatgcccacagatctattttctagtgttgaaatatgtttacttgattttaattttatattttaaataacatttactgttttaaaaaaccacttacctattatagaaaacttaagaaaaaactagcacagcacaaagactatcattaaaatcactcacaatcctaacacctaggcagagtgaaattggttattttttcagagaagtgaagcagattaggtttaacagcatttctagagtaacttctatgatatgccagaagggctcccacaagtgcagctgagtatctgtatgatgtggtctgagtggcaaatgactcaagagttccttcatttgcagtgtttgtatgtgtactgcggtaggcagagtgtaggcttttgagggctcacagagaagtttgctgagtgcctctcatgacccaggtgatctaggactgggaatatagtggtgctcaggacaggcaatgccaattgccttcctgaagctcacattagaaagaactgacctgtgggcatgtcactcctcatgtttctgtttcttcacccacataatgaacatattaatatttacctgacaggtttgttgtgagattagatggggaagtctacagtgactagcacatagcagatactctgtcaatgtttcctcattgctgaatcattgtagacaggaatagacagcagatttctaagagtatcggaaaaacagcaagttaaagaaagcagcccttgctcatgctttcctggaaagttaaatacttgwtatattaactgtttatagcatgagttgaaagaataaatccaccatcttcaatgtggacagtctggtgcagatgttagttaggttatatagaaaggaggctcttcataggatctctgcatggaggacttctttgcagcttctgttgattttgttaaaaccaagagtactatagttttcattcataaatacagatttgtgattccttaaccaaaggctctgcgctgccttttgacttaacatattttcagtttaccatgggattattgggacataaccatattgtaaatcgaggattatatgtacagtttttttattgttttacttcagaatataatgaagtacgttaaatgctgaagtagctttaaacacttcaaacaaaaccaaaaaacacaaccatgagatacatctttagtgatattggaaacacttcatagactaaaacgtgcaagatgaaaattcataacttagaagaaatcattgtaggtttagttccttgattcccctttggtctgtttttgaagcccttttgcagcaagtgaatcataatgaactaataagttttagagtgccgattttcaaaatgtgatgcaacttttatggttctgtactttattattaaatacataggtgcaaataagaattttcattttaatctgtcaacgacaatctgttgaaaccctgctgtgtgccttgtgccatgctgctctgttaggggactggggaggccaggacatgctgccagggagctcccggctcagtgggaaagagtaaatgcagagtgctttgctactggtttaaaagaaaggaacacaaatatgattgctttcttactctgggtttgcctttctggcatgttgcctggttcccaagacgaagtctcggatgtgtacatatttgagagttcagtactgcagtatctattcagtgaagtataaacgaaagagcatttttcaaaacaaatggtatgtaatatttttgtsttctttagggctctggaacttcatccattctctatgaaacctcttctgaggcgggcratggcctatgaaactctagagcagtatgggaaagcttatgtggattataaaacagtgttgcagatagactgtggactccagctagcaaatgacagtgttaacaggtaattaatctgaggcagctacctaaaatctagttgttttayactgtttttcccttcccctccttcaagaacatgtcaaaatatagatgtgttatcagttacttttatcacctgaatgattgccttcttttattccattacatcaaatggttctctcccttaacttaatttctgactctcccttaattaattctgacttgtcctctaatgcctttgtatttgttttctgatccatttattactgttcaatcagtatttttttttggtcttagtaacacaggatataactcatatgtgctgcttaaatatatgtggtgataagagggtatttacatagatatcataaaaycagtactagtagctgggtgcggtggctgatgcctgtaatcctagcactttgggaggccaaggcgggtggatcacttgaggtcaggagttcgagaccagcctggccaacatggcgaaaccccatctcaactaaaaatacaaaaattagccaggtgtggtggcgggcgcctgtaatcccagctactcaggaggctgaggcaggagaattgtttgaacccaggctgcggagattgcggtgagctgagatcataccactgcactccagcctggacaacggagcaagattccawctcmaaaaaaaaaaattaaaataaaataaataaatcagtactagctatagaataagatccaaaaatgtggtgaaaactgctatgttgaatcctctcctcccacaggatttgcaggtgttcattggcaccatatctgtcagtggaaacatatctcttgtttctcctgaggagaatggatgtcttcatgagcctgccagatatttctgttatatgcccttgtaaatagacacttatctaggatgaatagtaatttataatggcgaaatagcaaagaatttggatctaatttatgttatgacctatttacccccagcgtgagaatgggaaggtaaaaacttccagacttcatcaattgctttccggtgaaatttgaaaattaactagttggataacatttctagttatgtatgacattttctgatcccatttgcttaaagtgtaacttctgaaatatttatatgttacactgtaccccatgctagtctagtggaccaggccttgatcctctcaaaaaagaaaaaaaggggaaaaaatgacatggtctccgtctttaaacatactagaatatagttgggtagaaacagtgtacagcagtttayctccaggctcggggaaggggatcacagagaggccaggccacctgtgtctgtatgggctgaacttgttgcagagagagcacttgaagggggctttgaaggatgctgagagaacatgaagagaccttaaacaaaattgtagaaaatgagaatggtaattcaaggtaagttttaaaatcagaccttaccttcccatgtggtcccagccctgctggaaagatacataggcagargtgacaaccgttctcttggtagtcacagggaacctgtctgatcccagcctgcctagaagaaagggacatacatccataatctgtgatggggtgagatgagacgtcttgaacctctggcacccacagcctccttgaccttgagcttccttggccttgaccaggcggtctcacctggcgctgcacagccaccccacggtgcgccatctgctgcctccttttatgtgcctgcaggccctttctcctttttgtctttgaattccttctcatctatcaggagaggacttgcctcctctaggaaactacttgccctgatccactgtctccctaccccataggtgcaccttaggttccctttctcagtgcccccataacactgggccctcttttattacccagcttctatattgttttcacgtttgctgtctccctgtgtaaaattcttttcctgtagctgtagccggtgttccctgaggtcagaaattgtgttttttcatctttgtcgctgcactgcctcctgtgtctgcctccagtagacgtcctcaataaaaatgagtgcattttcaaacagagaacacagagttcactcctgtgctttggggcattgtttgttgcttttaattcgccccatcctcggcttagtagttttcaaggtagagctggagaaagtaagatcttctcacagtgttagaggttatcatgaaatggaaagtggggagacaccggaagtatctggcagagaggagggcctgatgaaaaggtattttaggaagtctaattaatagtaggctgaatggttgaagggagaaatgggtctgagagaacatgattactgacatttctgaccttttgcattatagtttttctaaaaaattgaggtagaattcatgtacataaaattaactaagatgtgcaatgcagtggcattttgtacacttaccatcttgggcagtcatcacttctttctagttccaaaacatttccaccaccccaaaaggaagccctgtacccagtaagcagccactccccattttcctttccccccagcccctggcaaccacaatctgtgttctgtctctacgggtttatctgttctgatgttttatctaaatggaatcatatatggccttttgtgttgggcttctttcacttagcataatgtcttcagggttcatccacggcatagcatggatcagtacttcattgctttttatggctaacattccattatatgcatgtatatatcatatcacatcttgtttatccattcaccagttgatgaacatttgggtcattttcaccttttggctattgtgaacagtgctgctgtgaccattcatggacaaatttttgtttgcatacttgctttcagttccttttcgtatatgcctaggagtagaattgctgggtaattctatgtttaactttttgaagattgtattatatttgttatatgtactcaggaaggttcatttaaagtaattgacttttaagactgagtcattttttttaattgaatggttcttgttgatattttgttgatgaggaggctttggttttgccatatatatttttatatacaatatctgtttaaaatttttcactatttcttatttgtgaatcccacatttatgcttgcttttccatctattccaattcattatggaaaattaaacagcagaagctttttttttttttaaatttaaacatctgtatttattttgtttctgtcttccattaaccatatgcctctcttcctctccaggaatcttatatgttaaatttccctgcatatacttatttattccctggcaacacatcatctcttttcagctgcttcttccttcctctctgctggtaatataagttttgcttgaaaattcttttttctgaaacttctttttcttctgcaattctgggtggttayacattaatttaaatttttttttacattaaagcataagattcaattattatamccaaagatcactatggaaatttaagtttaagaaactgtagggaaattatgtgcattacatttgtctatatataaatataaaagtttttcacacaaaaagttgcgactagatttaactaacttgaatttattctgctaattgccagtaaaccaattcagtcttaggaagcagttctttttaaccagatttgttcaaaagacgtaatttttaattttatttttaaatctaattatgacattctgtatgtttaaaataatgaaaaagtgatcactgaggatattaatctaaattttatgatggccatcagtaaatgccattaataaaaaagcccttgtagtagaatctagtatcttgtattttcatctttattcatatgaaaagagaataaatggggctgggtgcggtggctcacgcctgtaatctcagcactttggtaggctgagatcacctgaggtcaggagtttgagaccagaccggccaacatggcaaaaccccgtctctactaaaaatactaaaattagctgggcgtggtggcgcgtgcctgtaatcccagctacttggggggctgaggtaggagaactgcctgaacccgggaggcagaggttgcagtgaaccgaggtcgcatcactgcactccagcctgggcgacagagtgagactccatctcaaaaacaaaacaaacaaacacacaaaagaataaactgataattatagagatgaaaaaaatacagagcaagaaagagtatcttaaacacatgtaagtgttttgagaaaaagcattattcacatgacagcgagcccttaccagtgttggcagccagtcttgtacacctgttgtcaaccacagtagttggtaatgtggttatcataatgtacagtttgggcacagaaattctaaaatacttctgatcattctcaagagtaatacattatcaatttagtaatgattttaaatattacaggagacatttcttctaggcctcctaaattttagttttattaatatatttaactttctcaaaaaatacaattttattatgtatatgttaaaattttttaacaaattaaaaatgtcttttttgttttgattaaaaaatagtctaagttgcatcatttatgacaacttgtaaatatctttttgaaaacagtttatacggacagaaaatgctcaggattgcatgttttctacaaggaagtacacatttgcatagcatttgcaaattttattcttaatctgaccttcagtaatataaaaagcaaactaaatgatcaacagagaaaattcactttctctttaggctatcaagaattttaatggagctggatggaccaaattggcgggagaagctgtcacctattcctgctgtgcctgcttctgtgccactgcaagcttggcatccggcaaaagagatgatctcaaaacaagcaggagactccagcagccatcgccagcagggcatcacaggtgggggatgcctgcactcatttcttctcaaggttaccttgagttgtgtgtgtactttcacagtaaagcagagagataagagcattaattctagaatcagacctaggtttaagtgaagtccctgttctccctattttattattattttgagacagggtcttgctctgttgcccaggctggagtgcagtggtgcgatcttggctctgcttcctgggttcaagcaattctcctgcctcagcctcctgagtagctgggattacaggcatgtaccaccacacctggctaattttagtgggtttttttttgtttgtctttagtagagacagggtttcaccatgttggccaggctggtctcaaactcctgacctcaaatgatctgcctgctttggcctcccaaagtgctggaattatgttctccctctttaaaactacatggtcttaagaagttgctacatacctcctgtgtcctactagtatacatgtaaaagcgttttttgttttgttttgttttgagacaggggcttgctctgtcacccagggtggagtccagtgkcgcaatcacggttcactgcagtctcgacctcctaagctcaagcaatactcctgcctcagcctactgagtagctggaaccacaggtgcacaccaccatgccagctagttttttttttttttttttggtggagtctcactttgatgtccaggctagagtgcagtggtgtgacctcggctcactgcaacctccacctcccaggttcaagcgattctcctgcctcagcctcccgagtagctgagattacaggtgcctgccaccacgcacggctaatttttgtatttttagtagagacggagtctccctatgttgcccatgctggtctcaaattccagggctaaagtgattctcctggctcagcctcccaaagtgctgggattataggcatgagccaccatgcgtggtttaaggcaggggaatgtattaataaatgtctcacaaggaggttgtcagaaataaatggagatgtgtatataaaatagtatattctgactttgtaaacctgtagtaacctcttaaacattgttaactaagaaggccaggtgcagtgggtcactcctgtaatcccagcactttgggaggcaagtggatcacttgagcccaggagttcaagaccagccggggcaatatggcgaaaccctatctctacaaaaaaatagaagaattagccaagcgtggtggtgcatgcctatagtcccagctacttgggaggctgaggtgggaggatcccgagcccaggaaggttgaggctgcagtgagctgtgatggtgtcactgcactccagcctgggtgacagaataagatgctgtctcaaaaaaaaaaaatttaaataacatgtagctctacagtagaccctgtatgtgatgaggctaaaggaataagactgatatgtttaaaataataaagtaaagccccacaacataaatataatcatgtgctcataatggtatttcaatcaacaatggagcacatatatgacagtgatcccataagattatatactgtaactttactgkgtttttactgtaaaggtactatactcttactgtaccttttctgtgtttagatacacaaataccattgtgttacagttgcccacagtattcagtacagtaacatgctgttacaggtttgtagcctaggagcattagcttacaccatacagcctggatatatggtaggctataccatctaggtttgtgtaaccacactctatgatgtttgcacaatagcgaaattgcccaacgacaaatttcgcagaatgtatccattgttgagtgatgcatggctgtgtaatgcaggtgcttccttctgtctttattgtagttgttaaaaaatttgtattcccttagtgcctacattattactttgagtgtagtaagtaagcatttaataaatgtgacttcacccttgctttctgctttaaagccagctgaggccccatttctcccacaaagcttagaaactccatatgtgtccccaggctgtgcttcatcttgcagatgccctgaggttcctgacccatgatgtccagatggctagtgttggaccctcattttctttattgccaagaaagagcagacagggaatatctgccaagtagatgatctagcagtcctagggaaattatggagatctgtagttttctagagtccattattaatagggcctgacacaaagcatttgttcagtaaataagagctacttcttattaacaaaatgcatatatagctgtgagttagcaaaccatagcacaagtataatcagctgtgtttgaatttttctgtccatatttgtttactgattgatagtgagaatggataccaaaggtttaaagacactggaggataaaagcttgaggaaaatttttcagcaaaatcttccctaatattctatttcagggtttatataccaggattgggaaagtaccatttgaccctattgtgtcagatttttttttttttttttttttttttgagacaggatcttgctctgttgcgcaggctggggtgcagtggtgcaattttggctcactgctgcctcgacctcctgggttcaggcagtcttcccacctcagtcctgagtagctgggactacaggtgtgtgccaccgtgtctggctaattttgtattttttatagagacaggatctcattatgttgcccaggctggtctcgaattcctgggctcaagtaatccttctgcctcaacctctgaaagttctgggctaacaggtgtgagtagcctaggctatgtgagatcttttgaaacatgaaacatgggcagaaatattctgtgatttgaaatagaagatgaaaagtaaactagcattttatacaatttgtgcagagggacaaataagattattgtttacattctgagtttatattataaatttagggggctgggcatggtggctcttggcagtaatcccagtagtttgggaggccatggcaggaggatcacttgaggccaagagtccaagaccagcctgtgaaacaaagcaagacccccatctctaccaaaaaaaaaaaaaaaaaattggctgggtgcggtggctcacacctgtaatcccagcacttttggaggctgaggtgggcagatcgccagagctcaggagtttgagaccagactaggcaacatggcaaaaccctgtctctactaaaaatacaaaaattagctgagcatggtagcatgcccctgtagtcccagctgcttgggaggctgaggtgaaaggatggcttgagtccagaaggcagaggttgtggtgagccgagattgcaccactgcactctagcctgggcgacagagccagaccccatctcaaaaaagaataataataataaaataataaatttatctatcagaagattttaagattacaaaatttaaaggtatattttaaattttaatttatggatttttattatatatcaaattattccataggataaacttattacctaggtttaaaactttaaattttaatattttgtgtatgtttgaaaacttggttgtaagtaacagaaaatctgttgacttaaagtgtaagggatggtcttggcttgtgtcactgaaagggcccagacaggctgtaaatcaggctcaactcattaagacttaggctgtagcaggaaacaatagaactgtagcagttttaggctttacatctgcacatatcagtgtccaaagagagagagaaaccattgattttgatggcattaagaatgaggaagtaggccgggcgtggtggctcacgcctgtaatcacagcactttgggaggccgaggcagcactttgggatcctcgaggatcacgaggtcaggagatggagaccatcctggctaacacagtgaaaccccatctctactaaaatacaaaaattagccgggcgtggtggtgggtgcctatagtcccagctacatgggaggctgaggcaggagaatggcgtgaacccggcaggtggagcttgcagtgagctgagattgcgccacccaccgcactccagcccgggcgacagagcgagactccgtctcaaaaaacaaaacaaaacaaaacaaaaaaaaacaaaagaatgaggaagtacatttccccaaggcccaggctttttaatctgttattctgttcatctgaattgggccatgtgcccatccctgagccagtctcttttatgaggaaacaccccacgcactgaatggcttagacctggggttttgatcagtgaggtcagcctcccctgaacacgtggtctgaataggagaggggtgatagctgaatgaatattgaggtcctggaaacagattctgagcagggtatcagccatgttcactgcaagataatagggatagtgtgtaattctggtaatgagcagttcagactctgattgtagataacagaaagcccaacttataatgcctcaagtaagcaaaaagctgtttatgggcacttactatagacatatccacaggtggagtggctgcagggatggctggattcaggactcagagactccagctctccatcttggcctcttccttgctctgatggccccattttcacatcatccctttttatcacaagatggaaaaatagctcctcctttgagccttaaatcccacaggaaagaaaaagatttattttacaagaaccttgcaaaacattttatcagctcttatagactcatccctgaacaattggattactatggccataggaccatgatgtgctgattaataaaatgattatcccaaaggttagggctggagtgaggtttgcttcacttaaaccaaaggagcacagaatgaaagagatatgatttcccaaggaaatttggggtgccggatagatgtccacttcaggctttaagaggagtgttcactattcacaaaataattgccaagcaaaacactgtggatatttgtatcccatttcattgactggttctgtcgtatccaagcttaaccagaggtctgaagtgctcgtgtaccactgtaaaagcgctgtgtgaggcagcatagatggagatgacagaaaacactgtgagggttgctagttcacatgtgcagccttattggagactctgcctcttgtcatatagtcacctgagccctgttagcattgtttgcttaattctctccatctstaaggtggttctggcctctgttactgtctttagaatcccagtagagaaaagatggcatgtcaagatggataacatgacagaattattacttgtatcttattttatttttttgagatggggtttcgctcttgttgcccaggctagagtgcaacggcatgatcttggctcaccacaacctctgcctcccaggttcaagcacttctcctgcctcagcctcccgagtagctaggattacaggcatgtgccactacgcccagctaattttatatttttagttaagatggagtttccatgttggtcaaggtggtcttgaactcctgacctcaggtgatccgcccgcctcggcctcccaaagtgctgagattacaggtgtgagccactgcacccggcacttgtatcttattttctaattagaaaataatagtatcataattatataattatttttacttatagcctatttgtcattttaatttgtctacaaagttttgttctagttagattttcaccctgcatgctgtgtggtcaagttaatttgcaatagaagatttacttatagttgtacttaagattttatagaggtgcttgtacagatacttcctcttctttgtttttttgtcccatagatgaaaaaacatttaaagcccttaaggaagaaggaaatcaatgtgtaaatgacaaaaactataaagacgccctcagtaaatacagcgaatgcttaaagattaacaataaggaatgtgccatatatacaaacaggcaagttctttgtaactttatatatttcttatgttaatagttttgattattaaaaatattttaagttattttattaacacaattaagtaattgccaaagttttttgtgatggttctaagaatttctatagcaagctgtcctaaccaagtgtgtctgaaagaggtgaggccgtgggarttctacagagactggaagcctgaggtgtgggcgggatgggaggtctgacatagtttgtgccaccaggttcccaaaagcgaccatggctgctttggcttgtgcaactctgattcggcatttcctggcttgccggcctcgttgcagctagctgggcctgggcattgtccagtgtgggaggagcaggaatcaatggcctttcaaaatagtgtcttggctgggcacggtggctcacgcccataatcccagcactttgggaggccgaggcgggtggatcacgaggtcaggagatcgagaccatcctggctaacacggtgaaaccccgtctctactaaaaatacaaaaaaaaattagccaggcgcagcggcaggcacctgtagtcccagctactccggaggctgaggcaggagaatggcgtgaacccgggaggcagagcttgcagtgagccgagatagcaccactgcagtctggcctgggtgaaagagcaagactctgtctcaaaaaaaaaaaaaaatactgtcttakggagaatgcccttttccttctgaagtgctgcgggaaggcaccagcgtcatttatagcgtgcagcaggaatgggcagattgttgctcaggtaccgtctttaccacgtagtaaaagatacctatatagaatatggtgatagaatattggacaaaagatgtcactaaatccaacagatgtttttctgcccttctgttcagcctctgtaggatcgggcattattggtcactcagttttctgtgaagactcctcctcctcttggctgcggaggaggaggctggcagctcattgcctggttctcgtcctctccctctccttctgtaggcttttctttccctagaattctcatagttctgagggtctagatcctttttcctttctacgtactctagaggccattccatcctctccccaggtccactcaccaccttacaatgatgtcttccaaatctctgtcttctgagctccagactgaagcgctccccatctcttctgcactcagggctggatatcatcccctacctccctcttccagtcagcaagctcagatgctcctaccttctaaatcccaaatccatcttcagtgtgaccctttctgtctccttgccaccatccccctgtcattcccttgctctgggccactgtcctctcctcctaaatgtctgcagcacccttatggtgtccttgcacagctttgttccatcatctcattctccaagctgtagccagagggactgtctaaaacatggcaaatgtgtcagccyctattaaaaacccttcatcggacttccattaagctcagtttataaagctcaacttccttccatgacttacagtgcccttcgtgatctggcctgcctgctcttccagcctcatccctgcattccagccatatggaactcttcttaattcttcaggaacaccatattctcttccactgtaggtgcaggtctgtgcactcgctgtgtccttggcctccactccccgctacctccatctgaactttctcaacccagtgcatttgcattggataattcttaacttcatactctggatttcaacttaaatgtcacttcttccaggaagtcttccctgcctgctctgcgccttgtctcagccccactgaatctgatgtagttctcagctgtgtgctcccagagtactttgcacagattttattgtgtttgcttgttttaatggtctgtctcttccacttgattgcatcctccttgagggctgtgactgtattttgtttgcggttgtatgcccagtgccataattgaatcaaatgttaagtttcaatggaaaccgcagtggtatagcaacagacatattgagctattttctgatttttsttagctgtctaaaacttacagatagccaatctttacctttcataatactgagttccattgcattatgccagagctctctgttacttgaagctgtgccagtttgaagaagcaaagcaggactgtgatcaggcacttcagctagctgatgggaacgtgaaagccttctatagacgagctctggctcataaaggactcaaggtgaggaaatcttcattttaatgcataaacttcagctctgaacaaatcaagtggttttcacaagcataaatctccagatcttgggatgggattgaggttattcttggatttaatcctagaactgtactaaccagttctaaaaccttgatagaggcctcagatttcacccctaaccataatgtgaaactagattgcttytaagattccttccagctccaaaataatgatttattctctagttttctgaggaatattgttagttatagtaggttcattttaagatagaggaaggtttggtactgaattaccgaaactagcagtaatgctgctggttcctccggcaaggattgctgttggaggttgggtggggaaggcatcagaatagaagatgggtgacccagcggaagttgggagagacacatcggagacttgaaagcttatagtgatctgggccttaagccagctgatggtcagtgtaaatctgtaaaatgccattcttctctaagaaaaccatgccattagtttagaagaaagtggatattgtatcattccacttttcttcacacagattcttctgcatggaaatcctgaggaatgaatgttcatatttatagaaaataacatcacaaggaaaaaccagaacatattggaaaatagtacttcctgaaataattttttaagctcarttttattaaggtgtaatacaatgaagttcatacattgtaattgtgcaggtcattgacttttggtatgtgcatatcctcttgtagccaatatcccaatcgagataaagaacattttcttctgaaggtggtgtgtgctaaaaaaaaataacattttcatctttctagaaagttctctgtgcccctgtacaataaatcttcctccctccacccctaccctcaggcagccattcatctgatttctatcactatagattagttttgattgttttggacattaccataaatcatatagaatggactctactgtttggcttctttcagcataacctgagatttgtttatattgtgtgggtatcaggaactgttcctttttatcaccgtgttgtatgaatatatcacaatttgtgtatatattcaccagttgatgacacttaggttgtttccagtttggggctgttaggaataaggctgctgtgacattcttgtgtacatttttaatggatggacttgtttacaaactgtacagctggaggccagatgtgactaggagtggggatagagggagatggtcagatcctgaggggcttggtaggccatgctgaggaggctggacttaattctgaaggtgatggagcctccagagcagggtaaatgrtggtgtaatggatcagatttggggacctcatggaaggttgataagaggggcccaggatgaggaggaaggtaagtgagagatcaccaaggtgagaagcaggtacctgaaggaaagtaatgtccaaggaaagggagaagtatgttagctgctgtggctgctataacaaagcgccatagactgggtggcctgaacaacagaaatctattctggaggygggaagtctcagcttgcggtgttaataggggtggtctcttcagaggcctatgtctctggcttacagttgctgtcctctccctgggtctccatgtggccttccctctgtgtgtgtgtgcccaaatcttctctttttataaagacacagtcatcttggactaggtagggcctactgattttaacttgattacctctttaaaggccctgtctccaaatatggttacattttgaggtactggaggttagaacttcaacacaggactttctgtggggacgtagttcagcccataacagaagggaaggggccaattcaagggtttatggtaaagttgacatagcagtcaaatgtctaggggaagtgatggaggggatgcctcccaggttctggctgggtggctgagggtagtggtgtgataatggggagcattcaggagcggggcagtttgggagtggggagaggattgttttgactgattgagtctgagatagttgttttaattccgtgcccatgactgaaagggaactatctaggttctgcagggagaagagcagtcatgttgcataatatagcaaatgaggaccacccaggtgcactgaatggccaccttttccagattgtagatccactctggctgcagtgcagtcagcgtgcatgtcccgccaggacccycgtgctgccctgtgacccccgccccatgctgagggagccacacagtgtccatgtgaccctaacacatgcctccccgccggccctctttttttttggttagcaacacactcacttgtaaaaaaaattcctagatggtgtatggcaccacaaattaaaagagactcctttgaaatttactcacctctttgagcttagtagatttggtaaatgaggatctgtatggctcatgagtttacagatggccaaactcttggagcacatttacctcttactggctgcctgactttctgaacctggtgagctgactaaaggtcagaagctgcaccctaatgaaagactggactttagtttgtgtgggtatcatcattaatacttcattggacttttctatttccttggaatgaattccagaaattatattatgatgcagaaaaataatcccaaatttgagtaatcctatcccactagattatgaggctggtagcttatagcttgatttgttgtccagtaatttgaggtatgtgccaggtgaatttaatttcagaattttaaaaaatgtttaagagagacagggtctcactatgttggccaggattggtgttaaacccctggcctcaagcaatcctcccactttggcctctcaaaatgctaggattacagatgtgtgccaccatgcttggcctaatttcaggatcttcaaaggctacaactgcttatagaatgtgtcagaactcacgcccaggcctgtttgcccagggtgactgcaatgaggaagtggcacaggggctcacggtggcaggtgtcctgcctttagctcccagctcaactctatgttttcctcagatcttctgtttgttttctgactttgttatttttaatggtgccagctttgaaaaatatgagctttctttaatgtacagctgttctttgtaagaaaagatcactgaacattttgcttttatttacaatttatttctcttattgagtgccaattatgtgctaggtgttaggagtatagaggtgaataaagacatggtgcctacttagggaatttacacccaatagagggtgctgcaagatccacccaaaagaggatgctgtagaggatgatacatacaattgttatgtatcaatacaaatatcaaaaagaatatcataaaataactattgcttttatggtttcagcaaaactattaatggtaaatatcacaaacacgtgattataatacatccctttttaaaggcctaatgaggttagcaacttttaatgccttctttcttgtcaaagctacattttctggtttgttgttgttattgtttgttatttgtttatttttgagacagagtcttgctctgtcactcaggctggggtgcagtggcgtgatcttggctcactgcaacctccacctccagagttcaagcaattctcctgcttcagcctcccgagtagctgggactacagatgtgcaccaccacatctggctaatttttgtatgtttagtagagacggggtttagctgtgttggtcaggctggtctcgaactcttggcctcaggtgatccacccaccttggcctcccaaagtgctgggacacactttctatgagctctgctcttccctctacactgcatggctgggttctcttcaggtcttgacttctctgacacctgtaactgtagaaaaaggaggctctcttgttagtatccatctcaacctttagttttctccatgacatcaatgacagtctgtaattatctattcatttgtttacakgtttttaattgcttcccctcataggacgtaagcttccataaatgtaaaacttaagtctgtctttctttgtcttttccgtggtcctcttagctcctggcacatggacgtgctcagagaccatctgtgaagtgaatgagcctcgccccctcttagctgcctccttgcccaattctgtctatgcccttgctgccattctgccctcttcatgcttgtctgcagtgctaacacttgtcaacatgcatttcttgttttcttatgtctcttccaaccagtcaggctgctctttaggcagagactttccggattcatgaaaatgatcctattgactcctagggtgctgagcttccatttccaaggctgtggctcacaggtctctatttccagtcctttcccttgagctccatgccatgtaatcatccaccttctggtcattgctgttgtgaccatcccattcttcatttttaaaatgggaacaatagaagttaatatttgtagggctgttgtgagggtaaagtaataattgtaaaatgcttagaatggtaagaatcagcctttattacttcctcaacttgccctcctgctccactcccttgcctttcaggtatggctccctgcctagaacgcttaggatataaatacagtgtcatttttcccccggtaaggttccagtgctggtctaggacagtggtatctggagatttgttatactttgtaaataatttacttttataaactagagcagatttaaggttatccctttaaatatgtccctcttgctctggtgtgttgctgtaggggaggggaaaggcatgtgggattacagctaggcccccgggaatgtcacataatcactagctcagcttatctgtgctcagcctcttgtgcatgctgttactgatgtgtcatgaatacttgaagaggttacacatccttgcaattctttgcctcttcacagtttggtttattcaaaacatgggtctagtctgtagtttagaacatagcttgtcacagcagactgactttggggcatctgtctttgctgctagattcagtggtcatgtcttgttaggtgccctttctttccctcaacttcttcagtgtattgtgtgactcatggaagattaaatgttgactctagccaattygaagagtaaacaacctggaaggattttatggaacaaaagtattataataactaccatttgcatagtcctttataggtttaagccacttatttgttcatttatttcttggtacagccttgtgaaaatttgaatagagcttttgttccccttatgttaaagatgagaagactgaagcccagaaaggttaagtaggatcttaagtttcattgctagtaggtgctaatacaaggatgagttcattctttcatttattcattcagcaagcaacaagtgcttatcatgtgttagggactgggaaggttgtggtgatacagaatttaacttgcgttttctaactccagatcctgtgctttttcttctatagtcgatgttcactgtatcatgggttatactatttcagctgcatattcaccccacaggctcactttgtaagagtggtattaatgtggaccctgcacacatactgcacagctcactacatccaccccactcccactcaggttactctaggctycttctatttatgaaagttattttctctgtcttcctacttacagaattatcagaaaagcttaattgatctcaataaagttatcctactagatccaagtattattgaggcaaagatggaactggaagaggtaactagactccttaatcttaaggataagacagcaccattcaacaaagaaaaggagagaaggaaaattgagattcaagaggtatttgtatttgattatctttgaaagtactcctttggggaccttagactggattctaaggtcatattcctgtgagttctaaaacatttttaattttgtgtttttattctgatgatcagtgacaaaattttaaccagcaacaaaatgtctcctttgcaatgataattagccattgtatttcccaacgtgggtccatggatggtactgggagtctctgcattactgcagttcttcctttctttggcctccatctgtactgctcccactccagagtacactgggaaccagcggccactgactttgctccagggtagacctggagaatcctgacgggactgattttgttacaggggccctgaaagcctcacctcatagagattatccagattgattcagacctttttagcactctgaaatatgactgcctcatcagagatctcgaactacctcaggatcaaactgcttttgtgattcagataactaaaatgtttttctctgcctaatattagggaagaatgttaggctgtgaatccctgtacattcatgaatgctaataccccatttatagtctcacatttccactaagagtaagaggctaatatgtaagagaagctaggaaggttttttttcctctttaaggagggaagaaaaaactgttttaggagaatcgagcaatgtaagttcatttctctgttaaaatttattgtgaaaaggagataaaattgacataggcatttatacaacaattgtataaagtctaaaaattaaattttgttgtcatagtttcaatgtcaaataattttttaaaacttttatgaattggatcttayaccctaaaacttctcttcctaaaaaaaattattacaaagttttcacttggaactggactacagtacagtctacttgtagttttcaattctcattctgacagacgtacttaggatgtatgtgrtgattgtggttcagtgtcacaatgcatttttcttttcttcatgaaggtgaatgaaggcaaggaggagcctggaagacctgcaggggaggtctccaygggatgccttgcttctgagaagggaggcaaaagcagcaggtcaccagaagaccctgagaaacttccgatagccaagcctaataatgcctatgaatttggtcagattataaatgmtctcagtaccaggaaggataaagaagcctgtgcayatcttttagccatcactgcaccaaaagatttgccgatgtttttaagtaacaaacttgaaggggatacattccttctcctcattcagtctctgaaaaataatcttattgaaaaagatccctcattggtgtatcagcatcttttatacctgagtaaagcagaaaggtttaaggtaagtggctaagtattttattagtagaaattggttttattagggtttctgtaacttaaaaatgttacttatgctaacatagttggttttttgtttttttttttttttgcttcttttagatgatgttgacactaattagcaagggccaaaaggagctaattgaacagctgtttgaggacctttcrgacacaccaaacaaccattttactttagaagatatacaggccctaaaaaggcagtatgagctttaaatcaagataattgttagatttcttccatgcatgtatgtgttccaggaatgttaatgagatggtattgtaaaagagttgcatggataaaacttggcctagaaaagtttggtctgcactataaaasattttacttattttcctacatagaacatgtatattctacaatctgctttttattagttgtaaatattttcttatgtaccagaaccaaataagtatatttagaacttgttaaaaatacattttaatttatgatatacatattattttaattacttgttaaaattttgagttaagttgcatttctttgggctatgaaggagtcctcttaagtttgatagaaatgaatttcttgtaacattcttttttaaaagtggaagtcattaacagtgattattatatcacttatatcctgctaagatacacataaatcccattttgtactagtacctgtggattacagtcagttaaaatgaaatgcaacactgaagtctataacatgaaatgattattaaattgtttattaatttagagctataagaggaacttattttttctaatacggaagcattgcctaataattaagaacaaaaattgccaaaaatttctaccactttttactagattttaaaaagctactttcttttatattgcctatataagcaaaaaaccaaccactgtattaaagcaaactaagcctgcatttatatctgaattattacctccatattttaccaaacatttgaatgtcccccttcccccttttttgttttctgcttttatgactgtatttattcctttactgtaaaagaatatgaagaactcatacatgttgaaagctcctttgttgactgggtcaaagtgaaggaatttcaatctccatcagtgtactgtcatttatttctgcggtctgtagtgcgttccccctttctggagcattttcttattcacttagaagtgaagatgaaagttagtatcatgtttactatttccatattcattattattttatctaatcttttatagttacagaatattttaactcatcttgggtaaatatctttcaaactgtgccatttttctttgaaactgctttctttgttcataagtgaaaaatctgtaatgggactttagtcttcaaacaaaatttctcctttttaatgttattgaatttttataaaagtaaatggtggattgttagaaatgtatcctatgtatggagtttacttacagaaatgggaccactcttttcctatacatagcaacttgaaattaactttagagacaaaagggaactttctcttttggtgcctgacacagtgacattaataactgtaggtgattttgttgagctttgtgataggcactgtgtgtcatttatcacacattgtctaatttaatcttcataactctgctacagatgaggaaacaatggaacagaaggttgtataaattaatgaggatttacaaatgttgcaagtggtctctccagtatccaaacctgggcagtctatcttttgagttcatatactctgtgctgtgtaatggaaaatattaaatatgtgaatggactaatggttcaggtgcctattccttaacagtcacagatgagtaaaagattagtgaatgtaaattggcaattttggtatttatagtgaaaacacagagcaagaggaatgcccaggcctgcctgagagagggttaggaaaggtttctcatggggcacagttctgccacagcttgagtatgtcataggcagaggaaacgagatgcaagggcatcaacgtgcatattgaaggtgcaggttgaatgaaagtgtgaagtcacttggcatgttcagagaactgcgtgaatcttaatattactggaacatgtggcttaagagatagctggatagaacagaaaattgcatgctgcatataaaatggcagaaaatatcagaattttaattatactctggcattactcttaactaagacctggttttcttccccttctgggcatacacaagattgtacttttcagcctctttgtgattggtcggggccacgtgaccacttctgccagtagggtttaggtaaaagtgatgtgtcacttctgagccaaagtatgcaagatctggccccaaaccctccctgatcgtttccgttgctacagtgacaaggcttcatgttgcagtcagtgcagttaaaagatgactggctctgtcagcctcgttctttgaatgctggtttgaagcagggttctgccagtccacattggacacagaatgaacaagcttatgctttttttgttaagccactgagatttttattatttgtaactatatccaaacacttaacctctcagtctgcttctgtatctcttctttcttcagcctttaaatctttcctgagctttgacctgtaaagccaacttcaaactgttcacctctacacagatgtcttacagatactgtaactatacatgccctaaatggaactcgctgttccctgaaactcaggcttcacttatcccatagttccacaaaaggtaccagcattcacacactggcctaagaaacctgggcttctaaactttccttgctctcagtcctcacatctaatatttcatcctggcagacacttcattacacgaacatggcacactcacccaagactaactgcgtttgcgcaggatgtcttaccacattgttttggtgtttttgagtttacttgtctgatacaaaatatctggttcagttctgtttcccatagtgctcagcaaaatgcctggcataatagattcagtaagttattcactgaatgaatgatgtcttagtaattgtataattatatttgtgggtacatgtattacctaaagtattttagtggaatgtcagcacttgttatatctaattggtttgctgtaaattgtgcatctggaaggagagaagtctcaaaagtaattctatacagagtgtgggttatttaatcatcagagcttaactcatgccttagggaccttatgaacaaagtttctagacaaaaacatcaaagacaaaatgttagaaaaggaaaggaaagaaactaaaagcccttgaattaaaactgtgtgacaattatttactagatgtaaaaacatccaagcaaatcacagtcactctgggcttaaatttgcttatttttaaatgttaagtaaatatcatctggaatgacagatttgttgcaaaataacatgaaaatacttcctaaattgcacagtatataagagactaatgtcattactatttctggcttgtgggtaatatgaaagttccctgtgtgcagatcttgaatgcaggattccacacctcccatgtccagcctcttaatatctggcccctggagtttttaccacatgctcccatggtcaccctcagcctcctgatcttaactgaagtaacggaccatcccataggactgctccaatcagcttcccctcctcttgactcatcaccagatcccctgcctccaactgttctctccctgaaagtagtcttactcctcttttctaatgctgacccctgatcttattcctcccttttcttctaggactttcctctgagaataataccttctctttcatgtctgcaatatctcccttttcatcgctgccatcctgtcagcctataaacctacgcagctattcttcacctaaagaaaagtctcaacctttcatctttccctataccattgctttcaaaactggataactttctgtttacaagacaaaatgaaaaaatcattctccattttccccacctctcactgattccttttttgaaggaattttggcttctgcctcccatcactattgaatttaaactcctctcaacaaccttgatcaaacccagcagccttttttttttttttttttaagacggagtctcgtgctttggcccaggctggagtgcggtggcgcgatcttggctcactgcaagctccgcctcccaggttcacgccattctcctgcctgaggagaatactcccgagtagctgggactacaggcacctgccaccacccggctaattttttgtattttttagtagtgacagggtttcaccatgttagccaagatggtctcgatctcctgacctcgtgatccacctgcctcggcctcccaaagtgctgggattacaggcgtgagccaccgtgcccgaccccagcagccttttcttagtcatagaattgcgtcgcattgtagcctggagagaattgttataggtcatctcatctaaatcctttcacttatattgaagcccaaataagaacacacctaaggatattgtgtattgtgaaacgccgagaaactgtggctggtttggcccttttgctatctgggatttgagggaaaaggtgaaatttggaaggcaaagaaagcaaaccttaaggacagctatgatactgagtctagacaggctattatatttcttttttttctttttttttttttttgagacggagtctcgctccgtcacccatgctggagtgcagtggcactatctcggctcactgcaaactccgcctcccgggttctcgccattctcctgcctcagcctcccgcctgggtagctgggactacaggcgcccgccactacgcccggctagttttttgtatttttagtagagacggggtttcaccgtgttagccaggatggtctcgatctcctgacctcgtaatccacccgcctcggcctcccaaagtgctgggattacaggcgtgagccaccgcacccagcgctattatatttcttaattgctcagactgagccataatctaatctaggcaaattcagagagtgcctccttcatgagcaagatcttaaaatgaaaaggcctctacaagtcgagactgcaaagtgatggatatattgagaatttgatatttgtcaggaaagcttcaaagacatggagcttctaagcttaatcttttcatttccacttcttatgcatcttagtgaaaactccctttatcctaccaagtggtggtgcctattagtagtatactgttcgctagaggcctcccaggaagtagttcagaaggcttgatttctatgttatgtgcagagatgaagcatgagttatggcacagcatgttgttaaagtgatttcaaatatattttcttatagttactttcctaacacatgggttttgctctctaggaagagaatggagcaaagtgtgtagctggaatttgttttactttcctattagcctgtaggtaccactcagaccaaaaggactccctaaaaactgatgtgcaagtcacagaattctcctgcctgacctctatcaagggatgtctgtaaggagaaatctatctctaaagtactatgaattttgtcacgtttataggttttttgcttgtttttagagacagggtctcagctctgttgcccaggttggagtgcagtgacataatcatggctcactgcagcctcaacctcctggactcaagcagtccttctgcctcatcctcctgaatagctgggtctacgggcatacaccaccatgcccggctattttttttttttttaaagtagaaacagggtctcattatgttacccaggttggtctcaaactcctggcctcaagcgatcctcctgcttcagcctccccaagtgctgggattacaggcatgagccaccgcacccagccgagtttataggttttgatgccttttgccaaaaatcaaagaggtggctgaaagtcaattgatatcagaagaatcaatgaaaagcaagagactcagcagctctccttttcctctgggaaactgcttaagagcacagaatttggcatcagatacacctgcaatcaaatcccagctctacttaggagctgtataaccttgcagtcttcgggttcctcgtctgcaaaatggagtatcttcctaccatttggggttgctggtttatgtggttcatgtaaaatgccttttatttgataagcaccttatctttccttccatgtgtataactgctttcttcttttaagtataatatcatctatgtgttagaaaaatgtaagaaacctcttttcaaatagtgtggacaccttaatagttatttactggagcagaggcacacattaagatccctccaatagaagtattaatatagacagaagcagctagtcttggacctctggtgtcatctcctggaaattagtcatggtacaacagccaag

SEQ ID NO: 96201 - DNA, 62033 bp, Homo sapiens
gaaaatgactaagttaagagggccctccctcatgaatggatgagtgctcttataaaggaggttgatgggaacaccctagtgcattttgccctttcagcttttgccacatgaggacacaggaagaaggcgctaccttggaagcagagagaagacttcaccagacacagaatctgctgatgccttgatcttggacttttcagcctccagagctgtgagaaatagatttctattctttttgagtgatccagtctgtggtattttattatagcagcctgaatggaataaggcaggagtgtgtgtccaaaagatatgttcattcagttgtatttgcagaaaatagttgtcagagtatgactatatcctcaaaagtcggaataggatagcctcaggctttaccctgacattggcatcacaattttgtaaaggtggaaatgaaaccgcaggatcagtgttttgagaggaggagagcagaattgaggcaaagtctaatatagttcctggcatatgtttcaagactgagaaggagatgtgctttgcttctgtttgaatgattgccaggagtttgttttgggctaatgtaaaagttaagatccctctaagcctaagatttcagttcagtttaagtccctggggtaagctaagttccattctagggttgaagtgaaccttttaacaacacagattgctggaatcctcaactctcctcattatctgaactgaatggatatcccaaagacttttgggacctgcacgaacccttaactttacctttgcccagacttaacaagccatgaactatcctggtctcaaaggagttgaactattacaaaattaggaaaccagggccagaaaggaactggaggaaaggtaagatgagcctgggccatgagcttttctggtgttatcttctgttacttttccttgcctgcttctaagcaaatttatcaaaccagttgctatgatttgaatatgttcctcaaaaagcatgtgttggaaacttaattcccaaggcagcagggctagaaggtgtataggacatatgttaggtaacttgcctaaatgtacattccatcatattttgccttgtgtgtgtgtgtgacaatctgtgtggttctggcatgtgtaggtaagtggaaagagaaatgacaaatggatgttatggcaaggagctgagatcgttttttttctttccaagagtccaactgttatcttagtaacttcagaaacccaaggacatctaagattttactttgcaattaagaaaagagatccctttctgaaagtttttcttgaatattttttagttgtgccagttgctctaggaaaatattattctcctggcttcaaattttttctctaatagtttcgcaaatatgtccggcacacaaaacacttcatttttttttttctggttgtttaaatgtttaaaattgttggggaacggaaatgaccctaactttggtgtagataaatatgtgctacttgtctcatctcctgtacttactcattccattgttatgcctgagaacccacagtgttgtggaaaacacctgattcgtgctagccgggcttgagagatgggagacccacggaagcaacacctgtcaggagcatgtctccctctcatggtcattcgtcagtactacagaaaccaaatgcaccctggaacaggaaagcagagctcaaaacacttacttcgtaggtgcggtgtatttttttcaaacacctccccattctgaccatatcgcctttctacagagacagctagttacattgggatagttgctagatcactttcagtctcttctgatgagcattcaagtataatatttttgaaagtctgtctgcattttttaagactggataggaatttatataacgaatatagtcaaaacccttcttatccctaataagaaaactttctaaatgaaaagcctacccaaagcaaatatttcctttcacttattcattcattcactcaattgtatctaatacagcgattctcaactcaatcctggctgcacattagagttccctgagcagcttttaaaaatgcagatgcctgggccgtgcttccagatgattctaacttgatcttggctagggcccaggccctgttttttttttttttttagacagagtcttgctctgtggcccaggctggagggcagtggcacgatcttggctcatggcaacctctggctcccaagttcaagcaagtctatgcctcagcctcccaagtagctgggattacaggcacccaccaccacgcccggctaatgttcgtatctttagtagggatggggtttcaccatcttggccaggctggtcttgaactcctgatctcatgatccacccgcctcggcctcacaaagtgctgggattacaggcgtgagatgccgcgcccggctggcactgttattttttaagctgctgcatgattgtaacatgctgccaggttgaaaactactaagctaatattcccaaacatgtctgatgtgccagtcaccgtggtggtgctaaggattcagtggtagagacactgccacagaaggtgatagctttctgccatcaggattcacaggccaaacataccgtctcctctgtctagaatacttcccttgttcattacataattaattcctcatgctttgcatcttagattaaatatcacttattcaaagacattgttgcccttctatctaaattagctcccatattgtttgccctcaaggaatcctttctctttcgcttcatgacacttatctcggttgtaattacaggtattcctccgccattggcactctcacgatcaaaactcaggaccagacagattttagtaatgaggaagaagaggcagacttacctgaagagtgtaaagtttaagcttcagggctcttgtggtaggctggataacagatcctcaaagatgtccacatcctaatcctaatccccagaatctatgaatatgttgctttgcatggtaaaaagaactttgcaaatgtgattaagtgaaagatcttgagatagggagattattctggattatccaagtgtgcccaatataatcacaagggtccttataaggagacaggagagtcacagaggaaatgcaaggacagaagcagaagtcagaggggtgtaaaaatgctctacactgctagctttgaggatggaaaaaggagccatgagccagggacgtaggtggcctctaggagctggagaaggcatggcaaccaactcccctgagaatctccagaaggaaagcacttcccgcactttgattttagctcagcgaaactgattttggacttctcacctcttgaactgtaaaataatccttgttttaaagtattaaatttagggtaatttgttacaatgacaataggaaaccaatatatagccctcccttgttcaggccccttccaaggccctgggaagcagtgctgatatggttatatgtttttgtaaagcttgcaaaattaaaatactttacctacaattgattaagatttctctctttccactgagacttccggagtattcttctactggctaacattggagtgactacaggcatttttgggatccagctaaacagaaatgcagctgggggtactttggtttgcatttaatgggagacgttcatgtggttcgtggtcacttccatgcactattaacttattgctggagagtaggaatggcttctgcaaatgctcctgtattagtccattctcacactgctatgaagaaacacctaagactgagtaatttataagaaaagacgtgtgattgactcacagttgaatcacaattctgcatggctggggcagccttaggaaacttacaatcatggcagaaggcacttcttgacagggtggtaggagacagaatgagtgctgagcaaaaggagaagccccttataaaaccatcagatctcatgagaactcacgcgctctcatgagaacagcataggggaaactgcccccatgattcaattatcttcacctggtcctgcccttgacatatgggtattattataattcaagatgagattttgggcagggacacagccaaaccatatcagctcctaacagccactgtgtcaaagtgcccaggtgtggtaacatgaaggagccatagaatatgtgcagcatgcagttcactttaatctcatcagagaaaaaagctgtcttcaccatccctacattttttcatatcaatcaaaagcagtaattcatgaagaggaagagataaatttgaatagaagtaatggagaggctctcagattgttggatgagtcaactaatgaagagtaaatcttattaatacattgggaaaagctttaatttccttgctaatttgtcatagtttataggcatcagtgaagatattataaactcaatacacaaccagaaggaggacatcaataacaaactgattaataaatgtcatcaatttaacaagtaatattgctgattagtcatagcacaataaaatgtgaaatgccctaagatcttataactttttttttttgagatggaatcttgttctgtcacccaggctggagtgcagtggtgagatctcggctcattgtgacctccgccttttggggttcaaggattcttgtgcctcagcctcctgagtagctgggattacaggtgtgcaacaccgtgcctggctaatttttgtatttttgtagagccaaggtttcaccatgttggtccggctggtctcgaactcctgacctcaagtgatctgtccaccccagcatcccaaagtgctgggattacaggtgtgagccaccgtgcatggccagatcttataattcttacatgaaagaaatgtaatagtgatttcctctaatatgacaatagtcctaaacctttacatgacactttcaagaacaaattattagatggtgtaggtggtccttgaatgaatgaaccatgagataccctagagcaggggtgtccaatcttttggcttccctgggccacattggaagaagaattgtcttgggccacacataaaatacactaacaccagcaattgttgatgagctaaaaaaaaattgcaaaaaaaaaaaactcataatgttttaagagagtttattaatttgtgttgggctgcattctaaactgtcttggctgcatgcagcctgcaggtgtgggccaggggttggacaagtttgccatagagcgtggcttggttggatgagggtgctagaattcagaggacggtcactgtgcagtgagagttgtcttggctgtaggactggagttggtaaaatgaaaaaaagaaaaaactagttttgcatgaaagaatgtttccagcatatgaatgtcccaccacacttttagttagtcttggctgtacatgttgcaataagtcaaggaaccctacaaagtaggatggaaggattcaaactgcgaatcgcttgaacccggaaggcggagttggagtttgcagtgagccgaggttgagcaactgcactccagcctgggcgacagagtgagactccgtctaaaaaaaaaaaaaaaaaaaaaaaaaaaaaagattcaaactgcttttgaaaaaagtaaaaatgcagggttatattttagaaatagtgcagccaatcattagtggctattcctaatatgtcaatttcgggtctatagaagacctacctagaggccagcaactattaattgatgcttatagcacctaatgaaactgcccttgcctttgaagcccccatttagctaaggggatgggatgtgaatttagaataggacgtgaaaagtgcaaaatgctcccggactcagatcggataaacctcttctaggctgtctttctcttctgaagccacagttttgatgctttccctaattcagagcaggctttcccggagtctctgactcagagcagcccgagccaccgtgaggaccgcccacctgcagggggcgcgccgggggctgcagcgcgagaccgctctggcccagcggggactccgactacccctgtctggcccctcccctccgcccgtcaccgcctccttgaagctgccgctgtcgctgctgctcgttcgagtcgcaggtacttggcccggggcctgtgggcagcgcctgggctagagccacttgatatctcctgcaccgtccctgtagcactggaggtccagtaggcctggccggggccctgaggggcgagggtgcccgggcttcccacaccttccgcggcgactggagggagccgggccgaggaagcgaccgcgggtccgtgatggcttcttcgcggtctgtgtgttcacgagggccgggcagaggcctgcgagggttctcgtttgcgcttgcgggttagggctgtggtccggggaacccctgggcagcgcgggcagccctggctcgcggttaatcggggggtggagcgcggaagccacgccgcaggtccagctgctcggccggggcgagacggtgctttcgcggcgtgtgcttgcaggagcgcacagttcaggcgccgggacaagctgttggggtgtgagtgagctctccagaatggcacatggctccggggtgcccgggttaaaaggaaggatttgcacaccttccacttagggctcgggtaatcgcaaacttcctcccttaattggcttgcagtgctaaaaagcagatcgttctctctgaggttttcccaacagtacctcaagaaaataacatctgttttttgtaacgttccacggtattcggaattggctacagaacataataaggtaaaaatatgccattgaatagtagcgcttctcaatctttaaaaaatgacggtggtacctaggagcctcttaaagagctgtaatatgagtggtgtggggattatttttatgttctagtaatagctattttcagtgcttattttatgtcagacacggtgccattgctttaaatacctggtacctttaatccttgaagcaaccctatcaggtaccatttccattatacagataaggaaactgaggcaccgagagtctgacttctccaaggtcagaaagctagcaaaggctgagcgagatttggtctcatctcccttacttcagtatccctgcgtctgttatctagccaaacatgtagcgctgtctaagagttttatcaattagatttgtagcctgaactgatttctctcaggcttagttttcatggttatatgcaggagtcctacatgaactcctttttagtttaaaaggagtttagtaagaaaactgttagctcattaaggactatagtgataataaagttaaacttggactggggttctcactgtgccagtacaatttgatttgaaatagagatgaatttgtttggttgttaacacactttattacatttcttcattatttatgtttccataccattttttagtgagttcactttgcctttgcattattatggtagcagtaccagagggaaatcaaagattttttgatgatagtaagttaatattttacagaatacaggaaaggcactggagagaggatgtgaagtgataaggaatttttggcatgttatataaattgtgttactatggaaaacaaaggattctcacagttctttatcaaaagggaaattgtatttcccattgtggaaataagttgggctttatagtcccaaacttcttagccttacctattayagatttaagaatttgcatattcggcattcatatagcaagcgtatattgagtgccttctatggccaggctctgttctaagcactgggggatgtgagagtgaacaaaatgaagtccttgtcttccaggagctaacatgtcactggaggaaggtggggttggggacgataagcgggatttgtgaaagttaacgtatctggagtcagatggtaacagttactaggaataaaaataaagtagcaaagggggataggaagcaccaaggaaggaacaggtgcagttttaaaataaggactggtgccatggaaaagactcaagcaaaactgaaggcgttggggaccgccatgcagctgtctagggaaagagcataccaagcaagggcaaaagcccagaacccttcagtcttgttagagggacagcaagagaggaacagcaaggaggccagtagatttgagcacctggagggaaggagggtgagacaaggtcagagagctaatgggcccaggtaaggacttttgcttttactctgagtgagaagggaggtgtttggagggttttgagcagaggaatgaggggatctggcttaaggtttttaaaggatcactctggctgctgtgttcagtgttgactgtaagggcaaggatggaagcagggagacctgttaggttgatgcagtaattgaagccagagagaatggtggcttagaccaggtgggtagtaagagaggcagtaagaagccgtcgtattctgagtattgctgataggatttgcttatggtttggatgtgcttatgagagaaagggtgaagcacgaccctgtggcctttggcctgagctattggaaggctttagttaaacagtgtactgagatggagaagactgagtgtgaaggtaggtggagccagttttagtcaggtttgagatgcctgttcaagtggggttatagagacgggagttgaagagaaaggtccaactggaaatagaaatttgggaagtcactaatgcaagcttgtgcaacccaaatttgtaaacttacttaaaacattatgagattgattgtatttttttttaagctcatcagctatcgttatatgtgtgccccaagacagttattccactgtggcccaggaaagccaaaagattggctacccctgcacagaagggtagtatttaaagccatgagcctatgagatctagtgtaaggaaatgagaattgagctctagggctttccacattcagatattggagagatgaataattacaaaggagaggcttttgaaggtaggaggaaaaagaagcgagtatggagtactgaaggccaagtaaagagtttttcagggagaaagtgaccaactgtgtctcctcctgctgattgacaagtcaagtaagatgaagactaggagatgaccattggatttagtaataggaaggtccttggtgaccttgcaagagcactttcaggagaatagtgaggaagaaaacctgattggtgtggtttcaagagacaacaggaggaagagcattggagactgcagtatggacagctctttggaagaggttagctgtaaatttttcatatgtcggttatttgaaagcactgtagtcgttcccatagtaaatttttatttccagcttaagctactgattaatacctactacacttggattgttttaatcaatgactggtggaaataaaatagctatcctactgctgatcataataataatgtatacttaactttctaaaccaataaagcgtgtcctttttacgtagtacatttcagagcccataaaaatgcttgggtgggctgggcgaagtggctcatgcctgtaatcccaacactttgggaggccgagactggaggatctgttgagctcaggagttcaagaccagcctggacaacatagggagagctcatctctacaaaaaactttaaaattagttgggcgtgctagcacacacctgtggtcccagctacttggaaggctgaggtggaagcatctcatgggcctgggagattgaggcttcagtgagccatgattgagccactgcatagtttcaaatgtagtaggtgtataaaaagaatgcaatttttatcttaaggcatgagttcaggttcttgtttctgccctcagcaagttaatgtccaaacccaaatacaaaataatcaaggtacgcagtaaaataccagatttacaccatcctgactggataaatgtgccttttccatagcaaatacagccatctgttgcattgtagatgtaaaatgattaaaatatttcaaagtttagggttatagctactgattttttaaatccaataattttatctaaaagataacaggtcctttagatgtggaaatcttttttttttttttttttttttttttttttttttttttttagctgaggaaaatattaagttggtgccttttgttttgctcttgtttttttctccaggaatttttcattggttggctctcctttcttgttctcattgctgtcatctcacacatcctttctaacttttttcttttgcatagcttcttaagttaggcccttccatcactgatttccttactgcttataatttggattttaaatttctattgtgtttttatttaacttatagtctttttttttttagtcccagtcctctttaatactgttttttcccccaccctgagttcttaattttttgtatgtccctgagagcacagtatttttctggatttttttcattttcttattgtaagtaattctcagtggtgtgcttttcttcatgtagatctagtgcacctctttgcttctggtgtagaattttttcactgactccatgttgactttcttttggttttttttttatcctttaaaaatgaaagaacttctgagactataatattgaatttgtcatactagtaccattctactgaaggttttttctagatttcctataaggaaaataattagagaactgggttttgtctaggcattctataaaagacactattgtgatgtttgtaaaagatttctatttaaaataactttcagtactattagaacttaagtttatggttatgtctctgtgataagtactttttttttttttttggagatggagtctcactctatcacccaggctggagtgcagtggcacaatcttggctcactgcatcaaacgattctcctgcctcagcctcctgagtagctgggaccacaggcacacaccaccacacacagctaatttttgtatttttagtggagatggggtttcatcatgttggccaggctggtctctaactcctgacctcaagtgatccacctcagcctctcaaactgctgagattacaggcatgagccactgcacctggctaagtactttttttttccttgtgtttttttgagacagggttttgctctgttgctcaggctggagtgcagtggcacaatcatggctgaatgcaccctccacctcccaggctcgagtgatcctcctgcctcagccttgaatatctgggacaacaggcacgcacgcaccaccatgcaaggtttatttttaaattttttttgtagagatggggtttcacactrtgttgcccaggctggtctggaatccttaggctcaagtgatcctcttgctccagattccctaaagtgctgggactataggtgtgagtcactgcacccagccaagtactttttaaaattaaactggtaaacagacattagaattaccaatgtaaactttatatctaaaaccaaaatcaattacaaaggatcattattttccaaagtagatacttttttttagtgctgttcagtttttctgaagcttatctttgttcacaaggattgttagcacttccaccaaatcagtgtttagaaaccttaaataatttaacgtctgacttgccagtacattattagagaaacaattccaagaccaaaacatgttgaataagcaggagatatacaccaatttgattttaaaatggacagctttcctgtctctggctctctctcatgttgccttaaacacacatatgctgaagaaatcatatacagatacttgcatgcatttaataaactatccaataagtggtgcttttaataaattctgaatacaatcaattaaaagatttgtgcacattattatttaggtatggtaccaagtaaatcagaaacaaatgcaagagcacgaatggtttatttagctacctttccatattgggtcttgatgacattagatactctgctgtattttattttttaaagtaaacatattaaaactagccaaataacctatattttcttttattacattatgatgccttttttggtttgcctgagtttttttggtttttgtttgtttgtttttgagatggagttttgctctgtctcccaggctggagtgcagtggtgcaacctcagctcactgtagcttccgcctcctgggttgaagcgattctcctgtctcagcctcccaagtagctgcgactacaggtacatgccatcacacccagctaatttttgtatttttagtggagacggggtttcactatattggccaggctggtctcaaactcctgacctcaagtgatctgctgtggcctcccaaagtgctaggattacaggcatgagccaccacacccagcctrcgtaagtttaattaaaaaaacaaaaatattctgagtgtgactttgttgaaacagtttatataggcattttaactttggtggcagttttagtcctactatcagtcatcttttttccagtagcccagcattgctgctacgttaatttaaatctgcccctctgccctctcctcagtcttttggctgtattttgcccattggctgttaatgctgattttttttaaacacaacaaaaactgtggattgcttataaaagttttcccacaataggcttatttttatttcacttgtttattcagaatatcctttcaacttgtttttcggttatctccttggtcagttctagaatttaccaagctctcagtcagtgttcaatctcctgtgctgaacatgagatttcttaggcctggattcagctccttctcaaagagagttaaatatcagtgcacttcaccctttgacctttgtcttttgctgaaacatgtgccacaaaccatatttttttcctttttaggaagcaatgacagaagcatataagagtggaaatcaaatagtaatgaccacttcagattctgtgtcatttagatattttgttctaagtaacagaaaacctaatttaaactgtcttaaaaagatcctttattgatacccgtaataggaaaagcccaaggcttgacccttttatctgttctgcctcactctgtatacttgctatctatgaaatataaaaatgacaaaagcaattttaggtatctcatttatacaccatagaaaaataaagtgaatgtatttctctggcattccaagcaaagagttttattggactggtcacttgctcacctttaaataaaccacaatagctagggaatgtgatatgttacatggccttagataataaagactgacccctccaaagcatatgagcagtgaagagtagtggagttgggtaccagtggaacaggtaggaatggagtctaggtagacaggggacatctgaggaaattaaaaacacatagttgattttcagtcaaaataatatattaaattcatgtttgggcacctggcaataactgatgttaaaaaaaaaaaagcgccaaagtatagtcagaatagtaaataggataaccatctctatagagtacaagcacaaagtaatgagtgaggctgtagctgttttggaattggccaaaatggaaatcatccaatatctgatctcagacgaaaaggaattaaattacaatttgataacagaaagatagccggaaaatcactgaatacttagacattaaataacacatttctttttttttttttttttttttaagacagagtctcactctgtcacccaggctggagtgcagtggcgcgatcttrgctcactgcaacctccacctcccaggttcaagctattctcctgcctcagcctcccgagtacctgggactacaggtgcacaccaccacacctggctaatttttgtatttttagtagagacggggtttcaccatgttggccaggctggtctygaactcctgacctcaggtgatccgcccaccttggcctcccaaagtgctgggattataggtgtgagccacagcacccagcccaaaatgttttcaaaagacatatatgatgaagactgttatccaaaatacacaaagaactcttaaaactcaacaaaaagagaggtgggtatgggtgctggctgaggtcactcagtgctgaccatcctcttctcaaagccatgtctctaagacatcatggtgaaggtgaaggccagagtaaatagatttgggccatattgggcacctggtcaccagggctgcttttaactctagtaaagtggatattgtcaccatcaatgacccttcattgacctcaactacatggtctrcatgttccagtatttctacccatgrcaaattccaccacaccgtcaaggctgagaatgggaagcttgtcatcaatggaaatcccatcaccatcttccaggagcaagatcctaccaaaatcaaatgggrtgatgctgaagctgagtatgccgtggagtccactggcatcttcatgaccatagagaaggctggggctcacttaatgggggagccaaaagggtcatcatctctaccccctctgctgatgcccccatattcataatgggcatgatccctgagaagtctgaaaacagcctcaagatcatcagcaatgccttctgtaccaccaactgcttaatcccccggccaagcccatccatgacaactttggcattgtggaaggacttgtgaccacaatccatgctgccactcctgcccagaagactcgatggcctctgtgggaaactgtggcatatgtctgtggggctctccagaacatcatccctgcmtctactggtgttgccaaggctgtgggcaaggccatccccgagctgaacaggaagctcactagcatggccttccgtgtccttctgcaaacgtgttggttgtggacctgacctgccatctggagaaacctgccaaatatgatgacatcaaaaaggtggtgaagcaggcgtcagagggcccctcaagggcatcttgggstacactgaacaccaggttgtttcctctgactttaacagtgacactcactcttccactttcgatgctggggctgccattgccctcagtgaccactttgtcaagctcatttcctcgtacaacagtgaatttggctacagcaacagggtggtggcccatatggcctccaaggagtaagactgctcgacarccagccccagtgagagcacaagaggaagaaagagaccttcagcttctgggcagtccctgccatgctcagtcccccaccacactgggaatctcccctcttcacagtttccatgcagaccccacaaagagctctatcttgtcgtgtaccatcaataaagtcctctgtactcaaaaaaaaaaaaaaagatagaaaatgaacaacctgattttaaaaatgagccaaagatcttaatggacacctcatcacagaggatatacagatggcaaataaacatatgaaaaagatgctccacgtcatatgtcatcagggaaatgcaaattaaaacaatgagatcccactacacacttactaaaatggctaactaaaatctagaacgctgacaacaccaaatgctggtgagaatgtggattaacaggaactcttattcattgctagtgggaatgccaaatggtacagctactttgggagacaatttggtggtttcttaaaaaaactaaacatactcttaccatccagcaatcatgctccttggtatttacccaaaggagtgaaaaactgtccacacaaaaacctgcatgtgggtgttcatgtcagccttattcataattgccagaacatggaagcaaccaagatgtccttcagtaggtgaacagataaactgtaatacatacagagaatgacatattatgcagtcctaaagagaaactatgaagccatgagaagatacagaaaacacgtattaygagrgaaagaagccaatctgaaacagctgcataccgtatgatttcagttatatgacattctggaaaaggcaaaattatagagacaataaaaatatcaggggttgggtagagagagggatgaataggcagagcccagaaaatttttagggcagtgaacctaatctgcctgatgctrtaatgatgaatacatgtcattgtaaatttgtctaaacccatagaatgtataacaccaagagtgaaccctaatgcaaactatggactctgggtgataatgatgtgttagtgtaggatcatcagttataacagaggtaccctctggtggtggcagggtgggggaatatgggaaatctgctcagtgttgctgtgaacctaaaactggtctaaaaaataaagaccgttttaaaaaagataaagtaataaaaaatatgctcacagctcagttgtgatactagtaatgcaatttttatgcaaaattatgcttttgaagaaatcagaattctcaattttttggtgattatttaaattttcctcatttttatatggtttcttttaaaatgtttcacttttttccctratttatattagaatggcaatgtatgcttaacacttgtatttttataagtttatgagtttttaatgttctgaaatgttattttttacttcaaatgtgttgaacatttaacttgttaaaacattccaggctgggcacagtggctcacgcctgtagtcctagcactttgggaggctaaggcaggaggatcacttgagcccaggagtttgaggccagcctgggcaacatagtgagaccccatatgttttaaaaaaaattctgaactaaaaaaaaaaaaacagcattaatgctagtattccatattatataaaataagtgtgaaatacccaaattacttttttttttcatttctgggtaaatctttaaaatttttttaattaaaaaaatttcttatttctaaaaatctttgtggatacataataggtgtatatcatattgcatttctatctaatatgtacctgcttatgggaggagtcaacaaatgtttattatttctaaatattcctatttctcagacattaaaagatgttcaagaagtagtcatatgaacrtgatttgatttctttttaaatgtaatatcagttttattggtaccccatttttgctatacatttttagtttagttatattttttgtccaccttcagtgaatgccttcattttcattgtcattacttaagcatttatactgacttccagactccactgaaagacttgtttgaatgcatactttacgtttggaccatccattcacttaacagaaaagatacaggttgagcacttagtgtgtaataggtaatgcgaaatactgtggatagtgtggaacaagacaactcatgccctcaaagtttactttcaaactgaggagatgtacaatacatgattaagcacataaataagaaaattatagattataataagaacacgaacaaaataagcagggtgatgtgaaaagtaatgtggggagaagtaggtgacatttgagctgagacctgagtgattctccatccagggaagtacattccagcaggaagaaaagtaagtgcacctctgaggcaggaaggaggcaagtcaggggtagagtatagagaacaagaagggggaatggttaaagatgaatttggagaggtaggcaggaacaaaattatcagggctttgtagcctgataatttatcctttattaaggattttggctgttgttttaaatacattgggctgccattgacatatttcaggtaagggaatgaaaggaaatggtttgtgtttttggaagattttttttttttctgtattgagaacggattgtagagaggcagaagtggaaatggagattagctaaggtagaaggccatgcttgggccatgggagctactaaaaatacttttagcttggaagtgatattcacaaagcatgggatgaaaaaatgtacatgatagcttaatgagattgactggggtagagggtgacagaagagagaatgagactgagagaccagttaggaagacattggaaaacttcatgtataaaattgttcgttagggcacaaattaagagtgaaagcagtgtcaataaaatggaaaaagaatttgcaagacaatgaaagacagaactgacaggcctttgtgtctgattcactgtcaggagaaaagaaagcatcaaggatttgaagccagggtttctagggagatattgttaccattggcagagaattttggagcagtgtctggagtatatgtatggagtgctggttttgttttattttattctatttttttgagacaaggtcttactctgttgcccaggctggagtgctgtggcatgatcacagctcactgcagcctcaagctcccaggctcaagccatttgaattagtctgttttcacgctgctctaaagaatttataaacaaaagaagttcagttgactcacagttcctcatggctggggaggcctcgggaaacttagaatccctgtggaaggtgaaaggtaagcaaggcacatcttacatgacaacaggaggaagagaaaatgcaggggaaactgccactattaaaaccatcagatctcatgagaactccttcagtatcatgaaaacagcatggggaaaaccgcccccatgatccagtcacctcccaccaggtccctcccttgacatgcgggaattacaatttgggatgagatttgggtggggacatagagccaaaccatatagttctgctcctggcccctcccaaatctcatgtccttttcacatttcaaaaccaatcatgccttcccaacagtcccccaaagtcttaactcattccagtattaacctaaagtccaagtccaaagtctcatctgagacaaggcaagtctcttccacctatgagtctgtaaaatcaaaagcaagttagttacttccaagatacaatgagggcacaggcattgggtaaatgctcccattccaaatgggagaaattggccaaaacaaaggggcctcaggcctcatgcaagtctgaaacccagccaggcagtcattgaatcttaaactccaaaatctcctttaactccatgtctcacatccagggtatgctgatgcaaggggtgtgctcccacggccttgagcagctttgtccctgtggctgctttcatgggctggcattaaatgcttgtggcttttccagatgcatggtgcaagctgtcagtggatctacttttctggggtctggaggacagtggcccttttctcatagctccactaggcagcactccagtggggactctgtgtgggggctccaaccctacatttcccttccacactgccccagcagaggttctccataagggctctgcccctgtagcagacttctgtctggacatccaggaatttccatatgtcctttgaaatctaggcagaggttcccaaagctcaactcctgtcttctgcacacctacaggcccaacaccacatggaagctgccaaggcttggggcccgcaccctctgaagcaatggtctgagctgtagtctggccccttttagccatggctggagccggagtggctgggacactggacaccatatcctgaggctgcagagagcagcaggggcctgatcccagcccacaaaaccattttttccctcctaggccttgtggcctgtgatgggaggggctgccatgaagatctctgacatgccttggggaaatttttcccattttcttggctattaacattctgttccttgttatttaggcaaatttctgtagcatgcttgagtttctccccagaaaatggggttttcttttctaccagtcaggctgcaaatttccaaacttttatgctctgcttcgcttttaaacagaagttccaattgcagattatctcttcgtgaacacatttgttcactttgagaaaaatcaaggccacatctttaatgctttgctgcttagaaatttcttctgccagataccctaaatcatctctctcaagttcaaagttccgcagatctctaggtcaggggcaaaatgccaccagtctttttgctaaagcatagcatgagtgacctttactccagttcccaaaaagtccctcatctctttctgagaccacctcagccttgatttcattgtccatatcactatcagcattttggtcaaaaccattcagcaagkctctaggaagttccagactttcccatatcttctgagccccccaaactgttccaacctttgcctgttacccagttccaaagtcacttccattttttcaggttatttttatagcagtgccctactcctggtactaattctctgtattagtctgttttcacactgctataaagttactacttgaggctgggtaatttataaacaaaaggtttaattgatacacagttccacatggctggggaggcttcaaggaacttagaatcatggtggaaggttatrgggaagcaaggaacatcttacatggyggcaagagagaatgtgtaggggaaacgaccaattttaaaaccgtctgatcttatttatgagccctccctcactatcatgagaacagcatgggggtaaccacccccatgctccattcacctcccaccaggtcccttccttgatatgtggggactacaatttaaaatgagatttgagtgaggacacaaagccaaattaaatcactatcctcccacctcagcctcccgagtagctgggactacaggtgcacgtcaccacacctaacttttatatatgtatattttagagacaaggtctcactrtgttgcccaggcttgtctcgaatgcctgggctcaagcaattctcccacctctgcctccaaaagtgctgggatttcaggcatgagtcagcacacccagcctctggagtgctggttttagatatgatattaaggccatggcaaaatatccatttgggactgttgatctgccctatgtacatactcatgtgccagtgtacaatactgttattatctccttgggcttctctgcttgttcactctgtgaagagcaccagactctatgagttgctcccattgttgcctctgaccccattcaaggcagaaatccttttacttgttaccaagatgtggaataagaaactaagaaaaaatatatagcatcttatatttgtatatttcattatagttttcaaagttctgtacaaaaatattgtgaagtaggtaagacagatattatctcagttttgcaaatgaggaaactgggactcttagagttggactactcaagatagtgccttagaaaatggccgagttaggacctaagatacaaacgttttgattggtgtctagtacttagtgcttatcctgaaaaataattcttgataaattcacagatcatggatctcttgattcaagtctggaagtctgccttcrctatttatcacttaagatcacttgattgtttttccttgcttcagccttgtctagagtacgagcaagttgtactttggggttagcagaatcctgacactgagatttgatccaatgctcacttctttctagatgttgattatagtcttttctccaattgctargcccctccccaactttargcttatgttctttgtccttgcttctttatgtccgggtcccatggatgagtaaggtattttctttcctggtggaagtggaagtgatctgctttgagccttagaaggaaccagaagctgactgaagagagttagggatggttgtatgggcagatttcttgctgcttggggtagccaaaaggagggtgagggagagattgagagaataaatgagaaatatttcctaaagtgtaaggcaatataaaaggtagttgtaggtcaagatctgggcagtggagttaagttctaagtgtgcaaagtccaactaagtgatggaagtgatgtggacataaaggtctttgacattaagaactcttgggttaatctttaaatgatttcaattacactcctgaaaccatccaataaaatataattaaaaagaaaaatttgggccagagagacatggtatgaaaggacactatttgaataaaaatatttagatgtatttggaatagatttattttgatagtatcactgaagaagacatgcagatatattagtggtaaatttaatagctaccataaacctgaaagtttgcctttaatttgtttttgtgtgtcttttcttatacttctctacagtttaagatataacatttcatattatagttcatttccccaaatccaaagctcgtcaatcctgagagtgtaatttatttatttaaaaacaagaaacttactctcctattgtttgaagactgtgaagccattatcttctgacagcattttaaagaataatttttaaatcataattatctttgtttaacactgtagttctcttgagtacaaggacgaaagtttagcagttgttcaaacttttaaaaacaagttcttaacagttttatattgtgtcctgctcctatctacaagtcatttagaaaattgttttttgatataaagaaatttaccattttattcccagtttccttagtatttgttatagaacaaatcgcaaaatattaaatggttttgagattgagaataagaattaaaacgaaaataaggtttgtatcaacagttgctaacactgggaatcagttttaattgacagtgtctaaacaaacaaagcctgtttattaaagacatttcctggaaagcagcaaatctggaagagctatgtagctattaaaacttaagatccatagtctttgacaattctttcccatgttagtcacaatgggcaggtgtctggtctctgggcagtttgcaaaaatagctccatgggaaactgatataggaacttgtcatcttcttttcccgtktctgaaagattctccagaatgctctgagtacacacatgtaaactgagctaactcacagattaccattttaataggagaggctgtgtgtagaggccagggctcagtcagaaagagaattgctgtaattcgctgtcttatgcttgaaattactctgctgaaggagttatcaggactggtgattgagctctgctttagaatatcggtgtcttccacttcttgccccaccccttcctaattggcagcatgaggaaagcactagccaaaagttacaacttctgcctataatcctttatttatttctatcctcatgaactaggctagaaaacctgggggcagggaatctgtttttcttttgtgaacctggagccatttctaagcatgtacttcctactctcaaaaaagactccttcccaaaataggttacccctagtccagagcagggacagcaggaaaagagccacagattccctttaaagccacagacactcctcaactcccttagatataagactatttattccctttctaccaagggtctcagcattaaatcaacatttccagtggygagagaagaaatacatctaataccccacatatgagtcattctgccgtttctcagtcgtttcatgtctgttctacaaacatgccattttaaaaatacagtttgactaaggcatctccttagtctgctgtccagttgtcttatgttgtatatccttatttatgagggcccctggaggtcagagtgagtgaggtaggatgtgagtgtaataaggatacgtaaagaattctgaattttaaggttttacctaggccataaatgtacaaatggtaaatgtagactagagtgatttgcatagcttcacacacagcagaccccaccttaaagaagtccactagatcctccagggttttatagtgtagggaggagggcccttgtccacccactgtcattatgtatgttttgtgtgaaggatgcagtacatccttctgagaaatgcaccattagattatttcattgtttgtgtacaaagtgtacttactacccaaacctagatacaagagcctactgcacacccaggccatatggtatggcctgttgttcctaggctacaaccctatacagcatgttactgtgctgaatactgtaggcagttttaatactgtggcaaatatttgtgtatctaaacatagaaaagttatagtaagaatattctaatcttatgggaccaccttcatatatgcagtccgtcgttgaccaaaatgtcattatgcagtgtatgactgcattttgtatttcgacagtgaatcatgaataggactagaacgtgtggggatgagcggtagcatgtaaagtaacaaagttacagcctttctggtctcagtgtccttatttgtaaaataatgagattgagttaaatgatgttggatggccttccagctctaagaattttatggaaatagtcatgtatagcatgggcatgtagtaggctatatcctctaggcttgtgtaggcacctgaggacactctgtgttgttcacataacagtgaaagcaccagacgatgcagttctcagaacataccccatcattaagcgacacgtgactactacagttaagcttcttctaaggatacaatctcataccttcaaacttacttagggtgaagtctggtttaaattttgtagactatttagaaaataaggaatattttgcaaaactcacaattcttatattttgaaacaacacaataaatgaataagttagaatgccatttaagtagcactttatataaagtctgctaaggtgggtttaatgaggtttagatttctgaataggcctggaatcatatttttgctattaattttcttgaaaagtttttttaaaaggaaaattgaacttcatcccaattttggattttcacaaattcacagttagtgagaattatggtaaataacttgaaatggaacagagaaacttcggaggtacagacttctcaccttatgccatactagatgctgaagttgaacttgaagcctatgcaggccacaaggtggcacccttaggccatataaataaagtgctgttgcaactagaaaaaaacagttttaaagaatcaagtaactttattatgtaatgatagactataaactggaaacctcctgaggaggaagtcccttgctaagaattttaaacatggtaaaattacatagtaaagattttggaaaatactaagatattagaatgtgaaatagaatatccaaaataaccagcattccttttgtgaacaattaattttgatttgtcttaagccaataccttttctaaaagttgaattgtaactaaactttaataatgcaaacaaataatagttaagcaatataaatattgccagaaatatatcagaaatcgttgttggtgttttttgatttcctgatggagaaagaaaaatttaggtgttttcttgttatcccaatcagtaggaagtacttgagaatgatgagtctaagaatttagtcacctgtgaagtagaagacttttccaaaaatattttattgttattttcccatactttaaaaacttatttttatgagatgattaaaaacagttaatttggcttatgtgtgctagaatattttctgtgaagtaaaagacatttccaggtattgtttctacagtttaagaagacgttcactttgaatgaaatgattgtaaagagttatatggaatgtgtatgctagactaatgttctcccktatgtttgatgaagacatttgctaagctaattcattaaacaaaaaatcttatgaaacaaacttagtgactttttttttttttactcatgaaatgagtatagtgatagtatgcatgtaccttgtagggtttctatgaggattaaatgagttattataggaaaaacacttagaactgtgcctgcagtataacttaataaatgtagaatactgtgtatctcaaatgttgccaagcaattatttgcatagtaataccagacataacaaacaggaaattcttttttctcttttcattaagcttaattccagaagaacatctactaagtaatatctgattaacagarttttaattattatatgaacttaactcagtgaactggccttttttgttttttgtacagacagggtcttgcattgttgcccaggctagtctcgaactccggggctcaagcaatcctcccaccttggcctcccaaagtgctgggattataggtatgagccactgcacctggctagtggcctgtctttaagtattattgtgtaattcacatacttcaaattaacctcatttttatgcattaatagttttaattatgaagttactaatagctttgtattgaagacatcaaaaagttaagaattttagacacagccacattagactgaaatgttggaaataccacaaaatgtgtgttttctacaaagttggatataaaataaaaatgtatgtctgtggtagagctacatctgcctaaaaattgctccaaaaatttgctaaaaatttgaacttctgttattattgagccttggaaataaaattcagaagattctgcttataaactccttctttccaatgttcttcatagtactgggatatcctaaaaggatagtgttcttagttcctccttttatttacttcccacagaaagagagcaactcttttccttttttaaagaatccaaataaatattcacatattttatctttatttaggacagatcactaaaaggttaaaaattgggccctagccatatgatcagtgagaaattacttcctaggcccttctaatacaattttccaaaaaatagagaaataaggaacttaagtccatcctagtttaggatgaaccataaaccagaatcttagaagttttgcagtgagcaaagaaagcattgcatcaagattgacgtcacagtaaaactattcaccggtcagagactggttccacagccatacattagacagctttcatctgcatcacaaaattctttttacattttggttagccaaaaacatcattgaatctatgtgataggaaaaatacaggacaaattcttttttaatgtgctaaggaattcagtaaaattatggyacatacatagaatacagtcatcccttagtatccagtttcttttaacagcatctgacaagaaaattgtctctctgtggtactctcctaagagcagtgtgcctttcaggggagtcagactatcacatatctctccccgctacttttcccacctctccaagcaggcttcattatgtttacctaggtttcacatccattcacaggggcacagactcagtcctcagtgaatcttgaaagattactggttcattattcacactttttattagtgcctgtaattctgtttgaagagggatgggtttctcttcccttagtatcctcttcaaacccctgtttgaagagggatggtttcaggacctcatgcagataccagaattcacagatgctcaagtccctggtacagaatgatatggtatttgcatataacctatgcacatctttccatatactttaaataatctctaggttacttataatacctaatacaatgtaaatgctatggaagtagttgttacactgtgttgtttagggaataatgacaagaaagaaagtctgtacatacgtgttcagtatagatgcaatttttttccccaaatatttttgattcatggttggttgaatcattaatttgattcatggttgattgtgtgcagcttttagtttctttttttttcatatttatttcctaaaaatttttacaatgcactgcagaactagtcataagaaaaaatattactttaaaatcttgtgacaatgaacttaatcgagtgtacattcaggaaagaattattggatttccctatgtctagacttcaagaaacttaatgtgccaggcattgcagtcagccagtatatatagacaaatcagacccatttcttggcttctagaaacatattctggcaggaattttaggacagttgtgaacaagcaacaaagttttacatgaactgttttctcctggttatcttgacaacttacagcagctgcagggcatattggaaatatataagctaaatatgaagccccaccctgccacttaaagcagtatggccctagactcaatgtctgtgggccttgggaattaagatcactctattagagaaagagttgctgtttaaatagctgctgaagataagcagactgaagaaatatattgttaatgttttgggaaggattttaaattgttaaaattcttacttgctcacagctaaatttcttttcaacatggcatttttccttgcccagtatctttggatttttgcagagctcaggttttaagaacagtaattttaaagtactagcagttaggatttaatgacttcattggaaatttttgttttatagttctctgagattatattttgaaacagctgtatcctcttaaaaggataagaataagcaagtgatagaatctagatttgggggtttcatttactgtgtatcattcatttttacagttttagtacttttctttgacattagaaaatggcaaaggcaataagatctgacagaatatctttccagctatgtcgttttttccttgcattttgttgaaatgtctggtgctttgatctctgaccaaaattgcttgtgtaggcataatgtagtcagtccatttgaagcaagaatgtggtacttagtcttccctttccaaatggcctttcaaaatgaaaaatccatctattatgtattcttgttgatattggatatagaacaatttttagttataagtatatatattctctccattagtccttaaccattaagaatactattatatcttaaagttttacagattgacctaagattgtggatccaaaatttgagatataaaagaaaattaggcatgacttttcatcaagtcagtgaatcacaagcttccatcaaaacctttttattgttgtttgggttgagacaatcacgctggttgrcataagaagctcttgttgccgcgatctaagtgactgcgtcatgtgaaaggataaatgactccatcttcaagtctctcaggcagtgccacagagcayagagtgaggagttttaagtgtcaggctacaccagccctcaaaaacctgacccccaaagttctgcttttaacaatgccagctagtctgcctctgaaccagtcagtggacactgttcctcatggacactgttccttgggaaccagggcmctggtcagcaaccagcatgctttctggggcgtggttattcccatattgactgttcttgcactagactatgtggtttttcctctgccaggaaccagttcttttatttttctttcctggaggtctttactgccaactagatgtcaccccattatcagaagctgctctgttaccaggggatcagtgctgtatgcaagctttcttccgtatggctgaggactgtctccccagagctgtgtctagcctgaaaaggataatagcttatttttgagtgctaagtcatacagctagtaagtagctgagctggggttcaaacccaggcagtccagctccatatacattctgggtggagtaatcaagtttttttaacagcatctgacaagaaaattgtctctctatggtacactcctaagagtagtgcctttcaggagagtcagactatcacatatctctccccgctacttttcccacctctccaagcaggcttcattatgtttacttargtttcacatccattcacaggggcacagactcagtcctcagtgaatcttgaaagattactggttcattattcacacttttattagtgcctgtaattctgtttgaagaatggttcttattaaacactccctttggtaaatgccagtacatccacctgtgcccttgcaaatgcttggtcctacaggttcttccataaataacctgacaccgagacacatgactccaaagatgaccttacattcttcttgaatgggggaaatagacatcttcatgctcaacagtcttttagtcacaatcttcaggtcttcatacgactcactagttgytctcctgaccatttatcctagagaaatgaagatttacagtcacatacaaacaaatgtttgtagaagctttaacaatggccaaaaactggagacaccagatgtccttcagtagatgaactgttatattgtggtacacccatgccacggaatactactatggataaaaaagggacaaactatggatacacacagctaccctggatgaatctccagagaattatactgagtgaaaagaccaatcccaaaaggttcctgtatgtgctgtatggctccatttatacaacattcttgaaatgacagaattaaagaagtggaagactaggtagtgttttctaggtgttaaggagagactggcatgggagggaagcaggaatagctaaaaagggcaacatatgagagatttttcatggtgatggaaatgttctgtatcttgactatatcaatgtcagtatcctggttgtgatgttgtactatagtttggcaagatgttaccattgggggaaactggataaagggtgcacaggatcactctgtgttatttcttacaactgcatatgaatttataattatctcaaaaagtttaatttaaaaaagtctttagtcctcttcacccattggacaatcgttaaatatgtgctctgatttgtattcactttatgacttcttagggaagctattaacagagtctagtgagtaaggtctaactgaggtcttggaagttttcttggcaggtttctagtaatttagtctaatgaatttgtataatattattatgaaatcatacaaatctgtaatttgttcaagtgtattttcttatgggccattgtaatatccaaagaaaatggcaggctggttgcggtggctcacgcctgtaatcccagcactttgggaggccaaggtgggtggatcacctgaggtcaggagttcaagacctgcctagccaacatggtgaaacctcatctccactaaaaatacaaaaattacccaggcatggtggcacatggctgtagtcccagctactggggaggctgaggcaggataattgcttgaacgcggaggcctctgcaggtgagtcgagattgcaccactgcactccggcaccagcracagagtgagactctgtctcaaaaataaaaaaagaaaaaattgcagaagcattgtccttcttgtggatttaagagaacattaggattatttgggggcatgaccatatgaactataattccatctctagatgaaaaacaaaattttttctttttccmtaatgtgagctctaccacatccagaataacccacttgcaccattttaattaacattgaaaattaaagccaaatcatacattagagacaggctctagtcgttaaagactcagctctagaggtcaggacaagagaggaaaaatattaggctttgggtgaatacataatatttgtttaaggaaatcaaggtaagtggctccgtgatatgaagttcgtctaaattgatactgtggtatcacaaaagaagtaggaaatgaggagcgtagatgttttgtgtgttatcatgtcttcgtgatatttactgaccctcgtgtgggactggtcctcaggtacagtttgtcagctattgtcatcagttccagcctagcactgatagcctttatgatacaacctgacttacatattgtaaatggagctttgtaaaataccattaattatttccctatataaatttgttcacagggatttgataacaatgaacaaggatgatcggtaaaaagttaacctgtatttcaccctgaccaggaatttgggatttggacttgatagcatggtatctggcacattgcaggcacacagtgaatgtttgtttcatgaactaatattgctatttttgtggtccttactgcctgcccatgaccctgcttccacggtccttccagagaagagctgagtgggcagacagggtgccctcgtagtctctctcagtgcagagaagtgcagcctgggtgggggagcagcgtcaggctatgtaaagaagactacagatagacttgggccagcttttatttcacactgaaaagacaaggaagggaacagatttaaagagatttaagtaccagcattcaaggtagattagaaatactttttcttaaatgtatcctgtttggtttaaatataagtattggctttttaaacttattttttcccactatgaatagtattttatttataaaaatgcttttgtggactaatctgggatctagcctccatttataatgtgaaaaatatgcattctgaattccaagtaatgactgagagtgaattttcggagcccaatttgttctttagtgatggcacataatttgattcttattcttttatctttctgtcttgctttcttgtttgtgggccacagagcagcttctattaagcccttctttgcttccttttcactactttgttactcgtcagatatttttctggcctcacaagttgatgcctcacctacagattttctagagaatttcttcaggctcagtaacctgtctgtatttaatagaacagtgagttctttttctcaccacacttctattataacttaattttctatttactgtagatccttgccagcacattacagaatatttttgttgaaccttcttgagaattcagagaaactgctgagtgaccactgaacgaaaagrtctaatcttaaggcttacgtgagtatttactactgtggacttcctcacaagatgtgaaaccttcagtgaactgctttaggacagattcagttctgtgatcaagatgaaaaataactatcattgggcttattaaatgtgggattaagtttagtagttgctcagggacacagagaaactgacaaaatacacacttgttctcacctgaaaaatagacacagagacttgtatttcttgctgagccaacactcagaagtatcctagtctgcaaaccacaagaattcttactgtgtctgaatcaaaaacaccaactagattttttaaattatctatttttaaaaatttaaccaaaacacattaccttttgaaaagcacttgatatgtggcatttcattttgaaaaaggtttatgatagcttttccatttttatgattcaatactgtgcaagcttgtccaacctgcagcccagaacagctttgaatgyagcccaacacaaattcataaacttttaaaaaacattctgagattttttttgcaattttttaaagcttatcagctatcattatgtattttatgtgtagcccaagacaattcttcttccattgtgacccagggaagccgaaatgttggacacccttgctgtaagggaaaatatttagattaccctcgcaaaagaattcttgactattttattgagtaaattcttctcattgagtttttctgtttgttggtttggtttggtttggtttggtttgtttttttgagacaggcctcactttgatgcccaggctggagtgctgtggctcaatcacagctcatcgcaacctcgacctcccgggctcaagtgatcctctcacctcagcgtcccgaacaggtgggacgaaaggcgcgcgccaccatgcctggctaattttaaaatattttatagagacagggtctctcgctatgttgcccaggctagtttcgaactcctgggcttcaagctatcctcccattttggccttccaaagtactgggattacaggtgtgagccactgtgtccagccagatttttaaaaagtcatcatatgtatcataatctgaagtttattttgattttaatctctgtagtttttaatcataaactttttttcgtatttgaaattattcttaacagccccttttcacccttcatttcatatccagtgagtcattaagttgtgctaattctgtcttctctgttcctctccagtgcgtccccttctgcctgccactgccttaggtcaggttttcatttcttgcctagatagctgcaatgacctaatgattgatctccctgcctccagtctttgtctctacaatccagtgcctccatattgccatccaagtcatctttctgaaagactaataagactgtgccatttctttgacttaaaattcttcagtgggctggactcattgaaatagtagtcccagctatttaggaggctgatgtgggaggattgcttgaacccaggagtttgaggctgcagtgagccatgattgtaccaccgcactccagcctgggtgacagagcaagaacctgtctcaatttaaaacaaaaaaaatccttcagtggctcctcactgaaattcaggtataaaaaagcctaactgtggagttgttaggaagattaaattaaattcattaaaagctcctagttggtacctggctcagaacaagtctcagtgtatgttaatgcccactctttccacagagagcccatggtagcagcagagcccttgtgtaaggcagccccagattttgggacaatggctctgctgagaagccaagttgaaaggaataggggcagcaatctcaccaaactcagcagccaggcttccctgaatccccttgaggttaggcacaagaatagatgggtctagcgtccagttccatcagtgtttcagaaagagactttacctgatcagctgtataagccaagtccatatgtgactaagcttttgtaacctaagaataaaaaagccatctctagaaaagcattggtctctgcctttctgttttcttgtttgttttctcgtcaatttcctagcgaagtttcttttgacaggctttaactctttcttaaatgaacctaggggaagagagagagacctagttgtatgcagtttggtagagcaaaatgtcctgagagttcaggtgcaccaggcagatgctgaactctcacctgagttcaggtgcgccagtggggccaggaaacatctgtgaaagagatgtgggcaaactggtgagctggatgagtccaagagatgaaattcacatcagacctagttgggattgctgctttgtcctgacttggtattcccagacagccctacttttttttcccctcatctctcagtctttggacggtgggaatttggcacagtcacatattgagataaccacagagcacagcagaataagatcaatagtggaaaaagcataatctgaattgatttcatgctctgatttttaaattcagtttgttacattccttagcctttctcttaaaatttgtgctataggccaggcgcggtggctcacgcctgtagtcccagcactttttgcaaggccaaggcaggcggatcatgaggtcaggagttcaagaccagcctggccaacatggtgaaaccccgtctctactaaaaatacaaaaaattagctgagcatggtggcagacacctgtaattccagctacttgggaggctgaggcaggagaatcgcttgaactcgggagatggaggttgcagtgagccaagaccgcrccactgcactccagcctgggcaatagagcgagacaccatctcaaaaaaaaaaaaattgtgctataaacataacactctacaggtctttgttgagtataagttcttttcatgcaagtagttttagttaccatgtagaatatctcaaatacaagaagaagcaaatatatcaaagagaattagtttgtattaaataagaatgtctaccagcagtagcatttatatatgggtagttctttgatgtttaaacaccatgttatctatgtgttctgacaatgtaatacttaaatctaagctattatgtcttgcttaactttaaaaatatctcttaatctttttacatggtgaaaagcaaaatagagctttacagtaattgaattggaattttaatccagcagatgtgaagaaaataaaatgttttaatggaaaataaaatacaattgataactttgttgttgtttctgtttggtmatttatttattagaggcaggaggccaaaaaggatgagaaatattgcttttctaaatgactcctttgtcttgatttcatttgtcttcatggaatctcactcacctatttcattacaggcgtgttccatccaccacatcagaacaatgtcgtatgtttttgtaaatgattcttctcagactaacgtgcccttgctgcaagcctgtattgatggggactttaattattccaagcggcttttggaaagtggctttgacccaaatattcgtgacagcaggggcagaacaggccttcaccttgcagcagctcgagggaatgtagacatctgccagttactgcataaattcggtgccgatcttctggccacagattatcaaggaaacacagctcttcacctctgtggccatgtggatactatccaatttttggtttccaatggactcaaaattgatatttggtaagttctctgttgttttagaagtctagtcatttcttcccattaatytctcaactgataatcttatcttgggtctgttggttttgtttcctcattaatcagttgaaataagttcagaaagcattgaagacagtgtaatcctgttaggcaagtgagggaatgaggggctgacttctagatttttgctaaagcagcatatttttttctatgaaaatagtaggtagtttctgctactaattatgtagtgttacaacaagggaagaagaagaaaagaacatttgttgaaaatctatgagctagactgtgtttacttgttagctcatttagtcctcagaatgaagagctctcacaataggtgttttcattttacagattagatagtgaagacaaaaaaggattggacaaagttcacacagtttatagaggatttgaaaaggtcacagcttataagggacagagctggaatttgaacctagttccgctgactctaacgcttgtgtgccttctgtcatgtaacgcaccatgtgagcttcataatctcccgggagtccaggatcctttttagactgaacaatttgaggaagtcatggggctttttgtttgttttagtgatactctgctttttgagtgggaacgatgtcaagtcacctgtaaaactgagcttgacctttaaattacagttacacactgccctaatttattgatgccataatgcccctaaatctgaataagacagtaaatgcttttgtttctgcaggacaaaatggggtaggaattgactgcaggatttaatgtgattggggttctaacctattattagcgctaaatagctgcgtgaaccgaagcagcttatttgacatttttttcttagacttttttaaaaaaagtacttgtctcataaaatgtaaatatcaaataagaatgaatctagaactagatttatccacttttttgactatatgttctcttttttcttttccctggaagtaaaaaaaaaaaaaaaaagaaaaacaagggttaattcaaaattcagctacactggatgtttggctcagctctgggttttacttttgagttaaactggacccatcctttttttccccttggtgatttgttcttcataaacactttctatagtacaattcagaaaaaaatagaggcacacggctattacttctaccataatctgctgttgaggagacattcagtgtgaggatggggtctggaggtgggggacgtgtttggttaacaggataacggcctctgtgatgaactgtgcaaaaatcccatcagtcaacatctgattgcagccagatggtcaaggctcatggtggaagagttgtagtgagccaaatactcctttagttccccacagccctagggtaggccctaattgggcccattctttcttcactgagatctatataagtgggtactaaaaatggaactgacaatgtagtataactgctatgatggcttctttatttttataaactttttttttttttttttttttwagcaatcatcaaggtgctacccctttagttctggcaaagcgcagaggagtaaataaagatgtcatccgattgctggaatctttggaagaacaggaggtgaaaggatttaacagaggaacccactcgaaactggagaccatgcaaacagctgagagtgaaaggtactggagatacaactttttttttctcactgtattactcattccttgaactcctgggctcaagcattcttcctgcctcagcctcctgactagctgggactataggcacatgtagccacacccagcaagataatacgattttttaaggggaaagtcactttaagtatgtggatttatggttaactttgtgaactttaatattcatttgcttttaagtgcaacttgaactttatataggaccttatgactgcagattacaattgagaagctattaacagaaagtactacatgtcatgtgcrcataatgttctgwtagccacctgctgtattgacagtacaaaggagaaatagtaacaaatgaatctgaggggaggaagccggagcttgatgattttaagtacaggtcacaaaaagaatggaatttcaaaaaaaagagaagtataagtaaagccaagaacttgggcaattttagaaaagactgaaaggtagtttcaagggtagggaagtggaatgctgagaaacaagaaaacaagagagggaaagcaagatagtatttaacacatgcacagttcagtaatgtgaaagtgaaagtgactttcatatgagttggagctaatgaaatttggattcctgtgagtaatcgaagctaagatgtggtaactgacagggtcttgaatagctcatcatttctcatctagaagcaatggagaatgcagttcagagagctccaaaaaggtggcgcaccatcttttctcctgatgtcactgggctcaacaggtaaagttaataggccagacttagttctagtagcatattatctggttgaccaccatgcagtttcagccttccacattatacgtgtgaargaaaaaggatgctgagcttccatagcctcttcccagtattctcggtaggttgtaaatagaataagcaagggcccacatcagctgtttacctagtagctgatggactaggacttggatttagaatcacataatccacttagaccattgggatcattgtttctgtgagttctaaatgaaatcctctctgtttttcatagcttacccttcatttgattcctttgtacccatttttgctttcctcctctcgtgtgccagatgatgtgctctttggggaccattaattccactctcaagcttaggtctattttgttcagatactttcaagcactttaatacagtcctaaagaaatccaagagctttacttctggaacagtgcatactcctcttgagtgatcactgaaagctgacaaatagataatcaasaagtcagagatgtatttgcaagcccttgtttttctctcctstgtactttggattgacagaatggcataagcactttaacaatattgagttaactattatttgttaaagattttttcctctaagataacttgaaatttatttttatctttttatgaaataacattaagtactttaagcttctttaccatgaaaaacaaccaagaatgtgttyttgtttggtatatttttaggatctttattttgttaatagccagtttcttggcacccttttattagaaatatacttttagcattagtttgcctcagttgtgattacttactaagaagtgataagtacaaaataatattccattggatgagcagtggaagtactcctgcttccttcacatacctgccatttcactgcagcatgagagtttgtattaattgtaacactgtataaagctcgtttttcaaaaattgagttattaacacttttattacctagttttcctatcttactcctacccctcagtgtcatggtagaaattcagtggttgaagcttaaatcagaaagttgaaaggtaatgtcattaggaaaatgcaaatgaggaccatagtgaaatgccacttcacacccactaggatagctgcaattaaaaagatagataataacaagtgctctggaggatgtggagaaattggaaccctcayacactgctgatgggaatggaaagtagagcagcttctttggaaaagtctggcagtccttcaaaaagctacacgtagagttaccatctgaccagcagtgccacttctaggaatataccaaagaaaattgaaacatatgtccasacaaaacttatatatgaatgttcatagcagcattattcataatagccaaaacattgataccacccagatatccatcagctgatgaaggaataaacatcatctgttcatccaatggaatattactaatattattatattatactgatacatgctacagcatggataaattttgaaaacatgctacattggagaagccaggcacaaaaggccacatattacatgattctgtttatgtgaaatgtccagaataagcaaatccatagagacagaaagtagatgagaaagtagactagaagctgggagaaggggcaatgggagtgactgctaataggtacagagtttcttatagaggtgctgaaagtgtactggaattagaagagatggttgtacaatttggggaatatatgaaaagccactgaattgtacagtttcaaaaggtaaatattatgggatgtgaattatgtctcaataaatgtagatgaaaaagtttaaagagattggctagcacatggcattatggcataattgtgtaatggctttttctagagcagaagataaagcagggttttaaatgtatttactataatattttccatttctcttaggattcccccaagacagcacaacttctgcaggccttataagggactataaatcaagttaatgaaaaatatttccccactcctccatataactctaaywcctttttactttgtaggtatgggataacaaaaacagtatagctatcacattttttaaaaaagatacatgcaaacacaccccccaaagacagtgtagatatcacgtttttaaaaaaagattatacacacaccccattatgttagaatcagatattccctggacagtagaaagcatttcattggataaagtctttatagaatatcccgattggcagagcttcatgagctctgaagaacaatgagaatgctcatggaattttcattttatacctaacatgtataagggcatgtcaactcgtaatcaataaattttacataggtcaaactaagcctctgcagaactgtgttatctatttgtggttttactcttttaggccttctcaaagttctaatcttatttttaaacttgctgtcaagtgttccaaaattacwgtggtgttgtagattcccactgaaaacatcatctcttattcagagaataaacatgttttaattattaaaaaaaaaaaagtttgggtgttaagcagactggcccattaggaagtcagtttcccatgatcagagaagacctctaatgttggtaaaggctgaaggacttttgtttgatggtatcaagaagtaaaataaagttgtaggttaaaaaatgtcagttttgcatgtttattcatagttcataatgaatgagactctaagatactgttttatgggagttaggaaggatagtaatgaactttgataaccagtagatagttgattcctatgatcatggttatggtggctttaatctaaatgataccctcttattgggcctgtatgttgtgatataaccatgagtgctcttcccttagtgcttccaagtaccaaagtcagatgcagtttctctttgtggtagtcgtatttctcattkwtaaagttctgaaaaccagaatcagtgtttttatggtatttgcactaccttattttcaactagactagcctttatgcagaagagaaatgaacatattctgtcttactgtacaagatagaactaacaccaataggaagaaactattaagaattcctaatgactaggccagctgtggtggctcatgcctgtaatcccagcactttgggaggtcaaggcaggtggatcacctaaactcaggagttcaagaccagcctgggcaacatggcgaaaccctgtctctaccaaaaatacaaaaattagccagccatggtggcatgcacctgtagtcccagctacctggggggctgaggcaggaggattgcttgagctggggaggtggaggtttcagtgagctgagatcgcatcactgtattccagcctgggcggcagagtgagattctgtctccaaaaaaaaaaaagaatttctgatgactagacgaktccacatgtacaacaggctgaggagtaaccttccattattagagaattacaattaaagaaggaattccttcattggtcagattattgaactaaattaataaaaattcccttttaacttcaagattcacacacactgtataagtgactttttagatttactcatcttcccccctccccccaacagacatttactttctcagttctagggcctagaagtctgagatcaaggtgtcacaaagttggtttcttctaaggcctctctgcttgacttgtagatgactgtcctcttcaggtgtcatcacctgcatgtctgcttattcgtattaacacattcttaaattatgagtctgcactttgaatcttctaaatttaacataacaagaatgtgttgtggtttaatatcttgatggagacaactcataacctatttcaagacttctgctcaggacaccttaaaaaaaaaatagagatggtgtctcgctatgttacccaggctggtcccgaactcctgggctcaagtgatcctccctccttggcctgcaaaagtgtcgggattacaggcatgagctaccacgcccagccaggaccttttaaatagaatttttaacttgagtttactaaattctaaaccaagagaaacatactcattaccatttagcaatttacagtttagtatatattgttcagatacgtaagcatgtaagagtgtgtatatatatgtgtgtgtgtgtgtgtgtgtgtgtgtgtgtgtgtgtatttggtcttttctaaatagtagccctgtggttttatgtttttggaattgctgtgttyttttaatgccctttttgctctttcttcttccacagtgccatggaaagccattcactcctcaatcccaacctgcagcaaggtgaaggagtcctctccagcttccgaaccacgtggcaggagtttgtggaggatctgggcttctggagagtattgctgttgatcttcgtcattgctttgctgtctcttggcattgcttattatgtgagtggggtgctacccttcgtggaaaaccagcctgaactggtgcattaaaggagctcatggaagatgaggcaattaattkcctgtttcctggcttccartgtttgttctcagtttctcagaatttttcttagcgcaaagcagtgagggcagtacatgttctttttgcatttttaattattgtaatccttttagataatgatgtgttcatttgaactaactacatactatgatcaagtatattgcatcctaacgctacctctgactcaacctgactttgtaggaaagcctacacgtagccttgtttgataaaaacacggaagtgactagagaatggaagataaaggaagaagctaggaagtccttgctatcaaaaccttatcctaatataggaccaattgaagtattcaaaaagaaaaacagtatcttatatgattagtttttgttggtggttttgttttcatttatttttgcaagagccactttttatttactttctctagggataagagataaaacttgaagtacttttttcaaatcttgtgtgcaaattagtattgttagcatctatttggcttattttagtatttttaagtctagtcacaaaccaaacaaaacttttgaaaatgagctatattttgttcaaagataattgatttgatcttatatttatttgtttttaggataatttttgatctttttgtaaactgctttgcttgttaatatctgtgaaaaataaatgagttcattttgttcactttccaattttcccgagtatcctagtcatcaaagataacagttcatcagaattacagtcagaaaatcctttttctactgaatagttagcagggaaaaataattctgatatttaactgtcataattctgtagtgctattatagtgaaaaactcagttctataagctagctgtgttgtcacagttttatcatagttcataattatttcaygtgcaatcctatttggaggccctgttagacttttaacaatcccatccatatctgtaattctctgatggcaagaatggatggagcatttctgagttaacagtgctggacagtatcgtactgggtgtcataaactctttatgartggtaatattatgtaaattgaaatctggccctcaaactatattgcagctttcagcagtatgtttgaaggcctcttttgttaatgattctgtaatgtatgaattatgttcttgagtggttaaaaaagaatatgaaggcttgataattatttattgggtaaagtcaggaaattgtagtgaaagaactaatggttttgttttttggaataaaggcacctaagctattgctaattgaattgctgctagaattagaaattatgctttagaatagaattggtatttctgtgattctttttgcttcttggtattttctcttgtatctatgtatctagtattgaggcttgctctttcatgtggctttatcctctctttaatagctgttgtaaaattcctgagtaactggctgcttcaggatcagcttgcagagtcttgcttttaggttagatacaaacaaagtaaatcatagttggtgtaaatccagcaaaaaacagctggctttggaatggagaacactacaattcaaatttgaagtatattcagaagaaaactttggaattagctttacatttgtttgtaaatctaaacaaatatgcaaaattggtcaaaatgtaagtatatagcatttttaaagattaatggttccttttatgtgctgatttctttgtattctgttctctgcattcatcattcaggaataccaccaataaatgtatttatatatcccttaatcacgatttctctttttttttttttttttttagtgtattatagttttaatttggggattttgtaatggattgcaattagctgctttttaaaacacagctttttttcaaacctaatgtattaggtatattgagtttcatatatgtttgccttataaatactgtgaaattaatttgagtgaattgctcgtagatttaagggtgatgatcataactaccacaattaagcccctcccaattatgcaagtttttagcatgcaagttttaccctacgcccccttgagcactacatgaccccagtttataagatgagaaaatggacacagggatggctaagtaacttgtccaaggtcaaacaggtaggacctggtggaagagggattccagattgaggctccagccccaattatgcttgtgctttcctcctgtcccgctgtctttcatgaatctggaaatggaaccatatttatccagaacctcgcctgataccatttcagcaggacattactaaattttccactcgtggtcctatatacttactttttttcctttcttacacatcttcccagtggtagaagctttaatattcaarctccaaccctggcttgtcagaaagtcttccatagttaaccgtacttgactgcctccttcccaacccctcctttccccaccacttaccacactcagttttattacttgtattttgcattccttgatccgtttctctgtaaacatgattttctttctaacttgtttaattgtaagcttcatgagagcagggacttagtctatttttataaccccatctgtctacagagcatcctgtagagctcttggtacacaaatacttatagcattgcttttatacctgtagctatattttttcttttcaggttgaatagctctttgccttttatgcatcccccgcaacaagctgcaggtgtgagctgtgcttggtcctccttccacagtgcgcctgtagcttcatgaacgaactatacaggctggcagtgtggagccccctcacctgtggagcatgcaggcttccgatcagcagcacctgccacaggtttaccacttcgtgtagaagcccaggaayaatattcacctgccactgctgctgttttggtttctatgtttttatttcaaaaccaggcctcagtctttgacttgtgaaattgtttatgcatgtatcaaagtgctttcagctgcaggaaccaaaatccgaattcaaaacggcttaccccataggaaatgtatttgtttatgtaactgaaagtccagttacataaagcccgtttacataaaaaggtagggttgaccccaagggtgacatcatccagaatctttagcccagttcccttgtgctcttgccctgccctccttgttggctgcttcctccagctggttctgcaatgagtacagaatttttagacatcacatccatttatcaccacatagagaagagaccgtctttcctgtgackccctcgtaggaaactttgatgcaaacaagctgtttcattggctgacatgatatcatgtaccccattctcaaaccaaccagtacccttacacaggttgacttaggcctggattgatgaaccagtcattggcaggggtggggttggtagaattcatatgttgagcttggactaatggttttagaagtgattagggccactcctggcaatcagtgggcagggaccatagttgttttacatcccacagtgcatgggacagtttagtctaacaaaggattgttctaaatcccacatgattcttgaatgttctgctggacattcgtgtgtttagaaaacaaacaattttagatatctgaacctaaaacccaaccatttcacattttaaaacaaggtattatttggtatagttttatttttttattttatttatttwttttttttgagacagagtctcgctctgtcgcccaggctggagtgcagtggtgcaatcttggctcactgcaagctctgcctrccgggttcacgccattctcctgcctcagcctcctgagtagctgggattacaggggcgtgccaccacgcccagctaattktttgtattttttagcagagacggggtttcaccatgttagccaggatggtctcgatctcctgacctcgtgatccacccgcctcggcctcccaaagtgctgggattacaggcgtgagccaccccacccggcctggtatatagttttaatgtatcatgaattttccaagaatacaaccacgagataattaagggaagattcgacttcattttgttcaaaactttatcaagaattgcaccgcttttcaaaaatcttgttattgacagcagtgctacttataattaagtcatcaacataattctattacagatagtaatgacttcgttgtttcttctaatgtagctgggcctgagcatttacatattgaaatatacattttattataaatttctttccctttattttgtgtttctattacataatttatgtgaaatcattttattgattttgacagttgttaactcctacttatctgggagccattctatagcttagcttatttaatcttttttaagacagagtctcactctttcacccaggctggagtgcagtggtgtgacctaggytcactacaacctccgccttccaggttcaagctattctcctgtctcagcctccctaggagctgggattacaggtgtgcactaccatgcctggctaatttttgtatttttagtagagatgggttttcgtcatgttggccaggctgttcttgaacttctgacctcaagtgatctgcctgcctcggcctcccaaagtgctgggattacaggcgtgagccactgcgcccagccttatgtagtcatcttgatgtaccttttccaaatagtttatcttggagtgaacaccaggaagtagcttttcccaaagttaatagaacatttggggaaaatgaggccagtatctgattaaaacacctttaaaattgttcaggccgaagcaattccagctgtgctaaaatagaactttgggatgaggttaattcctttgtgctccaagtagattcaaaacaattttctaaggggggatcttggccttggctcccctcaaagcacacataggctggcattctgttcagccactcattcttgacttttcacagcacaaccagactgctccatagccagaggcataggtgtctacattcacctggggacagagatttggccacactccttagatgtcaaggactacaatctggagttccttgctacccaacactcattaaaagcttagctgataacagtatttagagaatattgcttggaggatgttttagagcagcactgtccaatcaaacttggcaacgttgaaaattttctatatgctgtccaatgcagtagccacttgccacctgtggctgtttaaattacattagaaattcatttctttattagccacatttctggtactcttgggcagcaaaggtaaagaagattccatttttacaggaagttctttgggaccacactgttgtagaaaccgccttgagttcaagtcaggtcagtggagagctgggtacttgaactgtgctaatagtagtgcccagcccaactgcttttactgagctcttcattaataagtggtaatgctatacttattaactcaatcttcacaaatgctattattgtccccacctcaccattagagaaactaaggcatttgaggcagggttgaatagcatgcccaaggtaacacggccagtaagcggcagagctgggatttgaactcaggcagtatgggaccggggtctcttgtcaccatcctgctgtgatgcctgtctacttagttgtgatgcaattgtcttgaagtgaaaattgtcttctgtggatttaaccattggatctataaaggaaagctactgaggatgctgttggcaccattctttatgaagacccctgacaaggaacttttgtttcttaacacgcacaactgtatttctgctgagcagttactttactttcaatttatgttctctaggagttgcgtaattgatcaggtagaattcatctttcacactggatgctgaaaagcttaatgctaaatttgggtttcaccacaagcaactgtaatgtacgtcattatgatgattactagaacctcattcctatttattttaaatccttatctttagttttattttcttgttctaaatattcactttagcctacttaagttgtttttagattatgatgggggggtggatagttagatagctattagtgtgaattgataggactaccataaaattactttttgatttctggaacataacagcagaaaatgtattgaccttttgcaatttgaaacaatactttgttgcctcatattcaaaatgcagtcttggtttctagcatacctggaaatgtcagtttaccttatttgtgtctttctgtgttccaaaaaaggatttatgttcagctgaataagccgatattattctaaactatggaaatcaaatgacctgagttctattctagcattctaatgaatcatttgaatgragcctgaaaaatgaacattaacaagttactgggggccagtgactcacacttgtaatcccagcattttgggaggccgaggcgggtggatcacctgaggtcgagagttcgagaccagcctgaccaatgtggagaaaccccatttctactgaagacacaaaattagctgggcatggtggcgcatgcctgtaatcccaactacttgaaaggctgaggcaggagaattgcttgaaatctgggaggtggaggttgcagtgagccgagatcatgccattgcactccagcctgggcaacaggagtgaaactccatctcaaaaaaaaaaaaaacaaaaacaagttactggaatcacagaattttagagatggggcattagaagtcatctggagtggagagggttggggagaccaaggggaactgaatgactgtggtcccattcttaggaaaggagcagaaccattatttgaatccagatacagtctgttgttcttccctcttccatactgcccctccctcacacgctgccatcaccgccccccccctcccccgcacctcagcgtgccattctaaatattaaaattacaagagtctggtgtgaaatacctaaagatagactgtgtcagtattgtgttctgtgtactttcatagttaggccaaatacagactgatcttttcatcaagctgatagtcatagctgaggatgtggatttctgtaacctagtttctatttgtgtgtcaacaggagactcactctaaacttaccttctcttgataaacaattttcttttgagaaatcttgccacttctcaaaaaaaatccatttcggttaatgcactttctctgtaaagcaccttgcaccatggaaataccgtgaggaagctgagcaacaggccccggggtttcaagagcaggcatgatgttaccacattttgtactggctagtcacagtacttttcttaacagcgaagcaattatatattcaagctcattgtccgctgcatacttttgattcaagtgaggagatcaatggttgcaggaacatttgtcaacttaagccctgggattataaaatgccttttttgatggcatttaaaaaaacaaaaaccaaaacaaaaaaacatttactgcctggttctccagtgtgccagagatgtcttcaaggtattaattaagctcttcaatatgtttttctctgtatccttttccacatctttagaagcatctctgaaaaggcaatgaaatatgtgtaaagatgggggaataaggctgggtgtggtggctcactcctgtaatcccagcactttgggaggccaaggtggttggatcacttgaggtcagaagtttgagaccagcctggcgaatatggtgaaaccccatctctactaaaaatacaaaaattagccgggtgtggtggcacgtgtctgtagtcccagctactygggaggctgagacacaagaatcacttgagctctgggaatcacttgagccccagrggtggaggttgcagtaagccgagattgcaccactgcactccagcctgggtgacagagtgagactctatctcaaaaaaaaaaaaaaaaaaaaaaaaaaaagaagatggaggaataacccacactcaggataaaactatcactgtttctgcttaggaatcacttttcaggatgttcaatagagtcttctccctttttttccctaaagatttattattgttttgttgtttttaacttggattattttttcatgtctgaattagtttaagaatcaatttaaacgtaagctctgacctagggaaatttcagcttaaaatgcacaatagtaaatctcctaatttttttttaaaaaatagataaatatttgctggaatcattacaaattaatgtttgcatattttatggatagatacatcttggcaaatttcaatggttttcctctttttcacagtatccctttatgtacatttacaattttatggtatgcaacatcagctttacagaatgcttttgtgtttttatgtgtccctaggccaaattactttttagaggttcaagaataattgctagcctaattctcttgcatattcatatcataaattgcaaataggaaatgtggcattgaagagttagttatttcttcctgtgattgggctatgagaaggttattctctgccacaataaaagttactccctttctttggggattaatttctaaatttgaagactctgggtcagagttgtctggactgtttcaccgaaatttcagtccataagaaataaaaataggttttgaagtagtttctaggtcactggcacagaaagctggcaaaaatctgtaacttactttggatagtcctagttagtacaattccaccagcacagtctgttcttttagactgtgattcaagtttaggagaaaataaaacttagagatccttaaatgttaccctaaccccaaaagtgcttttgcattcttacactataacttaagtttgggtaattctctttgtagatcccctgatttgggggaaaggcagtcatatttaaccagctaacagttctatrtttcaccttattgaacaatccaaatttatttgttattttaggtaagttccaattttggatcagacagtggaggctgtggttatacaagaaaacacgtagacttggagccaacaaatcccaacttaatatgaactgaccttgatcaaatacattttctgaatctgttttcatgtttaaaacaaataataggaacctcacagacctatcacgattaatacaaataataactgtattatttaagtactgcatgtgtaccaggccctaccagggttgatactgttattatccccataaagaaagtgaggcttaagaagttaagtatgtatcctaaagtcagggagtagagtcatttttgaaaccagattctgcctaactcactccagtgattttgtgctcaactattatgccgtccatggkgcttctttgaaggaagacccacatctgaaaggacctggtgctctgtagggactcaatgtatgttatatgtgttttattgactaaactccagcttcttatggtcaactcatctacatactatctcaaaatttctgatatgttgaggaagtataactacattatcaattacaaatcctgttcatggtttttcatagcagtggccttataagaccccatagaaccttccaggcatcatctcaggaactctagcagtctcttctcaagaaagcctcaatagagcccagagatctctccagtaatgggagaaggaaaatgcctgggcttctaacccccgaaccrgccaatctcaggtttacattgaacagggaagtgtatackttttaaccaatcatgaaattttacaatgcccaatgcacatcctgtgacactcaagaggatgattttgattgagttccatgagtaaaaattcagatattggtagtcacaattgcaaaattctttcaaaagrtattcctctaatagaactactctcagaactaagagtcagtgagaattatggaagcttatattttctttctggttgagatttttttctgtttaggaagcatgaaacggttctgtcatgatttttgacactataagaccctagaactgtggtgacatcatcttgcctaattacaaaagagttctaatggctgagctcagaaatccactaaacttcttataatcttcaaaaagtatgtgttggtcacaagaaacaggaatgcactacatcctcaatgaataacttcagctattgtccggtcatcattctggaattctcattctgggaagtgccagtcccagtccccagtggaaagagctctgtcctatcttatttctaattctatacctttccaaggcctgccctgccctagccttgagctgcaggtggaagagaggcttgaaggtaagcagctgccttgctgcctgcacctggctcagagaatgctataaatagcagggtcctggagctccccaccctcgaaatgatgctgttctacagaccaaacacctgaccttactcagaatgcagtttctgttaaataaacaggctcattcattctcacaataaagaagttattccaattccagagttatgtggcagagcctcctttccccctttctcctactgattgaaattctttattgtctttttgttcgtttgtttaagatggagtctcactgtgtcacccaggctgaagtgcagtggcacaatctcggctcaccgcagcctccgccacctgggttcaagcaattcttctgactcagcttcccgagtagctggggttacaggcatgcaccaccccacccagctaatttttgtatttttagtagagatggcgtttcaccattgttggccaggctggtctcgaactcctgacctcaagtgatctgcccgcattgacctcccaaagtgctgggattacaggcgtgagccaccatgcccagccgaaattcttcattgtctttaatggagccctaatgactcagccaacagcctaactttggtttattggtttacaactgctcaaataacattcccagccatggaataaatacagacagtcaacttatttcaatgtcaaccttttaaaataggtatgtgtatatgatttttttttgtcatttaatttggataaaataagtagtaatgagaaacacagtgcttctgagttacaagaatagatgtgaaaggatgagatgacatgcctaccctcagtacaccacaggacacacacacacacacacacacacaacttggtgtctacctcaccatttaccagatacataagaaaataaacaagacactccttgtcataaacacccactcttttgtgactgggaggcagaagagtgtggtggtgagcacaggggtctcgcactcaggcagacctgggtttggatccccagcctacactatgatggagtgtcagtgggcaggttacctacccctgctcccctagccttaggtacaccatctgttcaatggggatattcctgactcagctcatctgttacatgggaatagtaatgctaaccaggggatcagctgcgatgtgtaagccgctcaacactgttgttggtgcacagcagctctcaataatcagcgtaattatatgattacttcctctttaggccaagcacaatctagagctctgccctgtgctgcattaggaagcatttatttgctgaaagacaggtcaacctctattcttgtgtaattggtcaggcctgcaggcagtgggtgattaggttcccagatggcttcagctctttgagctttcattaaataataccttaattattagctcgagaggacattgaacacagtccttgccaatcttcccagccttccctataggaagccaaggacagttgtgaagcggcaggacccttcctgtgagcgttgagagctgagatgggcagaggagaagcaagcctgtgctttctggttctatatatttatgattgtatctggtcctggcacatctctgcagcttaacagaactgggatttttttttttttttaatctgtcttccccacatttacagagaaggacactgaggcttggaagctttgcaaggcaagacagaagccgaatccaggccatctaatctctaggtcagtgtcctgtgctcctgagcctcagaaggcaagaaagaagggatacagacgtcagcgtccctgttgggtggggctgtttccrtcacgacttgtgtcatggagcatcatctcaaagctctgcagttaggaggcagagggacctgctaccacctgtcccctcctctccagtcctgccctgcaggcagcccgggcacctgctgtcttcctggcctcccagatcctcaagatggagctccaggaaccatcccctcctccgcccgggcaggatgccacctccacaaggcaaatcacatccatttgatcttgaacaaaaggctgccgtggtgtctgaaatgacaactcccaggcgggtgatgtcatgctgttttgtttgtctccatggactgtggggatccaatttcagttgtgaagaaaacggtctggggaaaaaagttacttcattcggaaaattccgagaagccataaatacagtttgcagctgaggaaagcactttcacactcagacaatggatttgggtggaagaaaagacttcccgcccctaaggctgagccccttcactcccacccatggccaccggcagcccgcttctgccagcagatagatgtgtgcatggctctggcaagatctcaagcaaccccccttccccaaggagactctccgtgacccagtggcaagttggcaggggatgtgttttccctggttctcatcctaaattgtctcctgcccagagtccatccctgaagtatcaggcacttccctctcgtaaatggttgacctgcatctctgagctgctgttaaagcaaatttaaaataacattttgttgttttcatttcttattccctttctagccctgcaatctctagtgaatcctttttgcttttcttattcttttcttttttctttacatttggcacagtgagaaagaggcagaaacagagggtaaattttattgctcttttcatgagaaacttagcatataattcccagtccagatcttcagccccaagtcaggaaggaatcatccctgctgggaaagaccagggccagagagcttagatccaggggcaacttttctagagatgttgctccctggattctcccactttatttttttaatcccataaaaacaatatggcaagataacagaatcttggaagataggagaaagtctctctagaccacccctcctttcattacatgtcttcctggtgccaggtcctgttggccactgagcccctttctgtcttccctgctcccctgtgactcctagctttgttagggcacccttctcccccgggcctggcctctaggaagtcacagctctacggcattccccaggctctcagactcatctttcctgaaactctcccacagcctcttatatccatccccaaaacagttcccagggtcaatgcaccccttgcgtttagtactgagaacacaaagcctccttcccttagcctacaaagcacacggatctctgagcagcatgtgcagtgtcagtgcatgaccattgctggggaggaaaacttttcttctgtgctcttacattcagtatttaggggcctgtacattaaactgacaaaagacagattagcaaaagaaaaaaccaggcatggtgtggcttatgcctctgatcccagtgactctggaggctgaggcaggaggatcacttaagcccaggagttcgaggctgcagtgagccctgatcatgccactacactttagcctggaggacagtgagaccctgcctccaaaaaaaagagaacatattattgttcaaatttgtgtgtacatgagagttcacacacacacaaaagctgactccaggaggaggttagaatctggggcttatatgccatcttaacagggagtgggcagatgcagaggggaacttctacatgaccaaacaacttaggaaaaataaatagcttcttaggtgagtccacgggaagtatgtattgtccccatgaactgtggggatagttttgtaacaatatccgttcaggcaatttcttatccaggtgatgccttgtgttgacttctcttcaatgataagagtcaatcttctcttcttgtgaaattcccgggaaaggatttataatagttgaattctttggggaggctttgcatttaggaagataaggggagttcaggaagagcctcttcctgcagctgttgattctcaaatgtcttcagctcaaaatactccacatggtcctgtggcatactgcagacctcttcaccctgcaagtctttggtctagaataccctgccggacgccagcagcccgcccacaggcctaagctcagggcccaagctcctgagctcctcttccaggcctgtactgacgctggcccaggtccgatcaggcacccagcccccgattccgtggctgcccacatgaacctcagtgggcgacccaacacgtgtgcaatgttctgagggaagcttagggaagggaggctggagccagccttgttgaatcccccactcctcacccagctcctggcatactgtaggagttcaataaatgtctgaggaacaaatggaggagactatgaatgttttgtgagggctttctgcccctcaggcaaagcatcacaagatgatataaggatacaaagccaaagcttttaaagaaatcctcattaactgaattagtcatattctgaagtggcttttatcttaatgaaatttcactgtatctcagtattatttgaaataaaggagccatcagtttggatttaggaaatgtggattttcagggtcttgggatttgatttctagatgtgagttgtttttcctcatacaccagaaccattctgtagcaatataatgcaagccacttatataattttaaattttcaagtagtcacattaaaagagtaataagatacaagcggctgggcatggtggctcatgcctgtaatcccagcactttcggaggcctaggagggagaaatgtttgagcctaagaattcgagaccagcctgggcaacatattgaaacccccccaccaatctctacaaaatatcaaaaatttggccaggtgtggtggcacaaacctgtggtcccagctacttgggaggttgaagtgggaggattgcttaagctcaggaggtcgaggctgcagtgagccatgatcccaccaccacactccagcctgggtgacagagtgagaccctgtatccaaaaagaaaaaagaaaagaaaagaagaaaaagaaagaaaggaaagaagaaagaaagaaaagaaagaaagaagtgaacttcattttaatcatatattttatttaactcaatatatccaaaatagtattgacatgtaatcaatatttaaaattattaatgagatattttacattcctttttgtactaagtctttgaaattttacagtttcaacacatctcatttgggactggccaaataagtactcagtagccacatggccagtggctggtaccctggacagtgcagtcacagacatatgtcctctgagtattcctggaaggtcccctgagaactatgacgttaagcggtgggcagtggctctgagcacacagctgcagcctagcgaaccagaggcccaggtctgtctgaggtcacgaggcacaaccaaagacaatgaagaagaatccggagcctctctcaattctcccaatcctgggacagggcaggatccctccagatccaccttttctctgtcgtctcctggatcagtctgctcagacctgggctgataggccagaggtaggaagtttgctcttgctggtgaaactttattacttcattcaacaagtacctactgggcagctactacgggccaggcactactctaggacttgggatacagccgtgaacaaagcagtttcctgcctttgagtagatagacaatgaaaagtaaacaaaataaacaagcaggttgaataatatactgtactggaaagtggtgagtgctctgaaaacaaaggaaaaataaaacaaggtaaggaaataagaagtgctgggagtggggcaggttacattaaattctgcggtcagagctggcctcattgtgaaggtgagatttgagaagtctgaatgcacagagttgaaggaagtgagcgagttggccaggagagtaccccaaacagagagaacaggtagagcagaggctctcaggtgggcgggagcacacctgacatgatggggaaactacaaaaagacctgaatatctggagaagattgggcaagggcgagagtgttgggagctgaactcacagagctaaggtgtcgggaaggagaaagcagatcatttagggccttgcagaccattgccagggcactggctttaattttgggaaaaatgaagaattgctatgtgattttgaatgtagtagcagtgaagatgccgaaagatcaatggattgtggatgtattttgaaggtagagctagtggagcctgagaaagggtagtcaaggatgactcctagtttttttatttgagcaaattgcaagatgccagcccaggaaaggctgcagcagggacaggtttaagggagaagatcaggagttcggtttggggcacgttgggttggagatgtctattcaacaaccaaagagaaatgccaagtaggcctttggaattatgagtcaaaatttgggagaagggtctgggctagagatagaatttctcaatcatattggaaattctcagcatatagacggaatttacagccctgggacttggtgaaatcatccgaggagggagcacagaaaggggaatcctgaggcagccgacatgaaggggttggagaggtaaggagaagcagcacagaagacagaggaggagtaatcagaggtaggcagaaaaccaagagactactgtgtcctggaagccaaaggaagaaaaaggagttaactgtgtggaatgctcctgacaggtcaaatgaaatgtgactgggaaatgggaactaaccattggatttagcaacacggaggtcactgccgccttgatgagaatggtttccatggcatgatgggaatagaagcctggctggggtgggcttcagaaagaacatatggggtagaagtggagacagtgagtatcagcagctctttcaggagtcttgcaaaaggggagctggcagggtaaacggatcaaagaaagcttttcagaaaatcaactttattaaggcataatttacatataataaatttgaagtatacagtttaatgatttttgacaaatgtatgcatccatgtaaccaccacaacaatcaagatatatattaccagcatcaccccaaaaggttccttgtgctccttttgtcaatctctcccatcatcccctccccaatccgcagctccaggcaaccacagacctgctttctgtctctgagattagttttgccttttctaaaatgtcgtataaattgaatcatataggatgtgctcctgtgtctggctttttttgctcagcatatacttgagaaatatccatgttgctgtatctatgagtagtttcttactttatattgagttatatttcattgtatatatataccgcaatttgattacccattacttgttgatggacatttgagttgtttctagttttgggccattatgatgaaaaatggtatgaatatttgtatacaagtctttgtacggacatcatttccttcctactgggtagatatcaaggagtagaatcgttgggtcatttagtgatgtatctttcattttataagaactaccgaactgttttccaaaataactacataatttcacattctcaccagcaatgtatgagctccaaattctccacagatttatcaacacctgatattgtccgtctttaaattttagaggaagtttttgttatttttttaatagacttatctttggaagagctttagattcatagaaaagttgaaaagacagtacagggtagagatttccagaatacccttcgcctagctttccctcacgtatatttgtcaaaactaagaaattcacattggtataaaactaatagcccaactatcaactctaatcagagttttttgaattttctcactaatgtcttttttctgttccaagatatcactctgcattttgtcatcatgtctcagtcatcccaatctgtgatcacttcttagtcttcccttgtttatcatgaccttaagggctttgaagaatactggtcatgtattctgtagaatgttcctcagtttgggtttatctcatgttttcttataactcaatagatttgaagaataccacagtcgggaattgcccttctcatgagatcgtatcagcgggtgaatgatagcaacatgacttatcagcggtgatgttaaccttcatcatttggttaacaaggtacctgctgggtttctttcctataaagttactattttccctttccatactctactctttggaagtgagtcactaaatccagtccactctcaaagagagtggatttaagctcggcttcctggaggggagagtatctacatatgctatttggaattcttctatagagaagatttttcccttctcgtttattaatttgttgaatcacttataatgaaggcatttttttaaagatggaaaaaataacaggtatttatttgtatgttgatggaaatgatccaatagagagcaaaatattgtgagtttctttagtttctatagcaagtattgaaaatttttttcactgttagctttccaccaggcctttcctcatgtcttttacaaattcacttcttggccaggcatggtgattcacacctgtaatctcagcacaggaggccaaggt

SEQ ID NO: 96202 - DNA, 17707 bp, Homo sapiens
gggccgggggtgtccttctgttcgttcagatgacaccggctgcccctgccatccatgcaggtacctgatcggagaggagggctactgcctcacatcactgcagagtgccctgagctacgtggagctgctgccccggggaggcctggccaagtagtacagctagagcccagggtccctgcagggcctggcctcgcctcccagggctgtctctcctacacctggagccatgggatctactgaggaccatcctggagcctcacgctgctctgcacatggtgggggcttgtccactgtggtgtgctctccagctcttcaccttcctcacctcacatctgaccctggagcttggggttggcacctctgccccgacagaatggggctgaatcagctccaggaggaaccaggccctgctctcctgtgtaggcctcagagaggccaagaagggaagctttgggcttcggtgggtgcaggctcagcgatgaacatctggctggggcagctcctggggagcatcagggaagagggggccatgagccggccagcagtggagacggcagtccagtttctctcccctctgacccctagaaggggagttgtagccccatgaactagtttcttgtctgggtcaggaacaagggccggctggggcctggggtgcagctggtgtcagggtatgctgtttgctgatgggcagggacacccctgcagggtctcgggctctgagcccaggacattccctgccccttgctcaccttggctgtgggctgtgaacattccgggaccctgggcatcttatctaggtccgtgcagcccaagggtcagccctcttgactgtcacatgctgcccccacccagcctaaaataaagagctcactgctgtgcttcgccgtgtggctccctcaatccccaccccactggccaggcagcacaaccacccctgctgcccatggcagaggccgctgaggatgtgggggacgagccacagcccagccccaaaccaagcctggcccaacctcttgaacatctgccagcctccgagaccctctgcatagaagcagggtcctcttggggctgtgcctggccaggcaggtgtgggcttcaccctcttggacaggagagctctgcagggcatcagtgggtgggaagggtggggtgaggctggggtccaggtcatcactggggacctgagcccagagcagtcacccgagggtctcaggaatcatcgttctgtgcatggcgacacacacatgctctgaggtgcacagaaggctgccgggcgtggacagcatctgccagggcggtgtgggcagatcaggatggagggctcttctgcaagaaaggcacccctggcaccttgagatgccatgaggaggcaggtggcagggctggtggggtgggaggtcccaaccctagatgctaccaggagctggctggggggcagtgttgctgttctcagggaaacagtcttaaaagcagtagctgtggacctcggtgggatgctctgtgcttgcaccctcagcaggggctggtttacccgccaaggaccccatagggagacagaagtgtctctctgggtggggcagagctggagcatctgccccagccctcgatacgaaccccagctggccacggtgccttggagcttgggctgctccggcctcagcgttggtgtctagaagatgggattttaaagtccgcttcatagaatggtggagatgagctgtgtcttgaacaaatcctggcgtgggagcccctgctggcttggcatcggggccacacctgcagcctgcacactgtgggggctgggaacgtcctggctcagctgtatccctggcgctgagacccggcagacatgttcaagtgctgctgtttgctgtgcagctttgccctcgctgagcctgcagctcccccataagacaggaatgaataatagcagcttccttttagaaatcctacaaatggccgggcgcggtggctcacgcctgtaatcccagcactttgggaggtcaaggtgggcagatcacgaggtcaggagatcgagaccatcctggctaacacggtgaaaccccgtctctactaaaaatacaaaaaatcagccgggcgtggtggcccgcacctgtagtcccagctactcgggaggctgaggcgggagaatggcgtgaacctgagaggcagaggttgcagtgagctgagatcgtgccactgcactccagcctggacgacagagagaaactccgtctcaaaaaataaaaataaaataaaaagtaatggctgggcgcagtggctcatgcctgtaaccccagcggtttgggaagccgaggcggacggctcttttgaggtcaggagttcgagaccagcccggccaacatggcgaaaccccgtctctactaaaaatacataaattagctgagcgtggtggcggtagtcccagttactcaggaggctgaggccggagaattgtttgaacctgagaggcagaggctgcagtgagccgagatcacgccattgtactccagcctgagcacagagcgagactccatctaaaaaaaaaaaaaataaaactattctgcataagcagtgtccaaatcataacaaaaatcaaatgaaaagtaaacaagatgtaaccttatatccattggaccggagaagatgaggaagctggacgatgctgagtacaggagggggagggagctcacgcacactgtggggtggacacggcagtggccccaggggaccaggtgcagtcctggagtccaggtaagtgtggacggaacctccgacctggcaaggctgctgccggttttagaggatgtatatgcagtggaggcaatggagtgtctgtcccgggagggcagggaaggacggagaatccacacggcagctcatggagtgtccatccccgggcaggaagggagggagccgtgaatgtgtacagcccacgtagccaccgctgcctaacaaactaccccaactcaggggcttaaatactcaagacgccaggcatggtggttcacacctggaatcccagcacttcggaaggctgaggcggggggatcacttgagcccaggagtttgagaccagcctgggcaacatagtaaggcccccctctctactaaaaagttaaaaattaggctgggcaccgtggctcacgcctgcaatcccagcactgtgggaggccgaggtaggtggatcacctgaggtcaggagtttgagaccagcctggccaacatagtgaagccctgtctctgctgaaaatacaaaaagtacaaaaatcagccagatggctcctcagcatcatgggaggctgtttctaggtggtaacccaatgaccaggggttggattcatccgaagagctgtctgctgtctatggttggtgccagctgtcggctgggacctcattcagggctgtcggaacgacgacgtgaggactggatgtgttgccaggggctgccaaaacgaccacaaaatgggtggcttacagcaacagaaatgttctctctcaccatcttgcaggcctgaagtcaaaatcaagctgtcagcagggctgactccctctggaggctttagggtagaattctgtttgcctccagtttctggtggctctaacacagctgtgttaccttcgctcacggcaccctcgttccactctgcctccgtctttaagcggtcttctctcctgtgcgttcatatctaagtttctctctcctcataaggacagcagtcatactggattgagggcccatgccaacccagaacaacctcatccttttttttttttttttttttgagatagagtcttgctctgtggcccaggctggagtgcagtggcgcgatcccggctcactgcaagctccgcctcctgggttgacgccattctcctgcctcagtctcccgagtagctgggactacagatgcccgccaccacgcccagctaattttttgtattttttagtagagatggggtttcagtgtgttagccaggatggtctcgatctcctgagttcgtgatccacctgcctcggtcttccagagtgctgggattacaggcgtgagccactgcgctcggcccagaacaaactcatcttgatttttgtctggaaaaactatttccaaaaaagtcccaagaataggctgcaggtgaatgtgagtcgcaggtcgaagttgcaggccaaaagctctgcacacggccgtggccttctcactctagtggctgggttctgagggtgtgttagtccgtccccatgctgctgtaaatagctgcctgaggctggataatttataaagaaaagacgtttaattgactcacagttccgcatggctggggaaggcctcagcaaactcacaatcatggcagaaggcgtctcctcacagggcgacaggagcgagaatgagcactgaacaaaggggagaaccccttataaaaccatcggatctcgtggaattcactatcacgagaacagcatggaggaagctgcccccaagatttaattatctccacctggtcctgctccagacctgtgggattacaattcaagatgagattttgggtgtggatacagaaccaaaccatgtcagaggccaaggatctcaagacaaggccagggtatggcatgtttatgatttagccttggaattcattccacatcagttctattccatgggttgaggcaggtgcaaaaacccacccaggcctatgggaggagagctaggcccactgctggatggatggactggtgttgccaaattcagtgaggacaaaggcagaacagttacctccaccctcctccgcatcagaagaagaataaagatgagacttacgaagttagctgtcctgaggactggtgtggacccatggtggcactgggcaccaagagtgagttcagtaaacagtaagtaaaagagctccctgtccagaggtggccacctagataactcagggagatccaccgactgcatcacgatttttttttccagacattctcgctctgtcacccaggctggagtgcagtggcacgatcttagctcactgcaaccgcaacctctgcctcccaggttcaagtaattctcctgcctcagcctcccaagtagctgggcttacagacatgtgccaccacgcccggctaactttcgtatttttaatagagacggggtttcaccatgttggccaggctggtcttgaactcctgacttcaggtgatccgcccgcctcggcctctcaaagtgctgggattacaggcgtgagccaccgcacccggtcatgatcactatttctaagatgccagcagggaacttccaggtaaaaaatctaagaaaaaggggggacctcgccgcccaggcccagggaaagtttcaacaaacttgggccttggttttggtggcctggagagatgagggacacagacgtgaagtagcaaagcctgcccaaagcgggggtgtggggtaggggtgggtttcggctgggacctccaagggtctccctcatcctcctctacttctgggcaatgcgagaaagtggctgtagcacagaacagaggaacccgagcgaagaaaacgtccccgggaagtcgtggcccagatttagcctgggtggatccgcagcccaggtcagcttttagcctagagaggggggcggcttcgccctgcctcagagacccgcccagacgatgctctcaagggctgcagatggcaagtgcaggaggccgggaagcggagccagcataaacagaatctgaggtccccgcatccacctgaggctgctgtttcagacgagtctgaaaggcttgtccttccgcccaccttccgtgccgcgggcccctccctcaaggggatggccccgccccacaggggaggcccgcccccggatccggccaatccccgccaggtaatgcaggtggccccgccccgcaggaaaggctcttcccaggatccagccaatccccgccaggtaatgccggtggccccaccccccaggggacgagcccgcgcacctgcttccccgcggccggstcgcctggggctgggtccctgtctcgtggggaggagcggcccaggcacaacgttccctgagcgcctgccatgagcccgcagccctcggcccagcggcgtcgtgaacgataccggtcccgcgaggagacgggcgacgcggtgacaggaggctctcggggtgcctcgcgcaggggctcggccgggctgacacctcctcctcccctttcaccaggccccgcccctcctaaattattcggaggcggggcctgcgccaagccccgccccgcccccagcgtcacggccgcggaccccgggcggagccgactcccggcggaagcgcgcggcgcgcggggaggcccgaactgatccgcggcggccgsagaccgctggggacagacaggtagcgccgtcacccgcgggatccgcagctccatctgccgggcgaaggggctctggtcgggagagggctcagcgggcggaagcgcgtctctagagaagggtgcggtcgataaccgggggcgcccctggaaggccgaggtacccaggctggagggaggggctggaggtgcgggggcgctcaactggaggggcctggatcgctgggtgggcgggcagctgatggggccgaggtctccagcgtagggggtgccgaagataccgggggcgcccagccgctgggggcggggtctccaggctcgaggggtcctggggacgctgggtgagggttcggggagagcgcggcgggctgggcgcggccttaggtccctgacccccccgacccccgtccgccgcaggatgggcagcagctcgctgtccgaggactaccgccagtgcctggagcgcgagctgcgacggggccgcgcgggcgtgtgcggggacccctcgctgcgcgcggtgctctggcagatcctggtggaggacttcgacctgcacggggcgctgcaggacgacgcgctggctctgctcaccgacgggctgtggggccgcgccgacctggcgcccgcgctacgcggcctggctcgcgccttcgagcttctggagctcgccgcggtgcacctgtacctgctgccctggaggaaggagttcaccaccatcaaggtaggcgccaggccaggaggagcgcgcccctcgtcctggcctgcgggtcgcggggccgccgaccatgggggaccacgcctttcgagagagaggggcttcaagtgtcctcagtgcctggtgggctcctcaaggctccgagcgctgaggggtcgtgggcgtgtgggggcacccactcctagggctgagaacatggggtgggcgagggcaggcttgggtgctgcctacggggtcctgccctgagagcttgcgtcagtgtcttccctaagaggcctcgcggccccagttgccatggaaatcttaggacgggggcacagaagggacttgagttcccatggtcatcctaattcctccaggttatgggccaatcccatttgcagaggaggccgccgaggctgggaggactgcagatgggtgcatccctgtgaagtctcagggctgggctcagacctagtgaactccacggcctggggcgggaggctgtgcccagggctggcctggcctctccaggtgagctcctggcggcaggagggggcagggccgccgggagctctgagctaattcggaagagtaggaagccgatgacgtcactgggcacgtgggcgagctacgcctccgccggttgccatggcagcggcagtctctccgcggctccccggggacacctgctggtcggaggcgccaggactttcattcatgagagaggacggacaggcccgcccttgaggcctcccagggggcggggcgggggaataaccggcttcagtgcsggacagccctggtttggacttagttctgctgcttcctggccgcgaggacttggccaaattagctaatctctgtcagcccctttcctcctgagacagcgacacgggaacagtccagttcatggggccagaggaatgaatcaaagccccgagctcagtgctgcaggcactgggcgctccacacgtgggccgtgtccaggcattagatgctaggagtcccggagttagggaatttgagagtcaggagacgctcgcagtgattgtcctgagctcctttagttcttcacctaagtgtaggctagaaagcactcagccaggccgggcgcggtggctcacgcctgtaatcccagctctttgggaggccgaggtgggcagatcacgaggtcaggagattgacaccagcctaaccaacatggtgaaaccccgtctctattaaaaaatacaaaaatgagctgggtgtggtggcacgcgcctgtaatcccagctactcaggaggctgagggaggagaaccacttgaacctgggaggtggaggttgtagtgagcagagatcgagccactgcactccatcctggtgacagagtgagactccgtctcaaaaaaaaaaaaaaaagagcactcacccttctaccgtcccacggctgtcagcccagtgcatggacagcctctggagagcgctgaaaacagacgtgtcacccccatggtggaatactacacagcagggggaatgaacgttacagcttctgtccttgtctgcaagactgtagtggaaaaaaacaaagttcagaacaacacgtttaagaggctacctgtctagctttggttagagaccttacaaagaggtgaaaaaaaaggggggactacctcatacgaggagcaaacgaaatctgtatttgggtttgcaaaacaaacacctgggcaagtacattcaaaactaattagatgaggccatctccaggggtgaagggagcggtgggacagaagacagtggaatttctcagtacaggggctcttcattttgttctgatttgtgagctaggttaatgtattcattgttttttccattaaatttaagaaattcggccaggtgcggtggctcacacctgtaatcccagcacttcrggaggccaaggtgggtggatcatgaggtcaagggatcaagaccttcctggtcaacatggtgaaaccccgtctctactaaatatacaaaaattagtggggcgtggtggtgcgcacctgtaatcccagctactcaggaggctgaggcaggaagatcgcttgaacccgggaggaggaggttgtagtgagccgagatcgtgccactgtactccagacagagcgagactctgtctcaaaaaagaaaaaaaaaaaaaaattctaggccgggcacagtggctcacgcttgtaatcccagcactttgggagctcaaggcaggcggatcacttgaggtcaggagtttgagaccagcatggccaacatggtgaaaccctgtctctactaaaaatatgaaaattagccgggtgtggtsgtgggcgcctgtagtcccagctacccgggaggctgaggcaggggaacttgcttgaacctgggacgcagaggctgcagtgagctgagatggagccactgcactccagcctggatgacagagcaagactctgtctcaaaaaaaaaaaaaaaaaaaaaaaaaaargaaatcatcatgtttgggcctggcccaagctggctaagcctagtctctggggttgggtctgagcatcagaagctgccaaggcctgagccaacagatcccggacccactgtaccctagggtctggcctatgggagggtgggcagtcactgacctggccgctcccttgcagaccttctctgggggctacgtgcacgtgctgaagggtgtgctctcagacgacctcctcctgaagagcttccagaagatgggctacgtacgcagagacagccatcggctcatggtgaccrccctgccccccgcctgccagctggtgcaggtggccctgggctgcttygccctccggctggagtgtgagatcctgggtgaggtgctggcccagctgggcaccagtgtgctgccagctgaggagctgctgcaggcacggcgtgccagcggggacgtggcctcctgtgtggcctggctgcagcagcggctggcccaggatgagragccgccacccctgcccccccgaggctcccctgctgcttacagggccccactggacttataccgggacttgcaggaagacgaggggtcggaggacgccagcctgtatggggagccgtcaccaggccctgactcgcccccggcggagctggcctacagrccaccactctgggagcagagtgccaaactgtggggcactgggggccgggcctgggagcccccagctgaggagctgccgcaggccagcagcccaccatatggggccttggaggaggggctggaacctgaaccttccgccttctccttcctctctctgcgccgtgagctgagtaggcctggggacctggccacccctgaaagctctgcagcggccagcccgaggcgtattcgggcagagggggtaccagcctcagcctataggtcygtctcggagcccccaggctaccaggcacacagctgcctgtcccctggcgccctgcccaccctctgctgcgacacctgtcgccagctgcatgctgcccactgtgcagccctgcccgcctgccgtccaggccactcgctgcgtgtgctgcttggcgacgcccagcggcgcttgtggctacagcgtgcacagatggacactctgctctacaacagccccggggcccggccctaggccagctgggccccaggtcaagggctcttgggagacagctcccgtggtgcttctctttgctggggaggggtctgggcctctggttgccttgtccctgggggagtcctgggcacagcagggggwtggagagtccaggccaacccttgctggaggtgggactctctgtatatggaaggctccaagggcagcaggcctaagccggccagcaggagcctttccacatttccccaccctcggaacccagacgcatgcccacatgtgctgggtagaggggtccagcctgttccagccagtgcctgaacctgtccctgagaaggaccctgtgccccaaggcccgtggctcctggcctgctccctgcagtacggagtacggggctcaggasttgggggtcctccacgtgtcccagggattctccacacgagtgtcctcaagggcctgttggtgacaccgagctccccccaccccaagctctgctggrgccaatctgcggggctctgccgggtgcacggctgacctggcttcggggrcgccggccctccccttgggtgtcacagcagctgggcccacagacaggaaatgacctgacctcaaaccagatgtggaggtgcacgagaggcgcaggaacgggcagtggctgacagctgggaaggccctgagcgtcactgctgctgggcggaagggcctgtggacagcccrcccaggcggcggggtcttggtgggtccagtggtaatggtgcccctcccctccattccctgtgggtgcagcccacaggctggcgaggaggtgcctctgccctaccctcgggtctggcgagggagrgggcarggtgcatccactgtgacagcccctctgggcccacaactccctgaccctggaagctgagcctgctttcctgaccctccgccccaccccctcctccccagaacactcagagggacggtcaacatcagagcacattaaacgctggtgaaaccatgtctgttaaaaaagcttttatccaacaagagcctatagcttcgctcagcatcagagccacggcctcctgttgggtcctccatgtggggagcagggatgcagctcagcctccagcccagggctctcctggtagtctcggggtatcctcaattgtggctcccaccccataccttgtccctcttgtcctcatctggagtcctgccaggcccacctggggtccccacagccaacccatgcacgggacagccccgggcgactgagaggggatacgaaggtcttctgggccctctcatcccaggccagcgtccaccacaactcaaagacagcggggggactgcacccaccactcctcccaagaagcagtggttgcacatttccaacatagcgaggaggaccacatgagacccctgcagccacggatggagccgccagacctgcccttccagggtgcacgggctgggagccccccggtgtcacccggcctttttctgggggcagcagtgggttcagggcagacagtgggaggaagtcagtggaggatgttcccagccaaggggatgagctggatcccgggcgcctggtcagcctggctcgcggcacccttcacagacaccactgatcggaagacctggtgtgggaatacaggcgtgtgccaggcccaccgtcagggtttacagcgcttgctctggccctcggaggtggctggggcggcccgcttgttgcggtggtggggaaaggtcggcatgagctccggctcacaggctgcagggagaagggttcagtgctgggcggggcagggccccagataggaggagcaggcccaggtctgagtccagctctgcctctggacctggccctgggctgtctgtgcctccacatgcccctgtcctcttaccccagaaagggtgtgccgtcagtgagggcagcaggccacttctccaccacccaccccgggcaaaacgggctcccagccataccccacagagcgagtcaggaaccctgcacactcacgtaggggcttctccttgaaataggagctctccaggcagtccccggccgtcgccctggaggaggcagcctgcgttagtgcgacttgtgagtgcggcttcctcacctcccacccagctgagcagcctgtgattcaaatgctcaaaggaagccaggtggccactccgagcggctgtgcctggggaggggcctctccaccgcagtgaggctgggctctgggaaacggtctggacagtgtgggtggtgagggtccctgccccccgtgcagagatcagcaccttttcttagggtcgtacatgaacaggaagtgcagcaggcgcagcccggcctccgacagccatgggaacttgtgcttcaggttgttgtagggctgcttccggaggctgtactggccgaccagtggcagcttggaaaagccctatgggaggcaggagctgaggcgcagagggcgtgggcacgggcgggggctgcgggcgcagagggcgtgggcacgggcgggggctgcgggcgcagagggcgtgggcacgggcgggggctgcgggtctgcccaggacgcccaccggccagatgttctcactgggcgtgcccagcagctgcacgatcaagtcgatctggtggatctcggaagtgccggggagaagaggcctgtgcgccagcagctcggccagtatgcagcccacagccctgcagagaacagtggacctcactgcggccagacgtctgctgaccccgccagcgcgaggaacagaggacctgactgcagccagacctttgctgaccctgccagtgtgaggcacgctgggtcagggacactgtgaaggacaggcagggaccactggctcccctcctgggccccgcaggcctcccggggtgacaagtgcaggggcaggcgtgcctcctccagacctctgtgctcccagcctgagaacagcaagctaagttctcacacctcctcctgggtttccaggctcaggcccacctccctgggagtgggaggctggcaaagaccccactgcactcctgcccctcccctgaggctgagctcaggaaccaggtgacccggctcctgtcccagcccttcctgaggccccaggagcggtaaccgtatctcctcaccacatgtcgatgctggtggtctgcgtggtggttcccaacagcagttcaggggctcggtacctacacacagaagcacccacctcaatacggccggctcctctcccccagcccaggcctccacaggacacagcctccccgagagcctgtggtggcctggaaacctgtcccaactcggaccaccctctgccccaggccctgcagatccaggtggcacacacagcaatggttgccgggggcgagagctgtcacgtgcagcggtgtcctgagagtcgcagggaccacggaccctcggcacacagccacaccagccactaccaacccgttctcagatggggagtacacgacactggggtcctgacctgattctgaccaactctgatattcagccctggctaagcatgaccctgtttggttaaaagtatccaggaggaagaaccagggaaagcatgcaagctgcctgtccttcagtccgtgaagcagccttccctccagagatggtttcacggccacggtgtttccagctctcaaggcgaggtgtgtctgatctaggcaggcccttgacgccactgagcccgtctctcaccattttgtggcacagccctgctgtgtcctggaggctgtcctagacccaacgtttctgagtgtgcacagaccctgtagcttaacattcccaaggccagttgcagcttcggcctgacatccccaaggagacctccaccagacaggcctggtccccaggggccaccatgcttcagaaggacttaccagagagtgaccaccttgggggtcattggctttactgggacaccataggcccgggccaggccgaaatccgctgcagcagagaggggagtgtgtgtcaccaagtgccatctagggacagggcctggcccaagttgcacccacctgtcttcacacaacccttgtcggtcatgagcaagttggaaaccttcaggtccctgtgatggaaaaacagtggcaggtggctcccagagggccacaggggctgagagctcccccacggcaccaatgcccgtagacttcctgcacgtttcctcagctttgggctttttagtatcttttttttttttttttgagacagagtctcactctgtcgcccaggctggagtgcagtggagcaatcccggctcactgcaagctccgcctcccgggttcacgccattctcctgcctcggcctcccaagtagctgggactacaggcgcccgccaccacgcccggctaatttttttgtatttttagtagagatggggtttcactgtgttaacaaggatggtctcgatctcctgacctcgtgatccgcctgcctcggcctcccaaaagtgctgggatcacaggcgtgagccactgtgcccggcgtagtatctttattattttttttttcattaactcttacatgctgttgatgtttggaccttttaaaaatcggagtgcatgcccgggtgtggtggctcccacctgtaatcccagcactttgggaggccaaggtgggtggatcacttgagcccaagtgtgtgagaccagcctgggcaacacagagagaccccttctctattttagaaaaaaacacaaatggagtgcgagcagcgggcaggctgctgcagctgggaacccctgagcttttagtaactccacaggggcagcagagtcaggcctcagccgaatttgtgcttccaactctgcctagctgtcacccacctgtggataatgaagttcctgtgcagatactggaggccccggagcacctgcagcacgatgcacttgacctgtgcagagggtcagaggtaccagtcagggtgagcctgcagggaagcccagctgggccctgccacacccacactggccagcaggactagcagtcccaatagcccaggaaaccagtgccctcagaaggctctcggccccggggctgcacgctcccagcagcccaggaaaccagtgccctcacaaggctcttggccccggggctgcactctcccagcagcccagaaaaccagtgccctcagaaggctctccgcccagggctccccgctcccagcagcccaggaaaccagtgccctcagaaggctctcagccccggggctgcctgctcccaacagcccaggaaaccagtgccctcataaggctctcggccctggggctgcccgctcccagcagatgcccccaccacaggaattccacctcactgaagctcgctgaaacactgggaggtggaggcagaggcagcagcagctcttcaagtccccaagtgccctgtttcgttataaatgtgcaccacaagggcccatgaagcccattcccccaccccaggcccctctgccacgcacctgagcctccgagaagggtgttggcatattctccaggaggctggccaggtcctgctcacagtaacccatcaccaggaagatgctggaagaaacagaagatgcatgccactctccggccttctcctaaggggtggaagtggagcctcccctgctgcaggaggggacatgggcaggacaacctgtgtccccctcagacaatgggctgagccaggcggtgaggtggggtcatctcttctctgacaacctcatgcccagtgacactcagtcctcgctctgtgcaacacctctagcccaagacacatgctccctagggcccaatgtgcagaccaggagaccacgtacctctccaggtggttccccacaaccacctccttcagctccacgatgttcggatgacgcaggcggagcagcagcgtgatctcccgcaagctgctgatggggatgcctggggagggaggtggcctcagcgagccccaccccagtgatggcggggaagccccaaccccagccactcttgggcttcacgaacacctgatagcaggtgctgcagtgtccccacctcagggagaattggggcgaccccaataagcatttttttttttttgagacggagtttcgctcgttgcccaggctggagtgcaatggcaccatctcggctcaccgcaacctctgcctcccgggttcaagcaattctcctgcctcagcctccctagtagctgggattacaggcatgtgccaccacgcctggctaattttgtatttttagtagagatggggtttctccatgttggtcaggctggtcttgaactgccgacctcaggtgatccgcctgcctcggcctcccaaagtgctgggattacaggcgtgagccaccatgcccggcccaataagcacttttaactcttccttgaccaaatacgaatcggcacctctctaaacaccgtggacatctatgtggggcatggcagggccctgcctgcacaggcaggtgctgggggtggaggggacagcagagctgagcctgcagtgaggtggcctcaccagacaggagggggaggaggggatggagactgcagagccctcctggcagacagctgaggctgcgtgtggacctgggggtgatgtgctgggccacaccagaaccctcccagaggccggcccccgctacaagcaccgtgcagtcgctctgaggaaacttcaggtaactcacatccttctgcctcctcccagtgcgaggtcccaacaccccaatttcctgctcaccatccttctccttgtccatccgcaccttcttcagtgcgacaatctcatctgtctgggtgtcccgggcccgatctggaatggaaacacattggtgatgacatcatctcgatgcccctcgtgggctccctagcgctgaacgggaggctctccctgagccacaggggtccccgttctttcctctgacaacctcatgcccagtgacactcagtccccactctgtgcaacgcccctagcccgagacgcgttcccccggagggtttcctcatttgaactgggcagggggtgcccaactttgctctgtgctggaccctggcctc

SEQ ID NO: 96203 - DNA, 57702 bp, Homo sapiens
  misc_feature (1)...(57702): n = A,T,C or G
aggatcgcttgagccggggaggcagaggttgcagcgagccaagattgtgctactgcactccagcctgggtgacaaagcaagaccctgtcaaaacaaaacaaaacaaaacaaaaaaaccacacaaaaacccctgaggtatccatattagccattgattcagcccattcaatttcttttatagacagtttgattagtcaagatcatacttacaaaaaaacccataaaaatgtctaccgtcctaaacttatcatatttaagctccagtgaaaattctcaaatatcaaatctgtttccagctggggtcactgatatctgatgtccaatgccgtcacttctgggttttcacgttcaccagggctggtcctggtcgtctcctccactgggctgtctggcccatgccccacggggtcaacatggaggggtctttaacacccaggtgtatgtcaaaaaaacaagggagggcaacatcgtgctgtaatttttggttgggataacaattcaggtttcatctgctctggctgactttctgcctgagcgcccctgcatggaggcacgctcatccagccgcctggtgggtaccggacttcaaaggtggagttctgctgaaggtcaagaggatcccagggctcagtcagggggaccttggagctcagcttggcggtttgtccagcctgcagcatcagtccatcctcttagggaagatgtattcaaacagtctcttgcaggtcaagtgcgtcttcctggtgtcctgatgggtggggtggtgggtggagacctgggacggctttgctgcggagtgtaacgggtgtagacggagtgccctgaaaacaatgcgttgtcccaccccacccacccctgggccacagacaccgtcccctaccctcccacctcgggccaaggggccgtgcccccctaccccatgccccaacccatgtagaatgaagcgagcccagacatcattgtcgccctccgcaacggtgcatctgtgctcccatttttgcaagaaaaattattttctttttctttttcttttttttttgagacggagtctcactctgtcccccaggctggagtgcagcggcatgatcttggctcaccgcctccacctcctgggttcaagcgattctcctgcctcagcctcccaagtactgagcagctgagattacaggtgcgggccaccacgcctggctatttttttttgtatttttagtagagacgagtttcactatgttggccaggctggtctcaaactcccgacctcaggtgatccccccacctcggcctcccaaagtgctgggattacaggcgtgagccaccgcacctggccagaaaaattattttcattattgaaaataaaagtagggggggcaatgagatgtaaaccaaactctccaaagtggttatatcctagactggggttctggataatttttactttctcctttatggactccagatctctgtagtgttggacttttgcacaatgtatatcagaaaaaaaggcaacatttaagagttaatgtatttcatctttttccttttggattgcaggcacactatgccaccttctggtcatgatatggctacgtgtgcctgcagcggggacaaaaaccattaaattgtgaatagttacaatttcctctttgccatgggaggtcagatcctgagagagctgtgtgtgtgcgcgcgtgtgtgtgtgtgttctgagaaatggtctcactctgttgtccaggttggagcgcagtgcagcggcgtattcacagctcactgcagcctcaacctcctgggctcaagtgatcctcatgccccacctccctgtcccccaccatacccggctgattttttttttctttgagacagagtcttgctctgtcacccaggctggagtgcagtggcacaatctcagctcactgcaacctctgcctctcgggttcaagcgatgctcctgcctcagcctccctagtagctgggactactcggctaattttttttatttttattttttatgaggctggagtgcagtggcaccatctcagctcactgcaacctccgcctcttggattcaagcgattctcctgcctcagcctcaccaagtagctgggattacaggcatgcgccaccacgcccagctaatttttgtatttttagtagagacagggtttcaccatgttggccaggctgatctcaaactcctgacctcaggggatccacccgccttggcctcccgaagtgttgggattacaggtgtgagccactccgcctggcctgatttttacttttttttgagacagagtctcactctgtcacccaggctggagtgcagtggcacgatctcggctcactgcaagctccacctcccgggttcatgccattctcctgtctcagcctcccgagtagctgggactacaggcacctgccaccacgcctagctaattttttgtatttttagtagagacggggtttcaccgtgttagccaggatggtctcgatctcctgacctcgtgatccgcccgccttggcctcccaaagtgctgggattacaggtgtgagccaccccgcctggactgatttttaaatttttttttttttttttgagacagagtctcgctctgtcacccaggctggagtgcagtggcacgatctcggctcactgcaagctccacctcctgggttcatgccattctcctgtctcagcctcccaagtagctgggactacaggcgcccgccaccacgcctggctaactttttgtatttttagtacagacagggtttcaccgtgttagccaggatggtcttgatctcctgaccttgtgatccacccacctcggcctcccaaagtgctgggattacaggtgtgagccaccgcgcccggctaatttttaaattttttgtagagatgagatctcactctgttacccaggctggtcttgaattcctgggctcaagcggtcctcctgcctcaatttcagtagtagctgggactacaggtgcatgccaccacgcctggctaattaaaaagattttttttgtagagacaggatcttgctatgttttccaggctagagtgcagtggcacaatcatagctcactgttgccttgaactcttggcctcaagtgatcctctagcctcagcctcccaaagcagtgggattgtaggcatgtgccactctggcccgaatagatgaggggagatcatttaagatggcattgctcagtctcactagtgggcatacatctcagagaaatcttcatatagaccgcaggggaataagcatgaggttgttcactgtggcattgtttgtggtagccagtagtagttggaggcaacttacaggtccatcataactgaaatgttgctgcccacttcgaaatattgcatggttgctgtaagtcataggtaaagtgtgcccacaatgacaggtgttgaaagcagagggctgaggcctggcgcgctggctcacgcctgtaatcccaggaaatttgggaggctgaggttagtggatcacctgaggtcaggagtttgagaccagcctggccaacatggtgaaaccccatctctactaaaaatataaaaaattagctgggcgtcgtggcgcgcgtctgcactccagcctgagtgacagagtgagactctgtctcaaaaaaatttttaaaataacaaataaatagagaggccgtgcagagcccaatgacgaagtgtgtcattaagtagaaataagtaactcaaccttagcaccagcgattaaaaaacagagaacctttgcagttgtttagggaagatgtccctactttggcctagggtggatgtggtggaggtgaaaagtaggtggattgtgttatatgaatgaatatgtgtaaaggattttgaacagtgcccggtgcatagcaagtgcctaacaaatgtgtttttatattgcagacacgtggtggattgaatgagggaggggagggaaagggtgatgtcagggataacccccaggtgctggctcaggacattgtactaagtaggaggtgggacatgaaaactgagtatagatgattcttttgagaaatgtggatgtggagaagacagagcaattccttacatgtggacaacactctaaaacactttttaaaaagttaataaatacatgtttattgtagaaaaatcagaaattaacgataaaattttaaaacagggcagagaccaaaataatttaaaaaacaactgtaagctctacatctctcctgatcagtgactagggttgattttttaaatttattttatttatttattttttgagacagagtcttgctctgttgcccagactggagtgcagtggcgcaatcttggctcactgcaacctccgcctcctgggttcaagtggttctttcctgcttcagcctccagagtagctgggactacaggtgcgtgccaccatgcccagctaatttttgtatttttagtagagacatggtttcatcatattggctaggctggtctcaaactcctgacctcgtgatctgcccacctcggcctcccaaagtgctgggattacaggcgtgagtcaccacgcctggcctagctagggctgatatttaacaatcaggaaaaagagcccctgagacctttacaaatgcaaaatttgcaaaatccctcaaagcataaccttcataaaaggcagtaagtagaactgcagctgggtggatgggcatgtcattcactgacctgacgcccacagaaagaactgcaagtgtgatggaagaaaatgatgcattaattttggggttaacatagtttcagtgctaacgcctgagattctctaataaacagaaaaatactgacggggctgaggttggtggctcatgcctgtaatcccagcactttgggaggctgaggcaggaggatcgcttgagcccaggaactcaagaccagcctatgcaacatagcaagacccccatctctaccaaaaaaaatttaaaaatcagcagaatgtgctggtgtgtgcttgtagtcctagctactcaggagccctgatggcaccactgcactccaacctggacaacagagcgagaccctgtctcaaagagaaaaaaaaagaaacatgtgatggccaggcactgtgctaggtactaggaatacacaggtgaacacaagatgatcccaatctcataggacttgcaagtttatcaaataatcaacaaataattacagacatttgtaggttatgtaagaaactttaagataccaggatggctttcgataaaataccattgaggctacatgtccattgcacgtccatatccttagtactttcctgagaagattccctagaagtgcgatttctgggtctaaagatctgcttgttttttgtttgtttgtttttttgagatggagtttccctcttgtcacccaggctggagtgcaatggtacaatctccagtcactacaacctccgcctcctgaattcaagcgattctccagcctcagcctccccagtacctgggattacaggcacccgccaccacgcccggctgatttttgtattttttagtagagacggggtttcaccatgttggccgggttggtttcaaactcctgaactcaggtgatccgcccgccttagcgtcccagtgttgggattacaggcgtgagccaccgcgcccggcctgtttttaattaattttttaacaacagacttttattttttagggcatttttaggttcacaacaaaattgagcagaaagtacagttttcatattacccctgcgcccacccacctccagcaagcagcaatctgttcgctttcaagttttatttatttatttatttattgcattttgttttaaatagagtctggggaaatgggagaaaacgctgaaaacgcacaagcactttggttggttaaattagggttccgccaagagccggagcggtgtgccaagtgaaaactacatttcccacggggcagcgggtcacgtcacagaggaacgactacgcatgcgtgcaaggtcctccgcgcgcgactacgctcataaaaggaaaaaaaagcgtgtgcggttctcgacgtgccgccaatcttcgaacgcaggtctgtgatcatccgcagactccgaaaaagggttcgaggaacgcgcctgctcccctcgtcgcagtttccagcccgacgagcttgttttgtcccggactcggtaggtggcgacgggccgtggcctgagacctccggcgaaacgcgggagcgaagggctgagtcctccctccgcgccgcggctcccgacctccmtgaggcggcgctctaggggcggtgcgcacgcgctctgggcgggaggggggcggggctcgtgggggtgggggcgggagaggagggcggggccggggctcggggagggcgggccctgcgcccggccgctcgaggtctgcgcttgcgtgcttccatccccggcgagggtgggaaacagcgacacgctgggctcggcacggacgcagcttccaggtggggtactcggacccgggtcacgaagatgcggacagaggatgggccccgaactccagcacttattttatgatttgcacaaaaattttgtatatatatatagttcttaacaagatacactaacagctcgtcgtttgcccaggaggctcaacctcccgcctcggcctcccaaagtgtggkgagtataggygtgagcccccgcgcccggccaaaaaatgcccgtcttaagaacaacaawacagcctccttcaccctmgctatcctscagttacctcctcctcggctccggtttgcagccaaaggccttagtctaccctcactaatgccttttctcctccaagtcttgaacccttgagcctctagtcaggctttggtctccaccactccactaaaaaggcttcttgtcaaagccaccagtgatctctaggtggccaaatkcattgttaagttaggtctcagtcctgttcagcatttgatgctgtggatcactgcccctccttgaaacactgttttcatttggcttgctgaacgttctcttcctttgcctctgctctctctggcttctcctctgctgattctaacctaggcatcatctcacatttttgtttttattagagacacgttctctgttgctcagactggagaacagtggtgytattacagctcactgcagcctcaaactcttgggcttaagcagtcctcctaaccaaagcctccccaaatgctggaattacaggcatgagccaccgcaatcccagtttcacattttaaatgtaaatactggccaggcgcggtggctcatgcgtgtaatcctagcactttgggaggccgaggtgggcagactgcctgagctcaggggtttgagaccagcccgagcaacgtggtgaaatccagtctcttctaaaaaaaaaaaaaaaaattaaaaaattagccgggcgtggtggtgcacgcctgtaatcccagctacttgggaggctgaggcacaataatcacttaaacccaggaggtggatgctgcagtgagccaagatcgtgccactgcactctagcctgggtgacagagcaagaccctgtctcaaaaaagagttctagaggtggaagaaaatccacatataagtggacctgcacaattaaaacctgcattgtttgagggtcaactgtatagctattttaaaagagatttattgtgatggattgggtgacactattatagaggctgagaagtcccgagatttgccatctgcaagctggaagcccaggaaagcaaaccctcaggaaactcacrgacacactctaaagtgtttcaccagctatctgggaatcccctagcccaatcagtttgacacataaagttaaccatcacatttccctagctttgtttttcagttgcctcaatcatcattttactggtgatactttgagtgttgtcataatagcctaatggtgggttggcagcttccacttttgtgatctcttttactattgaatatgctgaagtcgtgacacaacttggaattcagaggaagagcataggttttagaacttgcagccttgcagccccagctcaactacctatttttcctgagttacctagcataacctatctgaatttcagtttcttcactatacttactattctgttatctattttataggattgctgtaaggtttaaatgagaaacactggcataagttgcaatacagaggcatgaaggaaaaaaattgtcttcttaatgtctctttaaccaattgatgaatatagattctatttatttatttatttatttttgagatggagtctcgctctgtcacccaggccggagtatagtggtgcaatgtcaactcactgcaacctctgcctcccgggttcaagtgattctcctgcctcagcctcctgagtagctgggattacaagcatgcaccaccatgcctggctaattttttgtttgtttgtttgtttgttttgagacggagtttcactctttgttgcccaggctggattgcaatggcgcaatcatggctcactgcaacctccgccttccggtttcaagcgattctcctgcctcagccttccaagtagctgtgattacaggcatgtgccaccacacccgattaattttgtatttttagtagagacagggtttcaccatgttggccaggctggtcttgaactcctgatcttagttgatctgccggccttggcctcccaaagtgctgggattacaggtgtgagccattgcgcccaacctacttatgttttttttagaaacaaggtcttactctgtcacccaggctggagcctagtggtgccattatagctcattattcccaaattcctgggctcaagtgatcctcctgccatagcctcctgagtagctaggactacacatgtgcaccaccctgcccagctaattattttattttgtttttgtagagacagggcctccgtgtgttgcccaggatggtcctgaactcctgacttcaagtgatcctcccatttcggcctcccaaaatgctgggattacggtcatgagccactgcacccagtttgcagattctcattgctagtgactgggttgagagtgtgggatgtgagtgtggggtattaggttcctctttccctttgacccagaacaaagctcttactgttttaagccctgtgggattaatcttagagtggcttaagtgtaggatatttggatttgtttatttgaggccttttatgctattatagtaaaagggccagcaattttaggctgggtattagtggttaacatatgcttctaccctgcagcctttgtccctcagaattggctatctcttcagaccgtgcttaatgaaagttcttattagtcaagctactcagttgcagataacaaaaagctactctgactagcctaagctgaaaggggtgtttgttgactctgtgatattgtaaaatatatatctggtttgtatyccagtttggagcttcctggagggtggcgtgcccagggtgggtatggaagctcttcgctccttcccacatgctttgccctgtgcacctcttccttcatctgtatccattgtgacatcctttataataagccagtaaacctaagtgtttccctgagtgctgagagctgctcctgcaaattaatggaacccaaggagggagtcatggaaaccctgatttatagtcagttggtcagaagcacaaataaagcaactgggggcttgtgactggcattgagaattggggggacatgctcgtgggactgagccctcaacctgtggggtttgacactctgtctgggtggatagtgttggaaataaactgaattagaggacatccagcgtgtatccactgcagactcaatggattgattggtgttggggagaaatctccacacatttggccacggaaatcttatgtgttgattatcctatattgtgacagcagaggagaaagttttgttttttcctcacagactgtagctgaagagtcctggagtaaatcagtttcagatgggactctatccagaagcctaaattatgtcaccagtattttctgtttttctttctctgttttttttttttttttttttttttttcagagacggggtcttgctgtgtttcccaggctggtcttgaactccaggcctcaagagatcctcctgcctcagcctcctgaaagctgggactacaggagtccaccaccacacctgggtacttttttttttttttgaaacggagtctcgctgtgtcgccaggctggagtgcagtggtgcagtctcgactcactgcgacctccacctcccgggttcaagtgattctcctgcctcagcctcccaagtagctgggactacaggcatgcaccaccatgcccagctaatttttttttttttttgtatttttagtagagatggggtttcaccatgttggccaggctggtcttgacctcttgacctcatgatccacccgccttggccttccaaagtgctgggattacaggtgtgagccaccacgcctggctgcacacctgggtactttttatttttggtagagatagagcctcgctatgttgacaagtctggtctcaaactcctgggctcaagcaatcctctgtacttggcctcccaaggtgttgggattacaggcatgagccactgcgacccgcctgtttattggttttgttaaatgccttgtcatgaggcattaaaaagcccatgatggaaagaagatagccccagagaagggattccaaattcttcacaaattcttcaacagatgagtggattaaaaaygacatctatccatagaatggaatgttatttaaccataaaaaggaatgaagttactgatacatgctgtgacattgatgacctttggaaacatgctaagtgaaagaagcaagtcacataaggtcacagtacaattctatttatatgaaatgtctagaataggcaaatctacaaatatgaattagaataatggctgccagtgactgagaggagaagggggtggggaatgactgctaatgagtataaggttttaaggagagttggtgaaaatgttctaaaattagatagtggtgatatttgcacaaccttgtgactaacrtaacactgaattgcacactttaaaaaagtgaattggggtgggtgcggtggctcacatttttaatcccagcacattttgggaggctgaagcaggaagattgcttgagcccagtagtttgagaccagcctgagcaatatgatgagacctcatctcaacagaaaattataaaattagctgggcgtggtggtgcacacctgtagtcccagccacttgggaggctggggcaggaggattgactgagccaaagaagtcaaggctgcagtgagctgtaattacaccacttcactccagcctgggcaatgagagtgagaccctgtctcaaataagtagatagagagatagagaattgtatggcatgcgaattatcttcattaagctgtttttgttgttgttgttgttttgagacggaatctcactctgtcacccagactggagtgcagtggtgcgattttggctcactttaacctccgcctcccggattcaagcgattcttgtgcctcagcttctcaagtagctgggattacaggtgtgtgccaccacacccagctaatctttgtacttttttagtagagacagtgttggccaggctggtctcgaattcctggcctcaagtgatctgcccaccttggcctccaaaagtgctgggattacaggtgtgagccaccgcacccggcccattaagctgttattttaaaaagtctgcctaaamctctgaactagacaaacatggggcatattccaagcaacttagccaagtttaaaagatcagtacagatttcagctgatgcttgcctcagggaagctagatttggagtttgagttcagctgtgattaactgcatgttaacagaaacaaaacaccaaactctcaagaacataacagaatccagagtctacaacacatcatctacaatgtccaggatataatccaaaattcttagacacaagaaatggcctgggcatggtgtcttatgcctgtaaacccagcacagcactttgggaggctgaggcaggcagatcacttgaggacaggagtttgagaccagcctggccaacatagcagaaccccttctctactaaaagtacaaaaaaattagctaggcgtggtggtacacaggaggctcaggaggctaaggcacaagaattgtttgaacccaggaagtggaggttgagctgagatcgtgccaccactccagcctgggcaacagagcaagactctgactcaaaaaaaaaaaccacgaaaattttaaaatatatttttacaaaacaggaaaatatgatctgtgttcacaaaaaaaggcaatgaatgggcccggcacagtggctcacgcctgtaatcccagcactttgggaggctgaggtgggtggatcacgaggtcaggagttcgagaccagcctgaccaacatggtgaaaccccatctctactaaaaatacaaaaattagctggrcgtggtggcgcacacctgtaatcccagctactcaggaagctgaggcaggagaattgcttcaacctgggaggaagaggttgcagtgagccgaggttacaccattgcactccagcctgggcaacagagcgagactctgtctcaagaaaaaaaaaaaaaagaacgaaaattttaaaatatatttttacaaaacaggaaaatatgatctgtgtttacaaaaaaaggcaatgaacgggcccggcgcagtggctcacrccggtaatcccagcactttgggaggccaaggcaggcggatcacgaggtcagcagatcgagaccatcctggctaacatggtgaaaccccgtctctgctaaaaatacaaaaaattagctgggcgtggtggcgggtgcctgtagtcccagctacttgggaggctgaggcaggagaatggcgtgaacctgggaggcggagcttgcagtgagctgagatcgcaccactgcactccagcctgggtgacagagcaagactctgtctcaaaaaaaaaaaaaaaaggcaatcaacgaagatcaaccccaagaggacccagatgttggtatcaactgacaagaattctaaaagagaatcaaaataattagttaaaataaatttttttaaaaatttaaagcagttattaaaacttcgtcaggccaggtgtggtggctcacacctataatcccaacaatttgggaggctgagtcgggaggatcgcctgagcccaggagttaaagaccagcctgggcaacatagtgagaccccatctctacaaaaagtttaaaaattagctggacaggcacagtggctcacgcctgtaatcccagtactttttgggaggctgaggcaggcagatcacctgaggtcaagagttggagaccagcctggccaacatggttaaaccctgtctctactaaaaatacaaaaattagctgggtgcggtagctggcacctgcaatcccagctacctgggaggctgatgcaggagaattgcttgaaacttggaggtggagattgcagtgagccaagatcgcaccactgcactccagcctgggcaacagagcaagactccgtctctaaaaacaaaaaacaaaaaaacacaaaaggtgcaggggaaagaaagaaagaaaagatgtggccttctaagtcagtgggaacacgagcatgctaggagtcaaaaagtttagggtactgggcgttacctcagcattcctaagaatgcttgaaaccttgctggaattgctgagcctctcagggtttgggacagttttgtttacatgatagaattgtgataagattagctggcaccctcggactctgataaaaccagccacttggcctggaagtgcagtgtcccctcatctggccttccaattcattatggttccaaccccagggcctcattcccacttgctttgcaccagcaggcttggcatttgttctcagaaggtcacagaaacctttgcttctacttagaacatgtttcctggggaagtttagacttatgactgaccagatccagagatagcagcactttgatgtaaaatcataggaagagcttgttctctcagacaagccactacccagtaggcaaagctcaaacgagagcccttaaatggtgtggtctttggccaggccatcatcgtggggttattcctaggtttggcaagcgtcagcatttcttttgcttgtgcgattggctcttttgctcagtgtaacagcagacccctggcctccagatgagaagggccactagcgttcactaagtgcatgctctgggccggccactgcctaggacctttcttagatagttgatcatcaagtaggtgctcttgttttaattttattgagacccagaaaggttaaataattcatccagggtgagtgtgaggctttatgagaactttacagttgttctctcccttccccctccttggactattcctggaacatgaaggtccagttcctttccctgatggctgtatggcaggtggcgtacttcatttctttgtgggaaattatacttgtattgatgctgggcatgctgctcgcctcttcagtgttttcccaagtaaggtctgacaaatggggatccaagccctcctgtatttcaggctttattttgggtaccaagatgcaaagacaatccattaagacagttcttggccgctcatggtgactcatgcytgtcatcccagcactttaaggaggctgaggcgggaggattgcctgcgcccaggagtttgagatcatcctgggcaacaaggcaagacctcatctctacaaaaatatttaaaaattagctgggtgtgatggtacatgcctatagtctcagctacttgggaggctgaggtgggaggatcacttgagcctgggaggtgcaggctacagggagccgagattgggccactgcactccagcttgggtgacagagtgagaccctgtctcaaaaaaaaaaaaaaaaaaaaaaaagacttagttcttctacttttaaggggcttgaagtctgagtagaagactcttccacacatagaaagcagtcttaaaagggtgtgtgtgctctgattgtggttatataacatttacagaaggtggatacagaatgaaaatcacttgaggttgttgggatttgctttaaaacatcctttaatgttgcatttttctttcaccttaattaggggaaaaagggagataattggaaacaggggtgaccagagtgctctggggaggcagaggttctgtaataactgttggtagccaaggaggccacaaagaagagaggatgtttgcgtggtaagagtgtgttgccattcgccagatacgtgccagaggcaagggrcatcaaggcagtgggcacagttagatggtccactttgaaagttcgtggctgatgggatccagggatagcaagagcttattgtgaaattacaaaatgaggtggttctgccaggctaggcactacccagtaggcacagtgatcttccagaccacgtggtcagctctctccctgaaagtttcaacctctgtgtgttgtgtgtctatctgtgtgtctttgtcagcaaaagcttttatgagatacacaccattttttcttgttatatgtacatgggatatctttaaaggaatacccaagaaacaactagttgcctgtagcgataggagatttcgttgtatttcaaaaataatctgaatttttttactacgtgcatatattgtttactcagttttgtgtgtgtgtgtgtttttctagagaaacagactttttttttttttttttttttttgagacagagtcttgctctgtcacccaggctggagtgcagtggcgtaatctcggctcactgcaacctccacctcctgggttcaagcgattctcctgcctcagcctcctgagtagctgggactgcaggtgttcctgagtagctgggactacaggcgcacaccaccacacctggctaatttttgtatttttagtagagacagggttttgccatgttggccaggstggtcttgaactcctgacctcaggtratctgcccgcctcrgcctcccaaagtgctgggattagaggcttaagccactgtrcctggccaagagaaacagactttatgaacaaccacatgagacagtgagacaggtgatgaggacctaaactaaaacaatgacaagtgtggtgggagagagggggctgcattcccagcttgggaagccagctgtgcagcaatgctgttaaccagcatctagaaggcagagcagtgcgggactggaagtgtgagcatctgcgggtgcatctcagtgggattattcagggggcagttggaagtctgaattgggagccttgagaggtcagggttggtgacactgatttggaagtttagcctgaagctgatgagaatgcttagggagtgcttagagaatgagaagaggatcccggagcgatcttccaccgggttagagaaggaggcggcaacaaaccagaatggtggttagagacactggggagcgtggaggcctggtgtgttagcgttctccagagggacagaactctgtgtgtgtatatatatatgtgtgtgtatatatatatgtatatatataygtatatatatatatacgtatatatatayacgtatatatatacacacatatatgtgtatatatatacatatatgcatatatatacgtatatatgtgtatatatacgtatatatatgcatatatatgtatatatatgtgtatatatacgtatatatatacatatatatgtatatatatacatatatatrtatatatgtatatatatgtatatatatatatacacacacacacacacacacaaacacacacacacacatatatatgagtttattagggagaattgcctcacgattacaaggtgaaatcccatgataggccatcagcaagctgaggaaagagagaagctggtagcataattcagtccaagtctgccagccttaaaaccagggaagccagcagtgcagctgtcagtctgaggcctaaggcctgagagcccctgagaggtgtaagtctcagagtctaaaggccaaagaacctggartctgatgtccaagggcaaggggagaggaggccaagtgtccggcgtgacacagaacagagccagcacgcggactcagcaagctgctggtcccccttcttccgcctgctttgtgccagccatgctggcagccaactggacggtgcccacccatatggaggatgggtcttcctctcctagtccactgacaaatgtcagcctcttctggcaacaccctcacagacacacccaggaacagcgcttcaccagccgtctaggcatccctcaatccagaccagttgttacctaggattaaccatcacacctggaaatctagagagtggagctttgaggtgcagtatgtaagcaggtgtgcagtgcagcagaaaggtccaggagctgccaggagctccctgggagctgagggtgggctgaggcgtgaatgggagaagtgacgatggtaggtatggtagttttttgttttttattttgagacggagtctcgctctgtcacccaggctggagtgcaatggcgcgattttggctcactgtaacctcctcctcctgggttcatgcagttctcctgcctcagcctctagagtagctgggactacaggcacccgccaccacacctggctaatttttgtatttttagtagagatggggtttcactatgttggtctcaaactcctgacctcgtgatccacccgcctcggcctcccaaagtgctgggattacagacgtgagccaccacgcccagccaggtatggtagttttatggtgaaggaaaggatagtgattcagtcagcatttattgagaacccagtgtgccaggctctctgctaggtatggagagtaaagtgatccctatcctcaaagactggacaaactaggggaggagacaaatatatacaaagaagatttgaatgtgatttggtaggtacagtgctagaaagagggtcttgggggccgggcacggtggctcacgcctgtaatcccagcactttgggaggctgaggtgggcagatcacgaggttaggagatcgagaccatcctggctaacacggtgaaaccccgtctctactaaaaatacaaaaaaattagccaggcgtggtggcgggcgcctgtagtcccagctactcaggaggctgaggtgggagaatggcatgaacccgggaggcagagcttgcagtgagccaagatcgcgccactgcactccagcctgggcaacagatcaagactctgtctcaaaaaaaaaaagaaaaagaaaaagaaagagggtcttaggggaacagaaaggcaacttaaccctgcctaggagactgggagtttcagtttgtgatcagtggaggaggtgacttggtgctaagctagatcttaaagattaagtaattaactgagaggattaggagtgatctggatgtcccagatagagggaacagtgtgaacatagggcaggcatggagataagaaattatgtggggctgggcgtggcggctcacatctgtaatcccaacacttttcagagccaaggtgggcaaatcactttgggctcaggagttcaagaccagcctgggcaacatggygaaacctcatctctacaaaaattacctgggcgtggtggtacacacctgtagtcccagctactcaggaggctgagcctggagagagaattgcttgagcctgggaagcagaggttgcagtgagccaagattgcaccactgcatactagcctgggcaacagagtgagaccccatctcagcctcccaagtagctgggattacaggcgtgcaccaccacacccagatactttttttgtatttttagtagagaccaggtttcaccatgttggccaggctggtctcaaactcctgacctcaggtgatctatctgccttggcctcccaaactgctgcaattacaggggtgagccaccgtaccccaccagttaattggcttttaaagtacattcaattataaaatcattaccataatccaattttagaatattttctggacacactgattttcttttcattttcttgacttttaaaaatattatttttttaaggctttaacttcagtatgattttttaaatattatttttattatggaaaatttctagccatagagaagtagaagtgtgtaagaaatatccatgttgagcatagtaatttggggtcttttctggatagagatgttcaaccagtgagtgagtatcttagttcatttgggttgctgtaacaaaataccttaggctggatatttgtaaacaacagaaacatattgctcatagttttgaaggtgccatctttgaagcacagagcaagccctcaccagatgccgaatctgctggcaccatgatcatggacttcctagcctctagagcaatgcatttctgttgtttatacattccctagtctaaaatattttgttaaagcagccaaatggattaagacaaattggtaccagaagtggggtgctgctataacaaatacctgaagatatggaagcagctttggaactgggtagtgggtagagactgagttttgacgttcatactagaaaaggtttacattgtcatgaacaaatcattaagcacaggtgtggtaagggcacaggaggagagctgtagagaaagcctcagtcttcttagagatgccctaagagggcatgaacagaatgttggtggaaatatggatggtaaaggccattctgatgagatctcagatggaaatgaggaacatgttagtggaaactgggggaaaggtgatctttgttataaagtggcaaagaacttggctgatttgggtttgtgcctgttgacctaaaggaacaagcctaggcaaaattaatgtagagtttatttgggccaaggttgaggactgcagcctgggacacacttgtaagttgccttggggagtgctctgtttggcctttgttacaagcagatttttaaaggcaaaagggaatgaggagtgggctcacacaaagttttttgacaggggccaggtgtgttgactcacgcctgtaaccccagcactttgggaggctgaggtgggtggatcacctgagatcaggagtttgagaccaggctgaccaacatggtgaaaccccatctctactaaaaatacaaaaattagccaggcatggtggtcggcgcctataatcccagctgctcaggaggctgacgtaggagaattgcttgaatccgggaggtggaggttgcagtgagccaagatcatgccattgcactctagcctgggcagcaagagcaaaactccatctcaaaaaaaaaaaaaaaaaaaaaaaagttgtttgacaggaattctcgttgatttacagagataacatgaattagtgactggctatacattgttgaactataggatatgagaaattacagaaaatgccagtgtatgacattgtatagctactttgcatgagttagtttagagctcacatagcaagtggcttcatgaggtgattgattatttagcttaagtgtggagtgagacatgactgctgttgcatctcattgcttctctgggcttgataattaaggggtggttggggggggctcacattcttcagattaaaggtttcttggccaggagcagtggctcacgcctgtaatgccagcactttgggaggccgagggggatggatcacgaggtcaagagatcgagaccatcctggccaacatggtgaaaccctgtctgtactaaaaatacaaaaattagcggggcatggtggtttgtgcctgcaatctcagctacttgggaggctgaggcaggagaatcgcttgaacccgggaggcagaggttgtggtgagctgagattgtgccactgcactccagcctgatgacagagtaagactccatctcaaaaaaagaaaaaaaaaaaatacaaaattagacgggcgtggtggcgtgtgcctgtaatcccagctacttgggaggctgaggcaggagaatcgcttgaaccygggaggcgaagtttgcagtgagccgagatcacaccattacactccagcctgggcaacaagagcgaaactctgtctcaaaataaataaataaagtaaaagaaagaaagaaataaaaataaaagcttcttttctttcttatgtcctagtgttttgtgggagaacttaagagtgatgaaatagaatatttggtggatgaagtcactgaacaaagtggtgagggggtggcatggcttctcttgacggcttatagtaaaatgtgagaagagagaaacaaactaaatacagaatttaaagccaaaaggaaagcagaacttaagcatttggaagattctcagcatggccacgttgtaaagaatgaaaaagtaggctgggcacaatggcttacgcctgtaatcctagcactttaggaggttgaggcaggtggatcacttgagctcaggagttcaagaccagcctgggcaacatggtgcaaccctgtctctacaaaaaattagccgggcatggtggcatgtgcctgtggtcccagcttctcaagaggctgaggtgggaggatcacttgaacctgggagattgaggctgcagtgagctgaaattgcaccagtgcactccagcctgggtgacagagcgagagcctgtctcaaaaagaaaaaaaaagaataaatgtatttggagagaatatgaaaggtgtggccaagccatcctttgataaggagactagtatggatgtggaagccaggtactaatcaagacaatggaaggatgaccccgaaggcatgtgggggctgtcacccccatcacaggcccagaaggcccagggtgttgggggcagaaccatttcaaggctctgttcctagcattctggggcagtgctccttggcagcccgaggtagtttggcagcatccacatggcgctgtctttgctggtgcacagaatacacaagctgtaggggcatggctacccccacctagattgtaaaggatgccctgaagagccttgggcccaggcagagaactgacacagggtaaggcccctgcagaaagtccccattagggcattgcctagcagagctatgggggtagggttgcctctgagaccccagactggtagagccaccagtgtgcaactccagcctgggagagccacaggcatgcaactccaacaagtgagggctgttgcatgggctgtgcccagcaaacctgtacaggcagggctgcccagagcccagcaacatgtccctgccagtgtgtccagaaggtaggaggacatagagttgaagaaggttgttcagaaaccttgagattgaatggggtttgctctgttgggttttggacttacctgggacctattacccctttcttctttgttgtttctctcttttagaatgtctgtcctatgcctgtcccaccgttgtattttacaagcacataacacgtttgatttcacaggctcacagatggtggggaatttgccccaggatgaattgtactttgagtctcacccatacctgattgattgattgatttttttaaattttatttatttatttatttatttatttatttatttagcgagagagtgagcctcactctgtcacccaggctggagtgcactggtgggatctcggctcactgcaacctctgcctcccaggtttaagtgattctcctgcctcagcttcctgagtagctgaattacaggtgcctgccatcatgcccagctaatttttgtatttttagtagagacagggtttcaccatgttggccaggctggtcttgaactcctgacctcaagtgattckcccaccttggtttcccagagtgtgggattacaggcatgatacaccacacccagccacccatatctgatttagatgatagatgagactctggactttagacttttgagttgatgctagaatgagtttctatttggggccattggggtggactgaatgtattttgcaagtaaaaaggacatgacttttgggggttcaggagccaaatgctgtggtctgagtgtttgtgttcccctaaaattcatatgttgaaacttgatccccaacatggtggggcctttgggaagtgattaggctgtgaggattccactctcaagaatggggttagcgcccttatgaaagaggcctgagggacttgtgttgccccttctgccatgttgagaatgcagtgagaaggcaccatctttgaagcggagagcgatgccgaatctactggggcctggatcttgtactttccggccttcagaactgtgagcaataaatttctgttgttggccaggcatggtggctcacgcctgtaatctcagcacattgggaagccgaggcaggtggatcacctgaggtcaggagttcgagaccagcctggccaacaaagcaaaaccccgtctctactaaaaatacaaaattagctgggcgtggtggcagacacctgtaatcccagctacttgggaggttgaggcaggagaatcgcttgaaccagggaggtggargtttcagtgagccaagatcacgccactgcactccagcctggcgacagaactagactccgccttaaaaaaaaaaaaaaaaaagattctgaatmtttgggaagccctctgggctggggatcgatttgggagtcagtaccatgtggttcatagttgacgcggtagcttgcagaagccaaggaaagcctacgctttcaaaaaaagtttggaagagtcaatgtaaggaaatccaaagtggacctaactgtggagatgggggtcagggaaggagagagctggggtgtgaagtagtgaaaattagaaaagtgcctgctaagtccctgacgctactaatgagtggtgattgattgatgaaagcagagatttccrttcttgcctgagagcttctagtctgttggggaagaaaagatacaccaatagcagctggctagaaggccagtttcttctttttttatttttatttttattttttgagacggagtctcgcactgttgcccggactggagtgcagtggcacaatctcggctcactgcaagctctgcctcccgggttcacgccattctgcctcagcctcccgagtagctgggaccacaggcacccaccaccacgcccggctaatttttagtatttttagtggagatggggtttcactgtgttagccaggattgtctcaatctcctgaccttgtgatccacctgcctcagcctccctaagtgctgggattacaggcgtgagccactgcrcccggcccttttgtatttttcttgagacggagctcttgttgcccaggctggagtgcagtggcacgatctcggctcactgcaacatccgcctgctgggttcaagcagctctcctgcctcagcctccgagtagctgggattacaggcaccggccaccacgcctggctaacttttgtattttcagtagatacagggtttcaccatgttggccaggctggtctcaaactcctgacctcaggtaatccgcctgcctcggcttcccaaagtgctggtattacaggcgtgagccactgcgcccggtagaaggccagtttctaaaggcgtgttgcagagtccatgtcagttctaggaagaatcaagcaagagaaaagtgtgcttctttaggactggtcaggcaagcgcagccttgagccagaagggaaagggctttgcaggtaggagtgggcaggcagcaagatcgtgtgtctgagacagtgtagagggaacaggccagaaggaatgtcagctgagccggggaggtgtcgctgggtatgatccagtgctagagcctgtctctcgctgcgcctgcctcctctcacacagccccctcttctgtccctggcttctcagcatgaaactccccccagccacgtgttcacattcctccgtgtcactttcctccattcagcaccccccataccccttcttgctcgctggcctcccagctgtactcccagacagagtaacctacatttgcttcctgcatttgcctccccctcctgtgtgttggcttctgtctcttccacggaaaatgttttccccaaggtcctcagtgacttcctcagctttgggagacccctctgagtcctcttctgtggcatttggtgctgtttatcatcccttctgtgactttcttttgacggatgtacagattgggagatggcactacacagctgggaagtgggggtgaggacctgggggggtgtaagagatagccaggctccagcccagaggaggagctggaggtgggtggccggcgaactgccaggagggaggccctgaagccagaggagaagggagtagcatcatgtcaagatcagtaggccacatcggaagcagcagagagggccctcacgcttcccctgcaggggctgttgactctcttgatgagagactgatgaggacagagctagagaagtgggttggaaagtgaagtggggacaaggaagcagcaccggatccctgcacaatttagggaagaagttttgccgtgaagaggaacagaggtgggggcctctaaaggggtttggaagctcttttgtgttttttcaggatgaactctcctcaatcatgcttgttcactggtagagragaaaggattcgctgacagtcggaggggagatggagttcagaacacaaatgaagactgtttttccctctttagggtgaaggcagaggtgacaggcattgctatacagagcttgtagttttgatggtgggcataaagtctctggcttcccttccgagtgaagtaggaacctcagatatcagctaataggacccaggcctgggtctgagggcagtatcaaggatattgaggagagaggaggtttgaagtgtgctaagggaaggctaaccagatgacttggccacgtggttgcagcacctctcgctgtttgtgacagtgctgtgtaaagtaaaaccccctgtccagtggtggggctgttaatagggctcaggtgcgggcatgtgcaaggcgggccattggttttgttacgggtggaaggtatctgagttaccagcagcaaatctgtacgggtttgcagcaatctcacttcttgcctgttaagaattcgacttgggcacaaggcaggaaaagaccgaggcaagtttcagagcaggagtggaagttcattaagaagctttggaacaggaaagaaaggagaagtacacttgaaggagacccacgtgggtgctgaggtccagtgcggtgtttaaccttgatcctaggacattctaggaccaaggctggcccttttcccatgattcttccctcacggcgagctgcccgcatgcacagtgtgctccttacccttgggaggtgggcacatacacagtgtgtaggaagttgtacggatgcccatctgaggctttcttcactgttctggtgatgtgccctgggaggccatgctctgccatttggtctcttaatgtgcatgctcaggaaggtgcgtctccttggtgtctgcattcaattaacacttcagtgcatcaagtgtggaccgtcaggaaatggcctctccctggcacctagtgggtgggggagagccctctcytgccctgctcctgcctgtccaactccctataacagtttcagccaggattcctgctttagcaggagagaataaccctttctatgccaagccacaccttccctgatctggccactgagcttgcatcttctgtccacaccttcactttctttgttatggctcactggggttctttcctttttcctcacttagcagatagtctctagcctcatcagttcccaagactttagcaacagcctgcatgctgatcatgctcagatttatccacttccaatctgtgatctaaactccacttttattcttttgtgtggttttaactaatgcaactagggagactaaagcaacttcatcctgtattctaattcaccgtgttcacttctgattaattccagttctggaaaggactccaagatttccagtttgtctattgttccttgtgtaagagtacatacttaccataaatcctgccatggggtcacaccatcttgatgttatcatacttcagttgtccagtgcatcccttctgaaccaccctttccctatggtatacaagccctgggggtactggcaccaggatccaccatctggcttcaccaccacctgagacacagatgtagcttctgttcctaggtctctaaatgtttctaaggggatatgttcttctctatatgacaatgcattgtgtaaagctgtggtggtaaaaacagtgtcgtacatgtgggacaacacagatcaatatcacaagcagctaaaagaaaaagaaattggtcttcataaaaattaaaaacatgtgcttccaaggacacaactcaagacaactggctggacacggtggctcacacctataagcccagcactttgggaggccaaggcgggtggatcacttgaggttgagagtttgagaccagcctggtcaacatggtgaaaccctgtctctactaaaagaaatacaaaaattagctgggctttgtggtgcgtgccttgtaatcccagctactcaggaggctgaggcaggaaaattgcttgaagccgggaggcagaggttgcagtgagctgagattgagtcactgcactccagcttgggtggcagagtgagactccgtctcaaaacaaacaagcaaacaaaaaagacaaataaccaaactttaaaatggtaatatatacagatggccaacagcatatgaaaagatactcaatgccattaaccgttagggacacacaaatcaaaaccacaatgagactctacttcagactcactaggatggctgtaatcaaaaagagagaggccaggcatggtggctcacacgtgtaatcccagcattttgggaggccaaggcaggaggattggttgagctcaggaattcgacaccagcctgggcaacatagtgtgaccctgcctctgccaaaaataaaaaygacagagagagacaatagcatgtgttggcgcaaatgcagagtgggaatgcacattgcaggtgggaatgtaaaatggtcacccagttggaaacagcatgcagctcctcagaaggttaaacagagtttatgtttaatacacttattaagataaacatagtgtaaatacgttaaaaaaaacacattattaattctcatagatatgtacccagaaatgaaaacatgtcatgaatacaaagaaggaaacaacagacactgggcggggagggtaggaggagggagaagcgggaaagataaccatcgggtactgggcataatacctgggtgatgaaattatctgtacaacagacccccatgacacatatttacctatgcaacaaaccttcacatgtatccccaaaacctaaaattaaaattaaaaaagaagggccgggcgcagtggctcacacctgtaatcccagcactttgggaggtcaaggcaggtggatcacctaaggtcaggagtttgagaccagcctggccaacgtggtgaaaccccatctctactaaaaatacaaaaagtagccagcgtggtgatgggtgcctgtaatcccagctacttgggaggctgaggcaggagaattgcttgaacgagagaggcagagattgcagtgagccgagatcacaccactgcactccaagttgggcaacaaggctagaatctgtcccaaaaaagaaaaacaaagaaaacgtgcccmcacaaaaacctgtacacaacgctcatagcagcattattcataatagccaaaaaaatagacgtaacccaatgtccatcagttcatgaactgacatgtaaaatatgatatagcaaaacaatggagttattcagcaataaaagcacaggcctggcatggtggctcacgcctgtaatcccagcactttgggaggctgaggcaggtggatcacccgaggtcaggcgtatcacccaaggtcagacattcgagaccggcctggcyaacatgtcgaaaccccgtctctactaaraatacaraaattagccgggcgtggtggtgggcrcctatagtcccagctacttgggaggcmggagaaacacttgaacccgggaggcggaggttgcagtgagccaacatcgtgccattgcactccagcctcggtgacacakcgagactctgtctcattaaaaaagaaaaaaaaaagtgcagactacataaatctaaagagacagaaagtaaattaatatttgcctgggggtggggtggccatgtaccatgtatttaaagtgtgcaattcattggtttttagtatattcagagttgtgcaaccatcagcacaattttagaacattttcaacacctggccaaaaaaaaaaaacaaaaaaacccatactcattaatagtcgctgtcctttctctcccaacccttccccacccagctttctatggattcggctattctggatatttcacgtaaatggaaacacaattatgtggtcttctgtgattgcagcttctttcacttagcataatgttttcaaggttcatccatgtcatagcgtgtctcagtacttcatttctttttactgtcaagtaatattccactgtatggataatatcacactttatgcattcgtgtagtttctctacctccttcccaactcttgtctcttttttattgtaggtgtgaagtggtgtcttcagtagttttgacttgcatttcccaatggctaatgatacggagcatcttgtcatgtgcttggtgatcatttatatgtcttctttggagaactgtctattcagatcatttttgtatatgggctgagatagggaaccagattcattcttttacatgtggatattcagttgtcccagtaccatttgttgaaaagattattctttccccactaatttgtcttgacacccttgttgaaaattagtcgaccatttctggtttctcagttctattccattgaactagatgtctttgcttacaacatcttgattactgtagctttctttttttaaagttaaaaaatttataaagtagaagtggggctcaggctcgtctggtggcctaggctcgtctggacccctggctgcaagtgatcctcccgcctcagcctcccaaagtgctgggattacaggcgtgagcctctggggcctggccacaattgagttttgtttattgatctcgtatcctgcaactttgctatgagttctaaccttgtcttagtcctaatagttgtttaatggattccttagggttttctatatacaaggtcatgtcatctgcaaatagaaatagttgtacttcttcctttccaatgtggatgccttttatttcatcttattgcctcattgccctggcgagagcctccagaacaatgttgactagaaatgacaagggcccrtgctcatcttgttcctgacttaggggaaagcttttaatctttcgcctttaagtctgatgttcgttgtgggtttttcatagatgcccttcatcaggttgaggaggttaccctctattcctagtttgtatgttattatacttttaaatagcagcagcagagcatgtaagaagatatgaataaatacatggcgagaggttcgcagttgattaagtggggggaagagtttactccattcatcgtgaatctgatctctgtgagtaggaggatgtgttagttgaacaactttaaaaaaaaaaaaaaaaagagggcgaggtgggtggatcacgaggtcaggagtttgagaccagcctggccaagatggtgaaaccccgtctctactaaaaatacaaaaaattagccaggcaaggtggcgggtgcctgtaatcccagctactctggaggctgaggcaggtgaatcgcttgaacccaggatgccgaggttgcagtgagcagagatcgcaccgctgcactctagcctgggcgacagagcaagactctatctcaaaaaataaataaataaaaaataaaaatagagacagggtcttgctgtattgtccaggctgatctcgagctcctggactcaaaccatcctcctaccttcgcctcccaaagtgctgggattacaggtgttagtcactgcccccagcttgaacaaactttgtaagatgcaggctattgtgcaaaattttagcactgtaaaaaatatccccttattttatcaaatatacctttatcttgaggcatatgtctattttcacctacttgtaacttacactcttgattacttttggttgtctttttactcttgttctaattatctttttttttttttttttttgagacggagtctcactctgtcgccaggctggagwgcagtggcgtgatctcggcgcactgcaacctccatctcccgggttcaagcaattctcctgcctcagcttcctgagtagctgggactacaggtgcccaccaccatgcccagctaatttttgtatttttagtagagacaaggtttcaccatgttggccaggatggtcttgatctcttgacctcatgatctgccctcctcggcctcccaaagtgctgggattacaggcatgagccaccacgcccggccctaattatcttttattgtacagaagcattttattttcatcagagtacattcatcttgattgagatattttacagtagtttctctccccatgctggctgggcgtggtggctcacgcctgtaatcccagcactgtgggagactgaagcaagcagatcacctgaggtcaggagtttgagaccagcctggccaacatggtgaaaccccatctctactaaaaatacaaaaattagctggacatggtggcacacacctgtaatctcagctactcaggaggctgaggcaggagaattgcttgaacctgggaggcagagattgcagtgagccaagatcacaccactgcactccagcctaggtgacagggcaagactcccgtctcaaaaaaaaaaaaattatcttcccactatagtaagaaagtaacagcgttttatgacttggaaagtgtcttcatataaaatcttatttgaatctcccaaaatatagcagagatgatccccattttacagattaaaatatggataccagaaatgtttgaatcatttgtcaggatattggcagcagagcaggggctaagggcatgctatctttttaaggcacttcatattaatttttgtatttatatacaaaaattatacactccttgactccttgacttcgtcgaacatatgacattcaaacatatcaatagggtggaggagaatccaaggatagcttgccactgtattcatttcttatggctgccataacaagttactgcaagctgggtggcttaagacaagagaaatttattccatcacagttctaggggccataattccaaaatcaagatgtcagcttggttccaaagacaagggattgttgcttcttggaggcttagacggggccgttactccgcgcatctctcccggctggatgggtggctgccggcagtccttggcatcccctggcttgcagctgtccaagtccagtcgctgcttctgtctgcacctggctgtgtgtctggattaagggcacaccctattccactatgacttcatcttagtgacatcttaaatacttctccaaagaccctaattccaaacaaggtgacattacaggtaccatggttaggactacaatgtatctttttattattactatcttttaaagggatagggtgtcacactgtcatgtaggctggagtgcaatggcacgatcgtagctcatgcagcctcaaccccctagggcctagcgatccactcaccttagcttctcgaatagctgggactacagatgtgtgccactatgccgggctaagtttttaatttttttgtaaagacggggtctccgtgttgcccaggctggtcttgaactcctggcctcaagcaatcctcccgccttggcctcccaaagtgctgggattacagcatgagcctccaggcctaatgtatcttttgagggggcacagttcagcccacagcagccactaacagagttctcttctgtcctcgctcccccaccaggtgcccctgtagacaatggccctcgtgtctgccgattcccgcattgcagaacttctcacagagctccatcagctgatcaaacaaacccaggtaaaaagtcaccaccctccattcccagatgggaacatgggctttgatgctgagccgtgaagtgggggtggcatttgtgttcagagagattggactcgcaggaaccaaaatgacgtaataaaagtgaaaggaggggaatttggtgtatggctaccattcctgttggattttctaccatgtacaggatttcatgattcattttgtttgacagctatcctgagatagaattcacatgccatacaacgcacccatttaaagtgtataatccagtggtttttcgcagctcacaaaattgtgcaaccattagcacgatcaatttcagaacatttttaacacccaacaaaaatgccccatatcttttccttccaccctattaatccaggcaaacaaaaacactcttttttttttggagacggagtctcactgtgtcacctaggctggagtgcggtggcgcratctcagctcactgcaagctccgcctcctgggttcaagcgattcttctgcctcagtctccctagtagctgggattacaggcacacaccaccatgtccggctaattgtttttgtatttttagtagagacggggttttgccatgttggctgtctctactaaaaatacaaaaattagctaggcttggtggcggatgcctataatcccagctactggggaggctgaggcaggagaatcacttgaactcgggaggcagaggttgcagtgagccgagatggcgccactgcactccagcctgggtgacaaagcaagactccatctcaaaaaaaaaaaaagccatttttcccctatttgatatcttttctttcacagatacaagggagatgcgtattggtgcctgtagctcactgcaggctatcgggcatgctctgccacattttgcccacgatactcagggtttatagctacacaaggatcagtttgctggcagttgtgcaccgcacagccaggaaggagtagatcccagaaattccttcccaaatggtattccttttagacgtaacctggagagtaagagtcagaagatgccggcactcattgctaagtgaaagatgccagtctgaaaggttacgtgctgtgtattccaactgtaaacgaaaagcaaaactagagagtgaaargatgagcggtagccagggccttgggagagataggatgaaagggatggataggtggagcacagaggattttagggggtggaactcttctgcagggtaccatgatggggggcacgcaacatgatgcgttgtccaaacccatagaacggcagaacacacagagtaaaccatcatggggatggatgtagttaattatctaacagtattggctcatcagttgttacaaacgcaccactctaatgcaagatgttaacaataggggagactgcgcagggcagagcaggtatacatacaggaactctgtgccatcagctcagcttttctgtaaaccaaaactgctctaagaagagtttatcaataaaatacattgtaaaataaaggaaaaaagggctgggcgtggtaactcatgcctgtaatcccagcatgttgggaggctgaggcgggtggatcacctgaggtcaggagtttgagaccagtctggccaaatggcgaaactccatctctactaaaaattagccgggcgtggtggtacatgcttgtaatcccagctactagggaggctgaggcaggagaatcgcttgaacctgggaagtggaggttgcagtgagccaagatcgcaccactgcactccagcctgggcgacaagagcgaaactccgtctcaaaaaaataaataaaggaaaaaaaagatacaggcagattacgcattccattcagtcatccacagttagaacagtttatcatcatcccatacaaccagggtgtccctcagacagctgctgccgagttcccagactcccatctcacccgtcagcttccaaaagcaggcgtggtcctgacagacacagggcttcgccctttcaggcacccagtgtaactgacctaagagatggcattctctctctctcagcctctcttgaggtatgagtacaatattggatttccctcattgcataacccatttaatttgttctgttaactcggctactgtttctcctctccatttgtgattggttttcacccaaacttttccacctttgtaagggatgttagctttggccactgtacctggtccagattgcagcggcagcagtactagtctagcaagtatccccccccaaccccaatccattcccatttatatagggtggggttacacaggtatggactattggctgtcttgagcactaggcagctagctagctgtgttcactgttaacctcattttgcaggttgaggtaaaggcgcaacccacccatcaggcacttaaaaattctcacataaaggctaaaaagcatagtcataatttctttcttaggatctgtctcagtttccagcatctgcagttgcagctctgctcccaggatgactgatatgggaggaattgcaccagcattcttccccaccccttcttctccacatcaattgatcatacctgtatgtgtctatttctggactctgaattctgttctgttgatctatatgccagtaccacaccatcgtgattaccgtagcttcgtaataaattttgaaattgggaagtatgagttctccaactttttttttctttttccaagattggggataatctgggtcccgtgaatttccatatgaattttaggatgaacttgtcaatttctgcaaagaagtcaattagaattttgatggggattgcgttgactgtatagattgatttgtctctttgataaaggactatcattaaagatatcacttatgatttaactttaatgccttcttttttttttttttttaacagtctcactctgtcacccaggctggagtgcagtgacatgatctcagctcactgcaacctcagcctcccgagtagctaggactatacgcacatgctacaatgcccggctaatttttgtatttttagtagaggtggggtttcatcatgttggccaggctggtcttgaactcctgatctcaagtgatctgcccactttggccttccaaagtgytgggattacaggcttaagccactgcaccaggccctttaaggccttttataatgcttttgcattagtmaaaggagaaaatcatcttgaactcctgaatttggatttagaaaatgagggccatagccgggcgcccttgcctgtaattccagcactttgggaaaccgaggcaggtggatcacgaggtcaggagttcaagaccagcctggccaasatggcgaaaccctgtctctactaaaaatacaaaaaattaggccgggcgcattggcttacgcctgtaatcccagcactttgggaggccgaggcaggcggatcacgaggtcaggagatcgagaccatcctggctaagacggtgaaactccgtctcttctaaaactacaaaaaattaaccaggcgtggtggcgggcgcctgtagtcccagctactcgggaggctgaggcaggagaawggcgtgaacccgggaggcggagcttgcagtgagccgagatcgtgccactacactccagcctgggcgacagagtgagactccatctcaaaaaaaaaaaaaaaaaaagaaaatgagggccgtattttggggatggggactctggcctggctggcagggtaccacagcagcacaaagggccaccgtcatgtcctgctgctcttttccttacaggaagagcgttcgcggagcgaacacaacttagtgaacatccagaagacccatgagcggatgcagacagagaacaagagtgagtagctgggctcaggagagaaaggggatgagatggggctagggtgagtatggccaagactgtgaccgaggtggtcattgtattcaaaatagatttgcatgtatctgcatattccaaaatgcagcaggagggacagctttccgttaatctgggtgacctgaagaactaaaatccctctactctgaggattcgaaaggcagtgaaatgaggctgtatctagggaagcttgcccttagagcacacaagcgccccagttagctggtgttttctagaaaggagcttccttcccaggcggcccctgcatctgccctgaggccctcaggtggtgagatcctggggctggggctttcttactctgggtaactctgagaattgtgttttcctgggtcctgacaaatattttctgtgagtgtcatgatggagaaaaggtaagacagtactctcgcagatgtagggatggcatttgtaccatatggaaatgcggactcatggagcctgggggcatccgcctcaggagcactcctgagccagcagagctctgactgcagctacggcctctctgtgcctccacgagtgtgattccggtgcatggaagcagtgccatgctactgtgcctgccctggccctgcctccttatccctgtgtttcctctgcagtttctccctattaccggacaaagctgcgtggcctctacacaaccgccaaggccgatgcagaggctgagtgcaagtgagtaccgtgcacccacttcatcgccgctccctcctttcctgggggctgggctgcaggtccatttggaccaagtccccagcctgccttcctcccatggataagctgattgctactcccagcctctcgcttgggtcccgcattccctggcccactgccaggcccactcttccagttacctctgctgctaatgcctttacagaaggtggcaaggcgtgagtcaacactgccgtttactggctctatgaccttggcagagtcattaaaatagggatatcaggggctgggtagctcagatctgtaatcacaacattacagaggtgattgggaggccgaggttagaggatcacttgaacgcaggtgtttgagaccagcctgggcaacaaagtgagactttgtctctacaaaaagtttttaattagctgagcgtggtggcatgtgtctgtaagcttggctgggaagtcatactcagatgacctgaaggttttatggttctgagatggagaagtttcacttccagaaaactcctgcttttaaaataatcttaaggccgggcaggcacagtggctcatgcctgcaatcgcaaggtgggtggatcacctgaggttgggggtttgagaccagcctggctagcatagcgaaaccctatatctactaaaaatacaaaaattagccaggtgtggtggcgcacgctacttgggaggctgaggcaggaggcggaggttgcagtgagctaagatcgtgccactgcactccagcctgggcaacagagcaaggctctgcctcaaaaaaaaaaaaaaaactaaaataaaaaaatgatctggaaacactgtttccttgaatctctgcaggagattcaggaacttgaacattacattcctctactttgagaacacactggttctgaagtctgactgtgcccagaggctctgtttatttggggtggagctccaacattggtattaactatctgacatttcctcactagtaggattcatgctttacacttttggcacagaagaggtgtctctggtgggtcatattagacggcacaggatgctgtctgtgccattggttaaagtggtattttccacgtttctcttgtatcagattactgctattttccattgtgtgattgatcgattaagacagggtctcagtctgtcatccaggctggagtggagtggcgtaatcatggctcacttcagcctcaaactcctggcctcaagtgatcctcctgcctcagcctcctgagtagctgggacaataggcacctgccaccactccacctaatttttgtattttttgtagagaggggttttgccatgwtgcccwggctggtcttgaactcctcagctcaagcgatccacccaccttggcctcccaaagtgctgggattacaggtgtgagcctctgcacctggcctccattgcataattaataagtgtcttgggagatacttttgagactgtaactatcctgttcatatcaaacacactagttttagcatccatttatgatttgtgcgtgaaacaattgagattttttaaacttcccccaggagattctgatgcccaccaaggtttgaaagccacttcagtaacatgtcacagaagacagtttaggacaggctgtataaaactgtatcctccacacaggcctggcaacagtgatgagactctcagagttccctttggccccgtggctctttctccttctctgctttctggggtcccggtgctcacagcctgaggtggcactggctgggccatccctgcattgtacgcagcaggcaagctgttccttgtccctgcgttggtttggctgcccttggcctacctccatcttctggccctggcctggtgaggtccatgagtcacatgccctggggcacccccggacacctcccgagatgctgcatcacacccagttcctgtgcatctccttcctgccgcacaaaggtctttagaactccgggtcatttcagaaaggcttgccagaggaatggactggggtttgccatggtatcagaggaaaataaaatgacccaaagtggagtttgtgctgctgactactgtggaaatacgtattttttttgaaatggagtttcgctctgtcacccaggctggagtgcagtgacacaatctcggctcactgcaagctctgcccccaaggttcaagcgattctcttgcctcagcctcccaagtagctgggattatagacgcccgccaccacgccgggctaatttttgtatttttagtagagaaggagtttctctatgttggccaggctggtstcgatctcctgacctcaagtgatcctcctgcctcagcctcctaaagtgctgagattacaggcgtgagccaccacacccatccctgctgtggaaatactctttgggaagattccctgagctttaggatgaaggagcctcactccagccaagttctgtgtttgcttctgctgggttctttgggttcctgccaccctggaatccccataaactaacttcacagaggcttcctggggcttcaaggccatgcaggggtctgtctttgggttcagcctttcagaaaggatgaggtccttccacccagttctgctctgggccagcacctctccccagagtctcccctccttttgtgtgaccctcgggcagacctgaggccccctctcctcatttcaggaggttcctgcagcctttctgcagggtttgccgaaggcagtttgcctgtgtcctttcctctctgggatcctgtgttctcttagtttttggcatgctgctttctaccaccttgttttttatgttcttaagactaaaagacacatactgaagatttccagttttctttttttttttgaaatggagtttcgttctttttgcccaggttggagtgcaatgacgcgatctcggttcactgcaacctctgcctcccaggttcaagcgattctcttgcctcagcctcccaagtaggtgggattacagttaaagacgctcgccaccacacctggctaagttttgtatttttaatacagacggggtttcaccatattggtcaggctggtcttgaactcctgacctcaggtgatccacactcctcggcctcccaaagtgctgggattacaggcgtgaaccaccacacccgggcagatttctagtttcaccatgaggttggtctgaataacccagcccaccttgaccagaacaggaacctgcacacacctgtcattccacctgcgcaggaggctactgtgagaacctctggagtccgggaccagcctgggcaatgtagcttgacccaaaacagaaaaaatggaagagaagtctatgctatgtacgttaaccaaaccctctttctcccttctccccgccctcagcatccttcggaaagctctggacaagatcgcggaaatcaagtctctgttggaagagaggcggattggtgagtgggagagaacatgctgggaggtcctttgctaggacaagaggagaggccctgcgggcagcagtcaccctcctgtgggggcctgtggccaccacctgctggcatcctcccatggaggctctggcagactggctctaccactgagaagggacaggaggtcattcccagtgcccagaggcaggggtttcccagttctccctcagcagccagagatcatcccgccctggcccctcatcnnnnnnnnnnnnnnnnnnnnnnnnnnnnnnnnnnnnnnnnnnnnnnnnnnnnnnnnnnnnnnnnnnnnnnnnnnnnnnnnnnnnnnnnnnnnnnnnnnnnnnnnnnnnnnnnnnnnnnnnnnnnnnnnnnnnnnnnnnnnnnnnnnnnnnnnnnnnnnnnnnnnnnnnnnnnnnnnnnnnnnnnnnnnnnnnnnnnnnnnnnnnnnnnnnnnnnnnnnnnnnnnnnnnnnnnnnnnnnnnnnnnnnnnnnnnnnnnnnnnnnnnnnnnnnnnnnnnnnnnnnnnnnnnnnnnnnnnnnnnnnnnnnnnnnnnnnnnnnnnnnnnnnnnnnnnnnnnnnnnnnnnnnnnnnnnnnnnnnnnnnnnnnnnnnnnnnnnnnnnnnnnnnnnnnnnnnnnnnnnnnnnnnnnnnnnnnnnnnnnnnnnnnnnnnnnnnnnnnnnnnnnnnnnnnnnnnnnnnnnnnnnnnnnnnnnnnnnnnnnnnnnnnnnnnnnnnnnnnnnnnnnnnnnnnnnnnnnnnnnnnnnnnnnnnnnnnnnnnnnnnnnnnnnnnnnnnnnnnnnnnnnnnnnnnnnnnnnnnnnnnnnnnnnnnnnnnnnnnnnnnnnnnnnnnnnnnnnnnnnnnnnnnnnnnnnnnnnnnnnnnnnnnnnnnnnnnnnnnnnnnnnnnnnnnnnnnnnnnnnnnnnnnnnnnnnnnnnnnnnnnnnnnnnnnnnnnnnnnnnnnnnnnnnnnnnnnnnnnnnnnnnnnnnnnnnnnnnnnnnnnnnnnnnnnnnnnnnnnnnnnnnnnnnnnnnnnnnnnnnnnnnnnnnnnnnnnnnnnnnnnnnnnnnnnnnnnnnnnnnnnnnnnnnnnnnnnnnnnnnnnnnnnnnnnnnnnnnnnnnnnnnnnnnnnnnnnnnnnnnnnnnnnnnnnnnnnnnnnnnnnnnnnnnnnnnnnnnnnnnnnnnnnnnnnnnnnnnnnnnnnnnnnnnnnnnnnnnnnnnnnnnnnnnnnnnnnnnnnnnnnnnnnnnnnnnnnnnnnnnnnnnnnnnnnnnnnnnnnnnnnnnnnnnnnnnnnnnnnnnnnnnnnnnnnnnnnnnnnnnnnnnnnnnnnnnnnnnnnnnnnnnnnnnnnnnnnnnnnnnnnnnnnnnnnnnnnnnnnnnnnnnnnnnnnnnnnnnnnnnnnnnnnnnnnnnnnnnnnnnnnnnnnnnnnnnnnnnnnnnnnnnnnnnnnnnnnnnnnnnnnnnnnnnnnnnnnnnnnnnnnnnnnnnnnnnnnnnnnnnnnnnnnnnnnnnnnnnnnnnnnnnnnnnnnnnnnnnnnnnnnnnnnnnnnnnnnnnnnnnnnnnnnnnnnnnnnnnnnnnnnnnnnnnnnnnnnnnnnnnnnnnnnnnnnnnnnnnnnnnnnnnnnnnnnnnnnnnnnnnnnnnnnnnnnnnnnnnnnnnnnnnnnnnnnnnnnnnnnnnnnnnnnnnnnnnnnnnnnnnnnnnnnnnnnnnnnnnnnnnnnnnnnnnnnnnnnnnnnnnnnnnnnnnnnnnnnnnnnnnnnnnnnnnnnnnnnnnnnnnnnnnnnnnnnnnnnnnnnnnnnnnnnnnnnnnnnnnnnnnnnnnnnnnnnnnnnnnnnnnnnnnnnnnnnnnnnnnnnnnnnnnnnnnnnnnnnnnnnnnnnnnnnnnnnnnnnnnnnnnnnnnnnnnnnnnnnnnnnnnnnnnnnnnnnnnnnnnnnnnnnnnnnnnnnnnnnnnnnnnnnnnnnnnnnnnnnnnnnnnnnnnnnnnnnnnnnnnnnnnnnnnnnnnnnnnnnnnnnnnnnnnnnnnnnnnnnnnnnnnnnnnnnnnnnnnnnnnnnnnnnnnnnnnnnnnnnnnnnnnnnnnnnnnnnnnnnnnnnnnnnnnnnnnnnnnnnnnnnnnnnnnnnnnnnnnnnnnnnnnnnnnnnnnnnnnnnnnnnnnnnnnnnnnnnnnnnnnnnnnnnnnnnnnnnnnnnnnnnnnnnnnnnnnnnnnnnnnnnnnnnnnnnnnnnnnnnnnnnnnnnnnnnnnnnnnnnnnnnnnnnnnnnnnnnnnnnnnnnnnnnnnnnnnnnnnnnnnnnnnnnnnnnnnnnnnnnnnnnnnnnnnnnnnnnnnnnnnnnnnnnnnnnnnnnnnnnnnnnnnnnnnnnnnnnnnnnnnnnnnnnnnnnnnnnnnnnnnnnnnnnnnnnnnnnnnnnnnnnnnnnnnnnnnnnnnnnnnnnnnnnnnnnnnnnnnnnnnnnnnnnnnnnnnnnnnnnnnnnnnnnnnnnnnnnnnnnnnnnnnnnnnnnnnnnnnnnnnnnnnnnnnnnnnnnnnnnnnnnnnnnnnnnnnnnnnnnnnnnnnnnnnnnnnnnnnnnnnnnnnnnnnnnnnnnnnnnnnnnnnnnnnnnnnnnnnnnnnnnnnnnnnnnnnnnnnnnnnnnnnnnnnnnnnnnnnnnnnnnnnnnnnnnnnnnnnnnnnnnnnnnnnnnnnnnnnnnnnnnnnnnnnnnnnnnnnnnnnnnnnnnnnnnnnnnnnnnnnnnnnnnnnnnnnnnnnnnnnnnnnnnnnnnnnnnnnnnnnnnnnnnnnnnnnnnnnnnnnnnnnnnnnnnnnnnnnnnnnnnnnnnnnnnnnnnnnnnnnnnnnnnnnnnnnnnnnnnnnnnnnnnnnnnnnnnnnnnnnnnnnnnnnnnnnnnnnnnnnnnnnnnnnnnnnnnnnnnnnnnnnnnnnnnnnnnnnnnnnnnnnnnnnnnnnnnnnnnnnnnnnnnnnnnnnnnnnnnnnnnnnnnnnnnnnnnnnnnnnnnnnnnnnnnnnnnnnnnnnnnnnnnnnnnnnnnnnnnnnnnnnnnnnnnnnnnnnnnnnnnnnnnnnnnnnnnnnnnnnnnnnnnnnnnnnnnnnnnnnnnnnnnnnnnnnnnnnnnnnnnnnnnnnnnnnnnnnnnnnnnnnnnnnnnnnnnnnnnnnnnnnnnnnnnnnnnnnnnnnnnnnnnnnnnnnnnnnnnnnnnnnnnnnnnnnnnnnnnnnnnnnnnnnnnnnnnnnnnnnnnnnnnnnnnnnnnnnnnnnnnnnnnnnnnnnnnnnnnnnnnnnnnnnnnnnnnnnnnnnnnnnnnnnnnnnnnnnnnnnnnnnnnnnnnnnnnnnnnnnnnnnnnnnnnnnnnnnnnnnnnnnnnnnnnnnnnnnnnnnnnnnnnnnnnnnnnnnnnnnnnnnnnnnnnnnnnnnnnnnnnnnnnnnnnnnnnnnnnnnnnnnnnnnnnnnnnnnnnnnnnnnnnnnnnnnnnnnnnnnnnnnnnnnnnnnnnnnnnnnnnnnnnnnnnnnnnnnnnnnnnnnnnnnnnnnnnnnnnnnnnnnnnnnnnnnnnnnnnnnnnnnnnnnnnnnnnnnnnnnnnnnnnnnnnnnnnnnnnnnnnnnnnnnnnnnnnnnnnnnnnnnnnnnnnnnnnnnnnnnnnnnnnnnnnnnnnnnnnnnnnnnnnnnnnnnnnnnnnnnnnnnnnnnnnnnnnnnnnnnnnnnnnnnnnnnnnnnnnnnnnnnnnnnnnnnnnnnnnnnnnnnnnnnnnnnnnnnnnnnnnnnnnnnnnnnnnnnnnnnnnnnnnnnnnnnnnnnnnnnnnnnnnnnnnnnnnnnnnnnnnnnnnnnnnnnnnnnnnnnnnnnnnnnnnnnnnnnnnnnnnnnnnnnnnnnnnnnnnnnnnnnnnnnnnnnnnnnnnnnnnnnnnnnnnnnnnnnnnnnnnnnnnnnnnnnnnnnnnnnnnnnnnnnnnnnnnnnnnnnnnnnnnnnnnnnnnnnnnnnnnnnnnnnnnnnnnnnnnnnnnnnnnnnnnnnnnnnnnnnnnnnnnnnnnnnnnnnnnnnnnnnnnnnnnnnnnnnnnnnnnnnnnnnnnnnnnnnnnnnnnnnnnnnnnnnnnnnnnnnnnnnnnnnnnnnnnnnnnnnnnnnnnnnnnnnnnnnnnnnnnnnnnnnnnnnnnnnnnnnnnnnnnnnnnnnnnnnnnnnnnnnnnnnnnnnnnnnnnnnnnnnnnnnnnnnnnnnnnnnnnnnnnnnnnnnnnnnnnnnnnnnnnnnnnnnnnnnnnnnnnnnnnnnnnnnnnnnnnnnnnnnnnnnnnnnnnnnnnnnnnnnnnnnnnnnnnnnnnnnnnnnnnnnnnnnnnnnnnnnnnnnnnnnnnnnnnnnnnnnnnnnnnnnnnnnnnnnnnnnnnnnnnnnnnnnnnnnnnnnnnnnnnnnnnnnnnnnnnnnnnnnnnnnnnnnnnnnnnnnnnnnnnnnnnnnnnnnnnnnnnnnnnnnnnnnnnnnnnnnnnnnnnnnnnnnnnnnnnnnnnnnnnnnnnnnnnnnnnnnnnnnnnnnnnnnnnnnnnnnnnnnnnnnnnnnnnnnnnnnnnnnnnnnnnnnnnnnnnnnnnnnnnnnnnnnnnnnnnnnnnnnnnnnnnnnnnnnnnnnnnnnnnnnnnnnnnnnnnnnnnnnnnnnnnnnnnnnnnnnnnnnnnnnnnnnnnnnnnnnnnnnnnnnnnnnnnnnnnnnnnnnnnnnnnnnnnnnnnnnnnnnnnnnnnnnnnnnnnnnnnnnnnnnnnnnnnnnnnnnnnnnnnnnnnnnnnnnnnnnnnnnnnnnnnnnnnnnnnnnnnnnnnnnnnnnnnnnnnnnnnnnnnnnnnnnnnnnnnnnnnnnnnnnnnnnnnnnnnnnnnnnnnnnnnnnnnnnnnnnnnnnnnnnnnnnnnnnnnnnnnnnnnnnnnnnnnnnnnnnnnnnnnnnnnnnnnnnnnnnnnnnnnnnnnnnnnnnnnnnnnnnnnnnnnnnnnnnnnnnnnnnnnnnnnnnnnnnnnnnnnnnnnnnnnnnnnnnnnnnnnnnnnnnnnnnnnnnnnnnnnnnnnnnnnnnnnnnnnnnnnnnnnnnnnnnnnnnnnnnnnnnnnnnnnnnnnnnnnnnnnnnnnnnnnnnnnnnnnnnnnnnnnnnnnnnnnnnnnnnnnnnnnnnnnnnnnnnnnnnnnnnnnnnnnnnnnnnnnnnnnnnnnnnnnnnnnnnnnnnnnnnnnnnnnnnnnnnnnnnnnnnnnnnnnnnnnnnnnnnnnnnnnnnnnnnnnnnnnnnnnnnnnnnnnnnnnnnnnnnnnnnnnnnnnnnnnnnnnnnnnnnnnnnnnnnnnnnnnnnnnnnnnnnnnnnnnnnnnnnnnnnnnnnnnnnnnnnnnnnnnnnnnnnnnnnnnnnnnnnnnnnnnnnnnnnnnnnnnnnnnnnnnnnnnnnnnnnnnnnnnnnnnnnnnnnnnnnnnnnnnnnnnnnnnnnnnnnnnnnnnnnnnnnnnnnnnnnnnnnnnnnnnnnnnnnnnnnnnnnnnnnnnnnnnnnnnnnnnnnnnnnnnnnnnnnnnnnnnnnnnnnnnnnnnnnnnnnnnnnnnnnnnnnnnnnnnnnnnnnnnnnnnnnnnnnnnnnnnnnnnnnnnnnnnnnnnnnnnnnnnnnnnnnnnnnnnnnnnnnnnnnnnnnnnnnnnnnnnnnnnnnnnnnnnnnnnnnnnnnnnnnnnnnnnnnnnnnnnnnnnnnnnnnnnnnnnnnnnnnnnnnnnnnnnnnnnnnnnnnnnnnnnnnnnnnnnnnnnnnnnnnnnnnnnnnnnnnnnnnnnnnnnnnnnnnnnnnnnnnnnnnnnnnnnnnnnnnnnnnnnnnnnnnnnnnnnnnnnnnnnnnnnnnnnnnnnnnnnnnnnnnnnnnnnnnnnnnnnnnnnnnnnnnnnnnnnnnnnnnnnnnnnnnnnnnnnnnnnnnnnnnnnnnnnnnnnnnnnnnnnnnnnnnnnnnnnnnnnnnnnnnnnnnnnnnnnnnnnnnnnnnnnnnnnnnnnnnnnnnnnnnnnnnnnnnnnnnnnnnnnnnnnnnnnnnnnnnnnnnnnnnnnnnnnnnnnnnnnnnnnnnnnnnnnnnnnnnnnnnnnnnnnnnnnnnnnnnnnnnnnnnnnnnnnnnnnnnnnnnnnnnnnnnnnnnnnnnnnnnnnnnnnnnnnnnnnnnnnnnnnnnnnnnnnnnnnnnnnnnnnnnnnnnnnnnnnnnnnnnnnnnnnnnnnnnnnnnnnnnnnnnnnnnnnnnnnnnnnnnnnnnnnnnnnnnnnnnnnnnnnnnnnnnnnnnnnnnnnnnnnnnnnnnnnnnnnnnnnnnnnnnnnnnnnnnnnnnnnnnnnnnnnnnnnnnnnnnnnnnnnnnnnnnnnnnnnnnnnnnnnnnnnnnnnnnnnnnnnnnnnnnnnnnnnnnnnnnnnnnnnnnnnnnnnnnnnnnnnnnnnnnnnnnnnnnnnnnnnnnnnnnnnnnnnnnnnnnnnnnnnnnnnnnnnnnnnnnnnnnnnnnnnnnnnnnnnnnnnnnnnnnnnnnnnnnnnnnnnnnnnnnnnnnnnnnnnnnnnnnnnnnnnnnnnnnnnnnnnnnnnnnnnnnnnnnnnnnnnnnnnnnnnnnnnnnnnnnnnnnnnnnnnnnnnnnnnnnnnnnnnnnnnnnnnnnnnnnnnnnnnnnnnnnnnnnnnnnnnnnnnnnnnnnnnnnnnnnnnnnnnnnnnnnnnnnnnnnnnnnnnnnnnnnnnnnnnnnnnnnnnnnnnnnnnnnnnnnnnnnnnnnnnnnnnnnnnnnnnnnnnnnnnnnnnnnnnnnnnnnnnnnnnnnnnnnnnnnnnnnnnnnnnnnnnnnnnnnnnnnnnnnnnnnnnnnnnnnnnnnnnnnnnnnnnnnnnnnnnnnnnnnnnnnnnnnnnnnnnnnnnnnnnnnnnnnnnnnnnnnnnnnnnnnnnnnnnnnnnnnnnnnnnnnnnnnnnnnnnnnnnnnnnnnnnnnnnnnnnnnnnnnnnnnnnnnnnnnnnnnnnnnnnnnnnnnnnnnnnnnnnnnnnnnnnnnnnnnnnnnnnnnnnnnnnnnnnnnnnnnnnnnnnnnnnnnnnnnnnnnnnnnnnnnnnnnnnnnnnnnnnnnnnnnnnnnnnnnnnnnnnnnnnnnnnnnnnnnnnnnnnnnnnnnnnnnnnnnnnnnnnnnnnnnnnnnnnnnnnnnnnnnnnnnnnnnnnnnnnnnnnnnnnnnnnnnnnnnnnnnnnnnnnnnnnnnnnnnnnnnnnnnnnnnnnnnnnnnnnnnnnnnnnnnnnnnnnnnnnnnnnnnnnnnnnnnnnnnnnnnnnnnnnnnnnnnnnnnnnnnnnnnnnnnnnnnnnnnnnnnnnnnnnnnnnnnnnnnnnnnnnnnnnnnnnnnnnnnnnnnnnnnnnnnnnnnnnnnnnnnnnnnnnnnnnnnnnnnnnnnnnnnnnnnnnnnnnnnnnnnnnnnnnnnnnnnnnnnnnnnnnnnnnnnnnnnnnnnnnnnnnnnnnnnnnnnnnnnnnnnnnnnnnnnnnnnnnnnnnnnnnnnnnnnnnnnnnnnnnnnnnnnnnnnnnnnnnnnnnnnnnnnnnnnnnnnnnnnnnnnnnnnnnnnnnnnnnnnnnnnnnnnnnnnnnnnnnnnnnnnnnnnnnnnnnnnnnnnnnnnnnnnnnnnnnnnnnnnnnnnnnnnnnnnnnnnnnnnnnnnnnnnnnnnnnnnnnnnnnnnnnnnnnnnnnnnnnnnnnnnnnnnnnnnnnnnnnnnnnnnnnnnnnnnnnnnnnnnnnnnnnnnnnnnnnnnnnnnnnnnnnnnnnnnnnnnnnnnnnnnnnnnnnnnnnnnnnnnnnnnnnnnnnnnnnnnnnnnnnnnnnnnnnnnnnnnnnnnnnnnnnnnnnnnnnnnnnnnnnnnnnnnnnnnnnnnnnnnnnnnnnnnnnnnnnnnnnnnnnnnnnnnnnnnnnnnnnnnnnnnnnnnnnnnnnnnnnnnnnnnnnnnnnnnnnnnnnnnnnnnnnnnnnnnnnnnnnnnnnnnnnnnnnnnnnnnnnnnnnnnnnnnnnnnnnnnnnnnnnnnnnnnnnnnnnnnnnnnnnnnnnnnnnnnnnnnnnnnnnnnnnnnnnnnnnnnnnnnnnnnnnnnnnnnnnnnnnnnnnnnnnnnnnnnnnnnnnnnnnnnnnnnnnnnnnnnnnnnnnnnnnnnnnnnnnnnnnnnnnnnnnnnnnnnnnnnnnnnnnnnnnnnngagaaaaactccacagagcgtgctgtgggcggggccggctgtgcagggagcaccgggtcctcgccctgcccctgtcctccacactcccctacagggactgtgcccctggctgcatcctgcattttcctccttttgtccacaggtatgaggtagatgacattgatgaagaaggcaaagcgtgagtgtccaggccagggcagggcatggagcctgggggcagcctaccagctgggaaggagcatccccacccggccacaggttgacacaagcccctctaccaccaggagacacaccgtgagcttgcgccggatcatcccgctgacccggtggaaggccaaccccgagacagaccccgaggccttgttagtcaaggagaaaaccatgttctcaggatgctgtgaccttggtgacagcacggccaacacaggaagcctcggcattcacctggtcactgagctcattcaagcaaagctatctccagtagggactttcccttttgagaacatgtgcaaagggtcagcaaactgacactttgctcattttaatagtaaaaaccatacccctgggtggagatttaagatgctaatgagacatgagtcctaggagcaagcatgtatagcaaatgcgcatgtgcacccagaggaccacccagaacatgcttactagtgatgcctcttcccacccattatgaagagttgtgtgagactcccataaagggagtttttcctgcagtaatcaacaccgtcccaacctgacaagcagtcccttctgaactcgctcaaggtgtattgtctattctgcaattaactttcaatatactgttttcttttgcaataagttattctatgctccacttcttttgctgtgtgtctcttgtttaaatcattttatttattattattattattattattattattattattattattattatcttagatggggtctcactctgtggcccaggctggagtgcagtggcacaatctcgactcactgcaacctctgagtcttgggttcaagcgattctcctgcctcagccttctgtgtagctgggatgatagggctcaccaccacgcctggctaattttatatttttagtagagacagggtttcgtcatgttggccaggctggtcttgaactcttgacatcaggtaatccacccctctcagcttcccaaagtgctgggattacaggtgtgagccactgcgcaccgcctacttaatttattttaacccaagaggacgagaacccaggtatcacagagtgtccccagacagattgacacaacctgccaggagacacaccatgagctggcagtcatggcatcagtggaaggccaacccccagatggaccccaaggccttgttccagaaggagcagctcatgttggccctgtaaccccagaccacctgcttctaccgtgccctgatccatgcgcccctacagcgggtaaagcagcctccaggggagaggtcattggtgacaccaggaacaggctgatcagagaagctaggggtcctcttcctgctctgtcccccttgtcctcatctcccgagctaatgggacctgccagcagccctccctcttccactccagccccaaaggctaccgtccccttgccagccctggcagccttggcaagccccaagtcagcggcttcccttctgcagccccaggagaaccagctctgagacaggaagctcctgccctgaacccacggctcctgccccctcatgctcctggtgacatgggacacaagccacctgaggccaggatccctgcctgccaccatctgggctgccctcggtcctctgaacacagagtccctgaaaggcagcagaccctctagctatggccccactggggaaggagtcagcacctcttcctcyctccacctttttcactgctctgggcctccagccactgagaaaagagctccatagcagcagggactgggccaagacttcttgaccccagagtgaacaatggcaggagtggctgaaagtccacggcccagagcctcctgtggtctaggctgggggaagggggtgcctgtcatggcctggggatctctgagcagcccctcctgtctgcctgccccacagccccaggatgactacttggtcctgtttgaagacactcctatgcttgagtgtcttcaagcattcccctcccctcagcgtggcccagaggtaggtggtggcttgtaaggagcccaagaaaaagtgacgctgcctggcggactcgccatccaccaacgacacagggcaggacagcaaaggatgtgctgggattaaacacattccccctccactcgtctcctgggttttacttctccagaccctctcccctctccaaacaggtcaagttgaggagctggagcggagaggtggccgtatttggccccagtgggcgatcactctttcagctcagggtttctcttggcttggaatagagactctgcattgaacacaaatcatagttgtgttgttgttgttgttgttgttgttgttttaagactgagtcttgctctgtcgcccagactggagtgcagcggtgtgatcccggttcaatgaaacctccacctcatggattcaatcgattctcccacctcagcctctggagtagctgggattacaggcgcccatcatcatgcccagctaatttttgtatttttagtagagatggggttttgccatgctggccaggctggtcttgaactcctgacctcaagtgatctgccaggctgaagtgctgagattacaggcataagccaccgagcccaggtcaaataataacttaatttaatttaattatttatttattttcaagacagagttttgctcttatgcccaggctggagtgaagtggcatgatcttggctcactgcaacatccgtccctgggttcgagcgattctcctgcctcagcctccagagtagctgaggttacaggtgtctgccaccatgcccggctaatttttgtatctttttttttttttagtagagacggggtttcaccatgttggccagactggtcctgaatcataatttatgttaagtaaattgtattttatttatttctcaagcaagatttgctctgtccctcaggcttgagtggattagcccagtcagcccactgcagccataacctccctggctcaggcgatcctcctgccttcacttgtcaagtagctgggactacaggtgcccaccatcacgtacagataattttctcaaatttttgtagggatgatgtcttgtaatgttgaacaggctggtcccaaactcctgtcctccagtgatcctctagcctcaacttctcaaattgctgggattacaggcatgagccactctgcctggcccacaatcatattttattctctttttaaaaattggttttattttattttatttttttaacagaatctcactatgttgcccaggttggtctcgaactcctgggctcaaatgatcctcccacctcagcctccaaattgctgggattacagacatgacctaccgtcccgggccctcaattcatattttattcttgagccgcttggtcaggtttgattcgcacactccctctgcagtgactccaggagcccctctcacagctcagagcggaagctgaggctgcagcctgccatcttctccgcatagtccgcatcgaagcgctcattctgcgccacggtgaaggtggtcttccagtccccagccatgcctgggggaggaaggcagggagcaaagctggagtctcatcccaggggaggccccaagtgcctatggggaggctgcagctgctgctcccacccgccccaaacccccgtgctggccagcacccacctttcctcatgaagggggagatgctgtggtccatgaactcctgggggacggtggtgtagttggtcatagggttcttcttcatctccttgaacgacgtgtgctgaaccatgaagtccacggtctcctctggcagggagcgccccacaaactccaggatcttttgaatctcccttttcgggttctgagcagcagagggcccctcagtggaggctcggattactgattcaggaaaagtaaaaggggtccccttctctaacctcagaggcgatctggccacttctcctagaaaccctgcagagccaactcctcaacccccagggccccagtcccgggggtaaaaagaattgctgtctgccctgtgatcccatcatgagctgggcttggctcctatgggtgaggaccgtgatggtcttcttctgtgactgtggccctgggtagcacaccctttggcagggagtagcaataggactaagtttctgatccgtggccccccatgcagctgactcaggtgcgagagatgagagctgtgtggggcccgctgccaggtggggccttagtggggaggcctgggccaagaaggcaggatggggaatctggtcctgctgtgggggctgcccagggagggggctgggtggccttggcgggtccctgtgaggtgcctgcccccaggagtcacatggagggaagcatcgcacgtggtctcacctccttcatgtcttcatagaagaggtagagaacagggtgggtgcggctcagctcccaccactcctgcacgtgctggtaccaggatccgtaggacactggagaagcaggcaaggggtgccaacacagggttgctgtgcgttgtagccaccaccccttggctccacactttccttcctcccatcaaacccaccttctccgaccatgaacttctccaggaagctgtcccaggtcccaggctcagggtgcaccttggccatgtggtagaagtggtagtaggaaactgccacatcctttgcgttgcgggcaacatagaccacctgcaggggcagaagactcaaccccagcaccatcaccacacagcctgtcccaggccagctcatctcttggattggcaaaggaggaacctgaggcttagaggctgacttgtttgagatctcacggcaccggtagggccaagtcaggagctgaaccctgctcagaagccaaagtcctgcctggtccctgagaccatcatattctatagtaatataatctgcatcaatgcgtcacaccccaatctggagcaaggcatgctccaccagccgtgatcccaccgccaccaaattttgtgggcctgtgaggacccaccctctagctttcttaggtctacactgaagagtcttacgttcttggtcatcagagcaagaggcagacagtccccgccgcagaagatgagacaaggctggaggaagtgaggcgactttcccagaagaacaggaccaaagctgggctgagccagggcctccttccctggattcacatgccccacacctggacctttgctttttctttttattgtgggatttattttattttattttattttatttatttatttttgagacagagagtctcaaaaaaaaaaaaaaaaaaaaggaccgtggtctttctttttttctgtcgcccaagttggagtgcactggagtgataataactcactgcaaccttgaccttccaggctcaagcaatcctccaacctcagactttccagtagctggaactacagcgctatgccaccatgccctgctgatattttgcatttttatagagatggagactccccatgtttcccgggctggtctgtaactcctgagctcaagtgatccacccaatttggcctcccaaagtgctggcattacagcagtgagccaccacaggtgccacagttttatttttatttatatatttatttatttatttatttttgtgagttttgctcttgttgctcaggctggaatgcaatggtgggatctctggctcaccacaacctccttctcccgggttcaagtgattctcctgtctcaggcttcggagtagctgggattacaggcacccgccaccacacccggctaattttgtatttttagtagagacaaggttcttctatgttgctcagggtgctctcaaactcccaacctcaggtgatctgcctgcctcagcctcccaaagtgctgggattatggatgtgaaacactgtgccctgcctcaccttgaccttctgatccaacagagtctgggggagcagagccaggggcaggtgtgtcttcaggagtcgtggggccggtgtgtctttcagagtctccatccctgagcagtgggtcagggaaggtctggtgagctgaagccccagccctgtcttcctccactccccttgcacccaggacacactcacacacctgagggaatccctggggctttgaactcaaggaagggcacccgcatgaagatgggagctcggtgacacttctccaggtcaccaccctggtagatcatgtccagaatctggcttacccaggtagtgcctggagagggagggagatgggaggtgagcaggctgagggcacgacctcgctggccaaggtggggactgccacctgggagagggtgggtggccctcctcacttaccggacttggggtaggtgctgatgagcaggtcatcaggccgggcctggaagctctgcaggggccccagtgcctctgcaaagtacttgatgagcgggacccccttcacgtactccagtggcgggcgggaggtgtcctggatcagctccatgttcctgcgtcaggggccagagccaggcccgttcccttaccaccatcacaacagcaagaaagtggaattcttgctttcagggaagtcactgaggcctagggaggctgagtgacttgcccgcactcacaaagccactcagtggcggggctggggctgaaaaccaggtcgggctctaatgcggtggttccccagcctggcctcacctttcattcacctgcggagctgttcaaaatcccagggcctgggccatggtgcagaccagtgaaagcaccctcgtcgggcaaggcccagatgtcagggtgtgtgaaggtctccaggagagtccagctgcactgaggaagctctaggaccttcctgtgctgtctccctgccagccagcgccctttgtctcaccacttcctgctgggacccccagcctccacccagtggagatgctcccctccttgagcccctcagcccctcacatgtggaaaccgcccaggccagccaggcctgtgatccacttgcctggccacagtccatctgggctccaggacaaacacggcccattgaggaactgagctgctactaggggccagagctgctgtgggaatgaacaaaactctgatgactcagcaaaagcacaggcctaggcagggtggctcccacctataatcccagaccctagggaggctgaggccaggagttggagaccaacctggtgcagcattgcaagaccccatctctaaaaatctttaaaaaaattcttaaacattaaccaggcaggatgatgagggcctgtagtcctagctactccagaggctgaggcaagagaatcacttgagcccaggaattcaaggctgcagtggccaggatcccacagcactccagcctgggtgacagcaagacctggcctccccggggaaaaaaacaaacaaacaagggaagggagggggattcacgcaggccagggttgtctgaaatgggatatccatggggaaagggcagggatgccagaggcctcagcttctggaatgttagagccacaagctgagcagggtgagggcgccctgggccgttccactgtgtcactcacctgagctcttgggaacctggcctcgtgccctcctcgcccgcagtggctgattgtgggtgctgtgtggggaatgcagggttgttctctgagctgagggtttcctaggtccactgtgggagggatctggagccggggctggacttagatttgcttccggaaggaaggggtggggttgggggtgggggagcttctccattaccctccttagtgtgccagctggagacaagcttaaagtgatctccaaagccacgactgagtttgctgtgtagaaaacagaagaatgaaaggggaaaggcccaatggtgggtttgtttttgtaggttttttttttctgttttttttttttttttttttttttttccgagctgtcactgggctcctgacctgcccctgaactccaccctgccaggcagccaacagacaagctctctctaattgacccaggcaagagaggggagggattggaggagaaagctgggataggcaggccctggaaaggtcacctacctgctggctccaggccagtcttgaaggtgccaggggttctggcccagtgcagcccacaggcccccagcagcccatgcactcca

SEQ ID NO: 96204 - DNA, 44792 bp, Homo sapiens
ttctacatattctgaggaattcatgctcctgtggctcttgcttataaatatcttggaatgtttctgaatgcctctaagcctatgttcagactctgttgcgtcaatgactggtagtatttctttcattaatatgtttgtcatctggtctgcaagatagggttggatgaatatacttaacactactgaactgtacacttaaagatggttaggaaggaaacgggactacatcaaacttaaaaatgtctgtgtgtcaaaggaagcaatcaacaaagtgaaaacgcaagctctagaatgagagaaaataattgcaaatcgtctatcttataaggagcccaaatccagaatatatgaggaacttctacaactcaacaacaaaaaaccaaataactcaatttttaaaaatgggcaaaggacttgcacagacatttctccaaagaagttatacaattggccaataagaacatgaaaatatgctcaacattgccaattattagggaaatgcaaatcaaaaccacaatgagatatcgtctcacgcccatcatgatggccactatcagaagaacaaaaaaataacaagtattggggaggatgcagagaagttgaaacccttgtgcactgttggtggtaatgtaaaacggtgcagtcattacggaaaacagtacacaggtttcccaaataactgaaaacagaattaccataagaattaccaccaaagcgggatctcaaagagatatttgtacacccatgttcatagcagcattattcacaatagccaagaggttctggaagcatcccaaatgtccatcaacagatgaatagataaaggaaatgtggtatatacagtcaatggaatattattcagcctttaaaaagaaggaaatcctgtcaaatgtacaatgtggatgaaccttgaaggcattatgccaagtgaaataagccagccaacaaaagaacaaatgctatatgattcctccatgtgaagtatgcaaagtagtcaaaatcatacaatagaaagtagaaaggtggttgccaagcaacggttgggggaaggggagagggtgaatttgtatttagtgggtacagagcttgtgttgcaagaattctagagatctgttgcaaaacaagtgtgattgtacttaacactactgaactgtatacgtataagtttgagaaatatctcttttaaaaagggggaaatgtgaaggcttttgcatgtatgccctaggaaatgcatagaattcttagaaaggtaaacatggtaaaaaaagaagtctttgttaactttctgcagttcacctgtttcaaagtatagttacctttaaaagggtaaacacacaagatatgcattttccaaagcatacaggctttcctcctagctgtcttgttttttatttttttttattttttttatttttttgagacagagtcgcgctgtcacccgggctggagtgcagtggcgcgatctcggctcactgcaagctccgcctcccgggttcacgccattctcctgcctcagcctcctgagtagctgggactacaggcgcccgccaccacacccggctattttttgtattttaagtagagacagggtttcaccgtgttaaccaggatggtctcgatctgacctcgtgatccacccgtcttggcctcccaaagtgctgggattacaggtgtgagccactgtgcctggccttcctagctgtcttgtgaaacgataagtcaaaaccctactgcagtgagttttccaaactgaagggagaagcaatgtacagaatgcctgacttgcccttaacatcttatacctggtgttctggcatgattattaaccacactctttttcactttgaaccatgtcctggtttgcatggccagcttccctgcagaggtgatagaaactgacttgaggcagtttctttctccatgccttagttagatgaccctcaaaggggcacagcagatttccctggctactgatacaccttaacaagaagcttgtgttttttatgccctcaaaagtgttttacttatactttcctagacataaaggtggaaaatgggcctaaggtctgtcaaaggtcttggaaaagaagattgtattaaaattgctgtccgtcttcattaaataatactagatcgatacaatgctttctttacagtattagtggttggtgaaagacttccttcctattgttacagtatatgtatatatctgtaaaattaatgagatatcctttaacttgtagattagaaagcgactaaaaactcataggggatttactaaagaagcaacaatgggaagaagcagccgatcctcctcagtgcacctttttctgttgcacagtacagtgcacagtgtgctggcatcaccatatagggcaagctgtgaccgcctttctcctttcccagggctacatggtgccaagcaggttcagtgtacactggttaccaacctgtctgattccattgtgacagaacacactcacacccaatacattacatgaagcagatttattacttacagacaggaagcaagggacaaaagaggccctggctccattgtgagccagtcccccagggctcaagaaagctgcccagggcggggctgatggagtcttgattgtacgtgccccacttgcaccacagcctgccttgggttatataccataggagccacataactcattgggcaaagctttaaagtacatcctccttccaggggaaagaggaacacaacctcgctgtctcaaacagttccctaaatcaagatgttacattccctaggagggacaacaacaaggccaacctgtttcaggcagttcctccatatcaggatattgcattcccagtgcattctacagttattcttaagaactacaagcaaggaagaagggagaactgggtcagtccaaggccacctggagaactgtcttgtacatgggttagggtaaagttggctattctaaaactaagcatccacccaaaagaagtcttggaagatgtctttccctgttaaattcagatgatggtaattatagtttggaagtggaattggcttttagagttacttcctgtaatgaaattaacaagcaattcaggcctatttctgaaaatgaattcagtggttaattgttaaaaataaatgtctaactcctataaaaggaaatttacattcatttctaactcactaaaaaatctatggccgggtgcggtggctcatgcctgtaatcccagcattttgggaggccgaggcgggcagattaccggaggtcaagagttcgagaacagcctggccaatatggtgaaaccccgtctctactaaaaaatacaaaaattagccaggtggttgtggcatgcacctgtaatcccagctacgcaggaggctgaggcagaagaatcgcttgagcccaggaggcggaggttgcagtgagccgagatttcttagaaggaattgttacttattgttctgaagtgaaagtctggtctgattcagaagaaatgttacaacaacttaaacactgatgctttcagaacgggcagcaattctcagcgtaaattctgatcacagggaccagcaaaattggtgagttgcatagctacaacattctgtgccatccagggcactctagtttggggatacaactgccaaacctccaactagagagtttagtttaagatttagtcaagaagcagaaaggtaaaggtgacaatgtgtagtaaaccatgatagatgttataaaaggtggaatacttgtactggaaatgcatacagcgcctcatcccctcttgaggggtcaggaagttttcacactaatgatgatggtgatgagatgatgtaacagctaaagttttggaggcattcactattgctaggcactgtatcagcatataacatggcttatcttactcagttttcacaataaaagggttatgagatgggaactattattactatcttgatttttacaaatgagaaaacaggagtagacattaaggaatttactcaagatcacagccaaccaatgcactgagctggacaaggtcaacttgggggtgaagggcatatgtgttgctccaagtgtgtcagtataagagagattagggtgaggttttatgcagagtttgggcttcagctgagtaattctaaggagggattaggggaaggaaggcagtttagtaattgagtatctcagaaactttaatttggaggagaacggaacaaaggtaggccaaggaagctattcaatcactcaaaagatagaggttattagtcattttacagctgtaatgcatccttgtgaggaacattttttgcttggccttgtccctggccttgtatgtgtacattacagtctgattattagttgggatgatttttagtttctcaatccctactctcattgccccagtttaattcctcaacacctctcacctagattattgtgatactctagttttatcttttaaatcctttatattgcaaagcagagtgatttacctaaaacacaaacacaaccacaataagcctctatttaaaaagctttcaacggttcactgttgtctctacagaatgtaaacagagcgtcttaacatggcacaccaggccctccttaacctagccctcccagcccatcactacaactatattccttgatattctcgaattgcactttattttgttttgtttttttgagacggagccttgctctgttgcccaggctggagggcagtggtgccatctcggctcactgcggccgccacctcctgggttcaagcagttctcctgtttcagcctccagagtagctgggactacaggcatgtgccaccacacccggctaattttgtatttttagtagagacggggtttcaccatgttggccaggctgacgaactcctgacctcaggtgatccacccgcctaggcctcccaaagtgctgggattacaggcgtgagccgctgcacccagcctcgaactgcactttaaattggatagctgggcgggcgtggtggctcgcgcctgtattcccagctactcgggaggctgaggtggaaggattgcttgaccccaggaggtcgaagctgcagcgagtcgtgattgcgccactgcactccaacctgggtgaaagacaagaccctgtctctaatatataagaaatgaataaataaataaattcgattgccaaaattcttgctgttcccagcatattccactttcacctttcagcgcctttgcttatgctgatctgactgtaactgcattcccacccttctccttctgggtaaagggcatcttctttccaaactcaactcttagcatcagaaagctgtccctgatactgcagttgagtcgcatgtgatactgaaaaaaaaagaaaaaaggaaaaaaaagagagctctccctgaatcccttggtggactatgttaggtaaacttcatctttgcctgcatcatattatgtattggttcttctctgccccctcgattgtaaactcctcaggggcagaggtaacagctttgcagccctgggagttaggtttgcttaagggaccagaacaggtgtgactggcagggagcgaagtctggagctttgtctgaggcgctgataggtggatcggcggaaggacgcggaacctggacaggtcggaaataaagccgggcgagcagctctgtgcgcgatgtgacttcatgagtggatgctgagaaaagcggcagagtacgactttaaccgcctagccacaacacgtcctgctagggcgaggagggagacagtgatacagcactgggcaagtgctgaagcgacaattacttctagggcggggtaaaagccccagagtatttttgctggaaggaggtatttatttgagcagggttctggaagacgagccgccgaagggtacctccggctttccgtttcaagtcccacgctggtggaggttgctcggtacccgcgcctgcgcgtgcccgtctcgactcttaggcccgccctttcctgccagacctggaggggcggggcggtgccggcaagatggctgcgcccgagaagatgacgtttcccgagaaaccaaggtaagcgccgtacggggagatgagcaggcgagcgggccgatcgtgggcatggaggatgtggtggcaggaagaaaagagaagctgggccaagctaagtgagccaccgcggcagctccattccttcctggtgcgcgcyctggtgccctccccggacttgcacgggcggctgtggctcaggcaagcgaggagaggatcaggttggcggatggagaagaactgtctgggagtgggaggatgaggcgatgatagatggctgttctgtaattaaaatacaggaagcaaggtttctctcctcagcacccgaactatttcctttcattgggcacagaggagcggggagctcgggcagcgctgcattgtagccgctgatcgtcgtgtatatgtcttaatcttccagccacaaaaagtacagggccgccctgaagaaggagaaacgaaagaaacgtcggcaggaacttgctcgactgagagactcaggtgatggactctttattctgttttctgtgttgtgaaattgctctgtccactccagccctaacttgaagccccagtgtcagaaggaagtcaaatattgtgtcggaggaaaaatagctgtgacttctgcccccaagtagttatttagaaacacatgtcagaaacaatgttaacatactaaaggcaggaagaggaagtcttggtgaatgatcgcccactgattctgtgtaacttataaagtatctaatattacagttgcaagcttcatgaattacagcagctagcacagtccttgcacacgtagtaagtattcggtgaatgtttttcttcgtaaaaccagcaggagttgaaggtattaattagacgttttgcaagtttttctcaaacttgactaatatgagacccttggtttacccaaattattatgttattcaaatatatatcaacataatactagttatgaagctcatttatttatttttgagacagggtcttgttctgttgcccaggagggatgtgcacaaccacggctcacagcagcctccacctcccaggctcaagcagtcctcccacctcagcctccctagtagctgggactacaggcattcaccaccacacctggctaattttttcttttcttttctttttttttttttttttttttgagacggagtctcgctctgttgcccaggctggagtgcagtggcacgatcttggctcactgcagcctccgccccctgggttcaagcagttctcctgctgcagcctcccgagtagctgggattacaggcgtgcgcaaccacacccggctaatttttgtatttttagtagagatggggtgaaaccccatcatgttggccaggctggtttcgaacttctgacctcaggtgatccacccacctcagcctcccaaagtgctgggattaaaggygtgagctaccgcccctggcccacctggctaatttttaaaattttcgtagagacgggatttcactgtgttgcctgggctggtctcgaactcctggcctcaagcaatccttccacctcggcctcccaaagtgctgggattataggcatgagccaccacacctgrcctgaagccattgtttgactataaaacaatatatgggctgggcgcgtggtggctcatgcctgaaatcccagcactttggaaagccgaggcagatggatcacctgaggtcaggggttcgagacctgcctggccaacatgatgaaaccctgcctctactaaaaatacaagattagctgggcttggtggcaggtgcctgtaatcccagctactcaggaggctgaggcaagaggatcagttgaacctgggaggcagaggttgcagtgagccgagatcctgccactgcacttcagtttgggcaacagagtgagattctgtctcaaaaaacaaacaaacaaataaaaatacatttataaattataaaactaaatgaaattacacattcggtaaaatttaaatctacatcaggtaatgctagggatgatgtgaaactaatgctcctcacaatatgtatatggcactgatgggagtttggaatgcctctactaatgttgccttatagttatttaccactttttctatgaaattactgtagaacctttatttgtacagatggtcatttgaccttcacatggcaaaacctaacatttatgtattaaatctacctgcttaatgcaataaaattaggacttagttataaaattatgtagtagttataaatccagatgggagcactgaaatcacacagtagtactggcttataatgattgtcatccgcattatccagaatatgctcatgaaattatcctagacaattcttaaaatccagagaccatggcctcaagtaactaggattcttggaccttgagaaacatagccatagaggttttatttaccattggtgttcctgagtaattattttagtgtcagtactgggatatttagaatggaaggagcagtgtgtttaactgcaacctgtgttagcatttctgtcttattagttgaaaactcatccactagaggcagaacaaagcatcagggataaaaggaaaagtagaataggttggagttattgaggcccttattgtacttcrtctctccccccttgaaattttcagctactttactttgttcatttaatctgttttattctaaatattatatattctaaatttgttttaacttctttctctttttcttttcctgcactaaatcctataacagctggtatttgtattgttttgattttttttttcctttttacttagcaaaatgtgttcagaatgagcctctgtggagagtcaggcgagtcatgtcccatggtagtttagcccattttaatggactaaatccaggtcactggtctgtcaagattatgtaactaatggcatatccaagactaagcacctgtctctgcacttctgctcctacttttgcccactccaactcacaattctttgcctagtggtacttcatgaatactgtagactatggaacactcctggtttttttttttgagacagagtctcactctctcgcccaggctggagtgcaatggcacgatctwggctcactgtaacctctgcctcccaggttcaagtgattcttctgcctcagcctcctgagtagctgggattacaggtacccactatcatgcccggctaattcttgtacttttgtagagatggggtttcaccatgttggccaggctggtctcaaactcctgatctcaggtgatctgcccaccttggcctcccaaagtgctgggattacaggcgtgagccactgcgcccggccaggaacactgctgtttattgtagcacacgttagatgggtaaacattacccagaaggctagaatgttgagtgtaactatgagagtgccttggcaaatgattggagtgccttggcaaatgatttctggaatagtgagctcttaattacagatagcttctttggcatccattctacttcagataactggaaacaagctacctcgtcagaaattaagatattaaaagcaagttgcaaaactatagcatgattctgtgtgtacagttacatgtacaggttgagtatcccttatctgaaatgcttgcgttgtatttaccagttcagcatcccaaatccaaagatccaaaattcgaaatgctccaatgagcatttcctttgagcattgttgtcactcaaaatatttctcatttttggatttggggtgctcaacctgtataataccattggatatacatttgatccttgaacaatgtgggagttaggggactctgaccgccccccgcccctccccacagtggaaaatttgcatataacttttcactcccccaaaacttactattaagtgcctgctgttgactctaagccttaccaataacataaacagttgattaacacatactttgtatgttatatgtattatataccatattcttataataaagtaagctagagaaaagaatgttactaagaaaatcccgaggaggagaaaatatatttgcccttcattaaatggaagtggttcatcataaaggtcttcattctccttgtcttaatgttgagtaggccgaggaggaagaggatgatttggtcttgctctcttgggtggcagaggtggaagaggtggaggaggtagaagggaaggcaagagggtagacggcacttggtgtaactttgcagaaatacattataatttctgtctgacatttttgctttttcatttctctaaaaatgtttctatacagtaccaattcttccaccacttgctttagtttaaatgcattagttttcagtatagaagggtccataaaagaagtcaaaagcagtcttgaataattggcccttctgccagattgtctagtgtcaatttgttttctggcactgcttcacctcagttttcttcctcatcaccttgcactggtttggaaggactcatccccatcaaattggcttttgttaactactctggtgtgtctgttagctcttgaatttcttcaagatatcttgagacccttcaccccgacccccctgcacttttcccccccccccatatttacaatctctttcacgatttccttgattggctctgtcttaagtccaatgatgccatgcacaatatctggacacatttttttctccagcaggactttgttttgggcttgatgattttcatggctttttctataacaacaatagcatcttcaatggtataatctttacacactttcttgatactctctgtattagggttctctcccatagcattgacaatcctttccgtagagtaccacgtgtaatgagctttagaggttcttacgaccccctggtctagaggctgaattagaaacattgtgtttgggggcaagtagaccactttgacaccttcagtgttgaactcatggggttctgggtggccaggggcattgtccaatattaaaataattttaaaatccagttccttattggcaaggtacttcctgacttcagggacaaagcatcagtggaaccaattcagaaaaaaggatttccattgtccaggccttctagttgtacaaccaaaagacaggcagctggtgctgatcttttcccttcaaggattgggggtgggggttagcagctttatagataagggcagttctgatcataaaccccactacgttttcatgaaacagtagagttagcctgtctctttttgttttcaatcctgctgcttgcttctcttcctactaaatgtcctttgtggtgtttttctagaataggatactttcatctgcattaaaaacctgttcaggccaggcgcagtggctcacgcctggagtcctagcactttgggaggccaaggcgggtggatcacgaggtcgggacttcgagggcagcctggccaacatggtgaaaccctgtctctgctaaaaatacaaaaagtagctgggcgtcctattcacgcagatatcctttctcctcagtgattttcttttttgttttttgtttttttttttgagatggagtcttgctctgtcgcccaggctggagtgcagtggcatgaactcggctcactgcaacctccgcctcccgggttsaagcaattctcctgcctcagcctccagagtagttgggattacagacacgcaccaccgcgcccggccatcatgacttttctctgcttcttgagagcacttccagcatcgctagtcgcactttgtgtgagtctcatgatgttattcaaggtttaccattttgtagtaaacacagtgaaaaatacgccagagatcacttcttactgccatacacaatttactgaagagatgaactgctcatgcagagatgagtagtgtcacaaggtgttttaagtgaatactcatagtatttgagctcactgcaatagcagcaggaggtggctatgaaattattrcagtagtgcagtgtgtactacagttaatttttttcttccttctgtacctcattggatgcgttttttccttgttttgtactacagttaatttcatgcagttatgatttaatactgcatatttatgtttgtttacatttttctcaactgtgaatgtgccatatatggtctataaatataagttttgataaattttaactttaaaaaaagttgtcaatgattatgttgtagcacaacttttatagtaatattcaaggaaaaatgtttgagaccgaacttctctgtcttagaatggaatgaagtcagagatcattttgtttcaaatcgttttttttttttttttttttttttttgagacagagtctcgctctgtcgcccaggctagggtgcagtggtgcaatttcggctcactgcaacctctgcttcccagtttcaagcaattctcctgcctcagcttcctgagtagctgggattacaggcgtgcaccaccacacctggctaatttttttatttttagtagagatggggtttcgccatgttggccaggctggtctcgaactcctgacctcaagtaatccgtccacctcggcctccgaaagtgctaggattacaggcatgagccaccgctccctggcctgtttcaaatgctttaagcaaggaaacaataaaacacttaacttatattgtaacagtatctgtatatgtgctgctcaagccagcacaatattgcttaacagtatctgcattaactttttttttttttttttttgagacggtgttttgctcttgtttcccaggctggagtgcagtggcgcgatcttgactcactgcaacctccacctcccgggttcaagcaattctcctccctcagcctcccgagtagctgggattacggggggctgccaccacgcccggctaatttttgtatttttagtagagatggggttcaccatgttggccaggctggtctcgaactcctgacctcaggtgatccgcccgccttggcctcccaaagtgctgggattccaggcatgagccaccacgcccagctctgcattaacgttttataatagatttatatttatggtagcaaatgataaaatagactagtatgtacatatattttatgcattcatgacatacctttttcttaatttttttcagtgtttctaggccatgccacttacctattttttttttcaaattgttgcaaatatcccctaaatgttccagtgtgtttactgaaaaaaaatctgtatttaaatagaccaaggtggttcaaacctgtgttgttcaagggtcagctgtattgtatgtatatgtattgcatatgtccgattgtacacgtggggaaaatgctgtacccagaactgttagcaatcacttctgtggagtatatgagcttggtttcgaggtgatggggagttgagtgagtcagtcaacaggtgtttgtgagtgtcagctgtgtctatgccctgtctaatctatggcatacctctgcaagtagtcaggccatatcctctgtgccaggttctctggcgctttaagtacattagatcatttaattatctgaacaattagatactattttatatgattgagaacttattctacatttgttgcccattttaattccagctgctgaaataataaagtttacttacttaagaaaagtaaattattgtaattatctaagactggatgagccttcagttagaactgtactcaacacatgtgacaaacagactcttttttctttaagcctgacatctgtaacatttctttaagattatttcagtcttccatttctcttccactttcactgatttttttcccaaattttgaatgggagaggatgtaaatgtctattctattaaaagttgttttttcatgtttttatttgggaaatgttctaatctacagaaagttgaaaaaaagagcacaataaatatccatgaacccttcagcaagatttgccagttgttaaagtttggcctttctttctttttctctatttaaagagatacatacatagaacattttttctgaaccttttggatggcagttgcagatagcagcacctcacccctaaattcttcagcttgcaactcctaagaataaggacattctcccgcagaaccacaataccaaacttgcacctgagtacatgagcaagtaattcaatggtatcatatacaggccatatttaaacttccccaaaccaggattgattgttttgaaaaactcaagccagttatcttgtggaatgccctgtattctggattgttctgtcttctcatgattaacttcaggtaacaacactctttagaacaaaggattacagagcagatgttgtaaacttcttattgcatacatcatgagacctttcacatcaggttgttgcactcccggtgatgctaactgtggttaaggtgttacccacccagggccggacatgctggctcatgcctgtaatcccagcactttgggaggccgaggcaggcggatcacgaggtcaggagattgagaccatcctggccaatgtggtgaaaccccgtctccactaaaaatacaaaaattagctgggcatggtggcgcgcgcctgtagtcccagctacttgggaagctgaggcaggagaatcgcttgaacccaggaggcggaggttgcagtgagccaagatcgcgccattgcactccagcctggcgacagagcaagactcccgtctcaaaaaaaaaaaaaaaaagtgtccagatcgctccattggaaagcattgcattttttcttttctaattagtcctcatgtctggggtgatatgttgagatagtgtgaatatactcttcctagcaagctttcattcgatgtttttaatgtctttgtctaaatttttacagtgggggttgcaaaagtgatgatttttctacttaagtttttctccattttttagttaccattcttctgtgaagatggatgttcccttccacacccccaccaccttttttttttttttttttgagatggagtttcactcttgtcgcccaggctgtagtgcaatggcacgatcttggctcactgaaacctccacctcctgggttcaagtgattctcctgcctcagcttcccgagtagctgggattacaggtgcctgccaccatgccaagctaatttcctttttaagtataattgtggaaccattgattaatttttaaatgtaatgtgctatctgccacccctattgtcctttttgatgcttgtgttgtaccaaagaaggttgatcagagacctttttgttagaaagtttaagaaaaagatttttaccataattttatacattaaagattacatgtatttttttcctgaatttttgaccaaggatttgcagcrctcagtttaataaaacatttaaattccctaggactctcacagaaggaggaagaggaggacacttttattgaagaacaacaactagaagaagagaagctattggaaagagagaggtcagtgctaattgaaacacttaaagtgaatgaagttatttattggaatattatcaacctttactaaccagtaccagtcttctgtataaaatcttgtaccaaataggtcttataaaatatcctgtataaagtatttaaatctgtagttgatgggctaaaactagatgttattttttttaaaaatggaagtacttttcttctgtttttgctaatttataattttttttctttcttttttttttttttttttttagacggagtctcgctctgttgccaggctggagtgcagtggcatgatctcagctcactgcaatctccgcctcccgggttcaagcgattctcctgcctcagccttccgagtagctgggacaacaggtgtgcaccaccacacccagctaatttttgtatttttagtagagacagggtttcaccatgtcggccagggtggtcttgatctcttgtgatcaagtgatccgcctgcctcagcctcccaaagtgctgggattataggcatgagccactgcgcctgacctgtaattgtttttgaaaacagaaaaaaaacaaaaaaaattaacaaatgtaaaaagggaaaagactttaataattgcaacacacccaaagatagccactgttaagaaagagaaaaagaaagtgtaaatgtactttacgtgtgtctttctataatggcatgatatttatacatatttttctataaattgctttcttgctaaatatatagtgcatttatttcagtactgatgcagggatctaattcagccatttcagtggcaatacagtacccactgtacagatgtagcataatttatttgctattcatagtttattcatttataatttatagttctctactgatggactttcaggttatattggtttttcactcatatgtaaaaagttgcagtaagcatccatgcttatatatccttggtaattgtccagttatttccttaagaacatgactaaaaatgagattgttggaatcaaatcataagtccatgtaaaatgtagatggccaggtagaaagggcttcctggtytgcagtttgcagcccttctggcagtgaatgtaggggcccatctccccataccttcactcatactaggcattatcagtttataaaactataatgaaactgtttcaaatgcacatttctgaattaggtagagtatctttttatatgttttattacctatttgtagattgctcaagtctcacacctttctcttttgggatacatgtttttttaaaatttgtttttgttttgttttgtttgagacggactctcgttctgtcaccaggctggagtgcagtggtgtgatctccgctcaccgcaacctccacctcccaggttcacacgattctcctgcctcagcctcccgagtagccgggattacaggcacgcaccgccacacccagttaatttttttttgtacttttagtagagatggggtttcaccatgttggccaggatggtctcgatctcttgacctcatgatctgcccgcctcggcctcacaaagtgctgagattacaggtgtgagccaccgcgctcagccgaaatttcttaatgtctctaagcttctatttccttgtctgtaatatggagataaagtcaatcacagtatccacctcacagaattgtgaagattaaaggaggtgatggatgtatagtgtttaacacagtgtcagcagatgagaggtgctgtgatagctctagttcttattattatagatttctgttatgatgaagacaatagatacggtatgaaataagagagtaatttttttcctgtttatttgaaatgcttcttttaaatcacatacatgtatctttgtgctccttagatctttatttctttatgagttgcatactattattgaaaagcaagaaaattatgtaaaaatactgtatgactttatgtcctatttcaaagcagatgtatattcaagttattaaattttaaaatttttaacattttactttcttgtggtcttaatttatatatcatttggttcatttatatacaattatatgtttttcaaaagatttgtaaatcagagttgtgcccactgaaacatctatatggtaccctcacacatggcataggaacactgatagatgcaatgtgccagcctctgccatggctaaaagatgtgttcctggaatctgtatttggaaatgtaatatattttatttaaaattgtggttaggtccccagactagacataaaactttactgaactcctaatactgctgaagtaatatagaacagtttctcatatttaatttcccttttataaattcagtggaagaatgaatttgaggttctacacacctaattggcaggtagactttggmaatctaaccccctctttatattagaaatttgtgatattggatgtctgagacacttgccactttaaggtaataccactcattataattggtcatataaaaaatagactagacactcactaatttatttttattttttcattttttgagacgaagtctcgctctgtcacccaggctggagtgcagtggcatgatctcggctcattgcaaactccgcctcccagattcaagcgattctcctgcctcagcctcccaagtagctgggattataggcggctgccaccacgcctggctaatttttgtatttttagtagagatggggttcaccatgttggccagcctggtctcaaattcctgacctcaggtgatccgcccgcctcagcctcccaaagtgctggattacaggtgcgagccattgcgcccggccctcactaatttatttttataactccatttcttaaaacctgtagctttattttaaaaacatgattacaatgtacttttattttccttcttttggctgtttaggtgtttggaggcaaaccacaggagtctcttaactgtgtgtagtagtagtccaaaggtttatggcaaaggatactgggttttcagcgtgctgccatcatggaattgctacttttaagaataggggctgggtgcagtggctcacacatgtaatcccagcactttgggaggccgaggcaggtggatcacttgaggtcaggagttcgagaccagcctggccaacatgatgaaacgctgtctgtactaaaaatacaaaaattagccttgcgtggtggtgggcacctgtaatcccagctactcgggaggctgaggcaggagaatcacttgaacccgggaggcagaggttgcagtgagccaagatcatgccactgcactccagcctgggcaacagagyaatactctgtctcaaaataaataaataaataaaaataaatgcatagaataggaagggaaatgctttctgaatatgaaaaggtagatgctgctttgaaacttgctacccattttattgtcacctaaacrtcactgtgatcagtctagagggaaagtcatagtgtccttttttctgtaaagtatgtcacagccatatatacctatgaaatgtaagagagattttaagttattacccattaggaagatagttgctgacacgtggtgcttttccaaaagctctgctcttctcgttctcttacacccacttgactgctttaatagaaaatagctttcgtgatatttgaatcagtcccaaaatgtgtcattttgctctcgtgtgtgtgtgtatttgtggattaatgcccatttcttttatctgattacatcattatactgataggcaaagattacatgaggagtggttgctaagagagcagaaggcacaagaagaattcagaataaagaaggaaaaggaagaggcggctaaaaaacggcaagaagaacaagaggtatggtaggaatcacgtaactagtgaacaaactgattacttcaccataataactctcatgaagagttgcctatcttgggaggttggagtgagytgagatcaygccattgcactccagcctgggcagcaagagcggaactccayctcaaaaagaaaaaaaaaaaagagttgcctatcttgaacttaaaaaaaaaaaacaaaaaactgatcttattcagtttgccagtgttttaagtttttcatctatgtgcgctgtatgtgaaatgtttttaaaaagtgactgaaacaaagttactttttcttcccctttaaagagaaagttaaaggaacaatgggaagaacagcagaggaaagagagagaagaggaggagcagaaacgacaggagaagaaagaaaaagaggtgattcctgtcatgggatgtgctgtgtgatgagtttgaagaataatcagtaggcatgtcagagtttgggttttttttttctctttttcttgtcatttcattgtttgtttggaaagaatcatatttcagtttagacataacaccagagttcccttctgatgctcttcttcgggtccgtgcagtggcagattccttaaagttttcttcagctttaccctatttaccctttatactgggcattggcaaatgttgtaaagggccagatggtaaatattttaggctttatggtttggtctctgtggcaaacatccaactctgccagtgtaccctgaaagcagccatcgataatatgtagatgaatgggtatggctgtgttccaggaaagctttatttacaaaacaggcagctagcccttgctttatagcaagttatgttcttctgaggttctgctgtatatgagttgacttctttagagaataatactttgttttktttycacatttatttaggtcataagagaactgcttatgacatgtcagcaagaattagaggatttaaagaaatcaggaactcaaatattgaggaactaggaaacagtttttgttatttgtattaaatcttgacttcctcttccacttaggctatgaagayaattgtagctaacacacagttgcttatttaaaaaaaaaaaaaatctgtgaggcatatgtgtgtatgtatcttctctatcttccaggattcttttttaaggattgatttggtatgttttgctgctattccttgacagtatatttatttcagaggtatcacagctcatcttcccttgactgattcatcaggatttgtcttttttgtaatacagctaaatttaaatagcataaaattggataatcaccttataattgggaaaaatgcatgtgtcttcattgtagtcaatatggggcagaagcagcctccacgatctttgttttttgtatcttaggccatcagttaatttcagtgcagattttaaacacctttatttgagcacttctttccagatgaggcaagwtcatgctaggtttttagggggcagaaaaattgtttggaacttgtcatttttttatagagaggaattaattcccattttaacagtagagtgttcctcaactgaggtctttcaggaattcagtaacagctaaggcctcttttgaatgcttttgtttcagaggaaatctgtgagacttcaaggagaaatgagggaaatgaaatagattctaagcttataaaaaagaatcagcagtatgtgttcctgctgtatgctagacacttcgctagcggacagagacagagcagtgaaagacacagtctttgctctcattgagctagttttttatatgggagtgtgagatgataagcaaaacagatcattcaaaatgtgatcatattaagtgctataaagaaataaagcaggccaggcgtggtggctcacgcctgtaatcccagcactttgggaggctgaggcgagaggatcacgaggtcaggagttcgaggccagcctggtcaacatggtgaaaccccgtctgtactaaaaatacaaaaaattagccaggcgtggtgatgggcgcctgtagtcccagctactcaggagtctgaggcagaagaatcacttgaacccgggaggcagaggtttcagtgagccaagcttgagccactgcactccaacctgggcaatagaactagacttcgtctcaaaaaaaaaaaaaaaaaaagaaagaaataaagcagagtgatgtgatagagtaatgagaatagagttgtgcttctatagattgcctgctcaaggaaatttctgaggaggtgatgtttgagctgacacctgagtggagagatctcagcaagaagaagcctgaagcttgaaggctgaaaaaaggccagggaacctgaaatctagagtccaaaggagagaagggcagtggaggaggttgctgagggagagggggcagtggaggaggttgctgagggagagggggcagtggaggaggttgctgagggagagggggcagtggaggaggttgctgagggagaaggggcagtggagggtaagcagagtcagatcatgtagggcttcctggatttgaaggaggagtttggattttatgtttcctataatgggaagccattgaaggggtttaagcagggaatgactctgtctcatttatatctgtaccttttaacagatcattcatttaaaaaaaaaatttttttgagatggagtctcatgctgtcgcccaggctggagtgcagtggcgtgatctctgcttactgcaacctctgcctcctgggttcaagcaattcatatgcctcagccccccgagtagctgggattacaggtgcctgctaccacgcccagctaatttttgtatttttagtagagacagggtttcaccatgttggccaggctggtctcgagctcctgacctccagggatccacccgcctcggcctcccaaagtgctcgtgtgaaccactgcaccagacttttttaacagatcatttttactttactgaaacctctgcctcccgggttcaagcgattcttctgcctcagcctcctgagtagctgggactacaggcgcccatcaccacacccggctaattttttgtgtttttagtacagacagggtttcaccatgttgaccagaggacaaggagagagagaggaattcaagtcatatttttaggtttttagtttgaatagacagatagactggcaacactattcactgagggagcattcaggtggatgtgggccagggagtgtagaggacaagagttctgttttgagcaccacaaataagcaactagacatacgagtcttatgtaatgctttaaggggctagggaagataagactgtctgttaaacataggtacaacttgttcaaatgccaattaggtagaaatttactggcatattgcagaacctcctttgccttattaaaaagttagaattttctcctaaatgctaattaccactggtcatgtcatattttagcttctgctaaatgtttatgatttcatctagcattgttttttgggttttttcgtttgtttgtttgttcgtttttttttagacagagtcttgctctgtcgcctaggctggagtgcagtggcgtcatctcggctcactgcaacctctgcctcctgggttcaagcgattctcctgtctcagcctcccaagtagctgggattacaggcacgtgccaccacacctggctaatttttgtatttttagtagtgacggggtttcaccgtcttggccaggctggtctagaactcctgacctcaagtgatccacccgcctcagcctcccaaagtgctaggattataggtgtgagccaccatgcccggcctagcattgtgttttatattcactaatacccccttttacgaactaggacatggtatatatactcaaatatactaagtattactattattgaaactattataagactattttaaatattttgcaatgtgatctggtaaattttctatttgaatagaacgtctcagctatgggccgggcacggtagctcatgcctgtaatcccagcactttgggaggctgaggcgggtggattgcttgagctcaggagttcgagactagcctgggcaacatggtgaaactccgtctctacagaaaatacaaaagttatccaggcgtggtggtgtgcgcctgtagtcctagctactcggaaggctgaggtgggaggatcacttgagcctgggaggcggaggttgcagtgagctgaggtcacgccactgcactccagcctgggtgacagagtgagaccctgtctcaaaaaaaaaagagaaaagtctcagctatatatcctttgaaagcttttcaaaagatctgtgattcaaaagaaaactagaacttgtgtgcgtgtgtgtgttttaattgttccacttgagattcttaaccagagaaaccagatgtgacttacctgacttctgggtttttattagtcctgtgtttgcaccattttaggaagctttgcagaagatgctggatcaggctgaaaatgaggtatttttaaaaccttacattgataatttgagaccaattaatgtttccttagaaataatagttccagtaatgttagtttcgtggtaggttagttagatcatgtttggatatctggactcatgtttatgatgctttgatttatacaacaacaacaaactttaytgatgaacaaatacaaatggtattcatgacccctgtggactggacctgtttagagtccttacagtatgtttaagcaacatcacataccgttagcctccagtggacggtttaccttgaatcagagtaacttctatttctgtctgtggtggttccctaataagttcttggacccttttttttctctttttttcttttttttttttttgagacggagttttgctcttgttgcccaggctggagtacagtggtatgatctcggctcactgcaacctccgcctcccgggttcaagcaactctcctgccccagcctcccaagtagctgggattataggtgtgcaccaccacgcccagctaattttatatttttagtagagatggggtttctccatgttggtcaggctggtcttgaactcctgatctcaggtgatccacccacctcggcctcccaaagtgctgggattacaggcgtgagccactgcacccggccttcttggaccctttttagaatggatggaaaccttggcgactgcccctggtggcagtagtgataccagataaaggaaagtgaccaggagccaagagagacatggagctcatgtctcagtaccsttgtttgtaaagtcttgattgcctgttccaacttaaatgtttgcattattaaatgaaacaatgtttatctttgaggaaaatattttaatatactttgaaacatttcgtctttcatgggtttttactccaccagtaaagtcatggttattttcaacagttggaaaatggtaccacatggcaaaacccagaaccacccgtggatttcagagtaatggagaaggatcgagctaattgtcccttctacagtaaaacaggagcttgcagatttggagataggtaactawttttgttttatcatgtcagaatgaagtgattcaaaaygctgacgtttttgagttccccttttgggagaggcgcakgtttccatttcaaatgtccgtcatcagacatctgctgccttcttgctgctgctctcgttttcccagctgatcatcctctgctttgaccatccctgttccctctatccttgttccctgggtgggcttagcctagttctctgagggtgcttcctttgcattctgcatctttaggaagccactttgcttgttggtttcttcctgagcttgcattagtccatggtggacaactgggttggggaaataatatatttgaagagcttagagcagcttggctttattttttgaagggcacacactgtccccaaaacaggcttttaaaacttggcatgtgccaggagttccaggctgcagtaagctatgaccacaccactgcactccagcctgggtgacaaaacaagaccctgtctcaaaaaagaaaaaaaaaaacaaaacttggcatgtgtaaagggatatctgtgaaagacaggatccaaatgaggagaggaaaagtgttttaatttctgttgtcagtgagtktgcccagactcaggtacagaccgttgggttcaaaacgggcttcagtggctgccagtttgggaaagttgcttaagctctgtgtgccttcgttctctcatctatgaaatgggattaaacatagtctcatctttctgagggggctgtgaggccgaaatgagcacacacacccgtagaacagggccccaggagtgcttgctggcattttcattattgtgactcttgatgttattctgtgagacactcttcttgttccctgccccttttgggtcaatgtttttgaaagaagacgttcatgtggaaacctagtgttgatctcttcagtcatttagcaagtcttcgaacacctattatatgccaggtaatggtgatttttataatttggcctgtttattaatgaacaacttaaagtaggtaaataattcctaatggtgaatgagtccatctgaggcaaaatctgataattatcaccatatattctgcagaagagaagatctaatcataaccttaacatcctattaatcctgaaaagggatatgaatagtaaaattcagatgtatttaatcagaaaccatatgtcatctgtcagctttactttattcataaaagtatccatgctgtgaggtttttttycttcttcttcttctttgaaaatatatccttctctatggttctctcctttttctttttgaatttaagcgttcacaccatttttcattttttaagaacagtggttcccaaccctggatgcacattagagtcatctagaaagctttaaaaaattatgtcctacctcaagttgagtaaatcagaatatcagggccaggcgcggtggctcacacctataatcccagcactttgggaggccaaggcaggcagatcacttgagctcaggagtttgagaccagcctgggcaacatggtaaaacctggtatctataaaaaaaaaaaagtaaaataaataaataatatatttatatatatttatataamaatattatataaataaataataagaataccagggacttgggtggccttagtttcaaaatgtcctcaggtgtctctagtgtgccctaggattgagagccactaatgtcaagtgtgtatgtccttttgtattttagaggtgggattgcagatgtctggaatgtctgtgaaaagagtcatgggatctgctaactagtagaaagcctcctcttgaaaaactgggaactaagaaaaggaaagagactttattccctttgatacctttagaaccatttctcagatatccactttatctaaacaagaaatggtaatgattggtgtaaaaaacttcccaccaaagaaaaatgcactgtgaattacctttcagagacaactgagactccatgtaagttcacatttgcatgggtasttgaaccaaattgcatttaaggttttccagctgcaggatccctcatgtaggatctatctctaacatttcctccaaatttaagacccgtggtagcctgattcttgattctcaccccccccyyttttttttttgagacggagtctcgccctgtcaccaggctggagtgcagtggcatgatcacagctcaccgcaagctctgcctcccaggttcaagcgattctcctgccttagcctctcgagtagttgggactacaggcgcatgccaccacacctggctaattttttttgtatttttagtatagacgaggtttcgccatgttggccaggatggtctcgatctcttgacattgtgatccacgtgcctcggcctcccaaagtgctgggattacaggcatgagccactgctcccggcctaattctccttttgttgggcataagtgagaggaggggagatgtcttaaacgatttcgagaacttggttgacaggccctaccttgtgggaagagggaatggcccgtcatgctctcagatcccatctctcctcaagtcatttcaaggaaatatggacagtggtcaaattagtttgcgagcatttcttttttttattttattttattttattattattcttttttgagacggagtctcgctctgtcgcccaggctggagtgcagtggcacgatctccgctcactgcaaactccgcctcctgggttcgcgccattctcctgcctcagcctcccgagtagctgggaccacaggggcccgccaccacgcctggctaattttttgtgtttttaatatagatggggtttcaccatgttagccaggatggtctcgatctcctgaccttgtgatccgcccgcctcggcctcccaaagtgctaggattacaggcgtgagccaccgcgcctggctgcgaacatttcttacaattttcataggcatatgaaattttaccatcacaactatcaaartataacagcagtgtggagattttcatcattcaagtgataagttgtgacatgaaattctgcgaaatttgcagttacaaaatccagcaccatccctttagacaagtagactgctctgttccctttttatggagagccttggtgacttgctccagatcgtacagctgttctgttctgtcgttaagttttgtcagagcatcagaggaacacttccataacctcagcatttctttggctggttgtttttgtaattagtacagagttcaattctagagccatgctggaattggtattttttggagtcacagctttgaggggaatctatttgtttttctcctaaaaggtaataattactaatggaaggtaaaacttagtggtctatttatacctcacttacttccaaaagtgatttaaagaaggttcgtgatctagcacattaagttagagaaagtaaaggaaattgaaagcaaggaaaggaagagaaagtgagttattttctccaggtttttatttctccatatttgaattcatctcaagcagatagtaagctgtcattcttaccaaaaaggaagaatgagtggtatctctagaaagacagaaattttcctggcaccagattctaaaggtttctcccttggaatattttacaaagacattaaataggaaggtggacaataactttaatagatgctttataacagttgcatatgtaattttcatgaggatgtttcttacagtgaccttcgataaatgattgcagcttcactttaacatgcaatgcggggattctatgtaggacaaaggtaatgcgtaccaggagcacttccctgagaagaagaaaaagaggagtagtcagttagctatacccgagggggcatttggatacccacaccatttattggccatccttggcctaaggtaatatccaacaactgtgggtttttgcagcaaactgacttaagtatcagaataatgggtaaatattatgccctaaaccagtggttcccaaatatggctgatcttcaggaccaggtagggagctactttgaaaatatgggtcccccaccccttgaggtctgatcagatggtctagggtaggaagtaagaaatctcagttctttccaggtaattctgagaaccacacaggcttggaaccacagctttagactgccttcgtaaatgtcacttctcttagctgagttttcaataaaagctatagggctggccttttgtatacacttagattataaggactgtctttaggccagatgggatttttccccagacagggactttggttctattccaaaactgacaaatgcttatttgacatcctgggaactagggccaagttcattcagatctaggaatcccttgagcagaattttaacctcattaaattagttccttgtttaattctctgcatgcttcatacttataacattttgattcactgttagtgttgccagtcaggttgagtctttgctctttgttctatcagtagttgggaagagggatctaattacaaggtctctaattgaataatccaggaggtcatttggaaaatagaaaatttcacgttaatgaacgttgatgaagcatttctgagctgagcatggtgtatgctgggcattctgtaagcattatctcagtaggtgcttagatagacattacagacatggaaagtgagtattattaaacatttagtcatttcagggccattgttgttttttcccaacacgtcctattcttcaactttctttcttcctaaattctgtggactcccctcgccaaaaaaaaaaaaaaaaaaagtttttgtcttaccaatttttaactagcaacctaaccaggaaaattttgtttatttggaaccttgaactacatttttcctccacattgtatgttaggagaaggaaggaagtaagaaagtaaactcatatgaaggatttttgaaatattactcaggtacagcctggtcagcttagccttggtccagtttaaactatgaaaataaaattgttcttcataatggttggccaccttcattaaataagaattaaatgatgcaggtatggtagctcacacctgtaatcccagagctttgggaggctgaggcaggaggatcacttgaagccaggagtgcgagaccagcctgggcaacatagcgagaccccgtccctacaaaaataaaattatccgggtgtggtggcatacgcctatggcatgcgccagctactcaagatgctgaggcagaaggatcacttgagcccggggaattcaaggttgcagtgaagtatgatcataccattgcactccagcctatgtaacagaacaagaccctgtctcaaaaacaaattgtatttattacaccccatcgtgaacaggcaccagattgtagattaatgcagatgtcttggatccctctcttccaagccatatgactgacttgggcaagtgtgcttttctaggtctcagcttccgtctttgcaaagtggtgaaaatactagcccccactgtcctaaagggataaaaggaccagaggggaaaaatgtaaaaatgccatgaaagctacaagatgctgtacacagatcagattgaattgcttcattaactggaaattcttggattactatattgtctaaacattgagtccactgacgattgtacagaaccaggattgcattgttagttcccaccttcctctcagcagtcccgcatgtgacatcttcatgcctgtcaccacatcctgtcacaccaatcagcgggccttcttttcccctatggttcaacatgtataggcttcctgaacttcattcaaaggcagctgaatggtatatgaactttgaaatgtttccaacttgacattaaaacagcaagtgccaagtttcaacacttaaaaaaatcctcttaagcgctgaaacttggcatctgagtggggtttattatctttcagttaagtcaaaacaactaaattacatgagtttctatctcaaaatttaaagcaagtgtttttttgtttgttttttgtttgagacggagtttcgctcttgttgcccaagctggagtgcaatggcacaatctcagctcactgtaacctccgccacccgggttcaagtgattctcctacctcagcctcctgagtagctgggattataggcactacaggcgcacgccaacacgcccggctaattttttgtatttttagtagaattggggtttcaccatgttagccaggctggtctcgaactctggacctcaggtgattcacccgcctcggcctcccaaagtgttgggattacaggcgtgagccaccatgcctggtctaaagcagttgttttgtgagtaattttcaactattggcctagtgaatttaagcttttctttcatacgcagatgttcacgtaaacataatttcccaacatccagtcctacccttcttattaagagcatgtttacgacgtttggaatggagcagtgcaggagggatgactatgaccctgacgcaagcctggagtacagcgaggaagaaacctaccaacagttcctagacttctatgaggatgtgttgcccgagttcaagaacgtggggaaagtgattcagttcaaggtgggcatgcgtgtggaggaggggactgktttgcttcaccctgcagtacttaatggcacaagagagctgggacacaggctcagctggggtcaggcacgctagcactctataaatgtgacttccctctttctctctttccaccccctaccttgttgccaatgtcacgtcaataccacatgaaatcataaacatatattagcatggtatttcctgaatgctaggggtctagattggaaaggatctttcatttatttagtagctttgtgctccagttcttttccagcacatgaattctctgtatcaggtcccctgcatatagccatccagtccttcacttaraagctgcatgtgacaaacggtgcattcccttccttcctctgtaggtggcttccgtgtgcagtgtgacacaacttcactcactaagtttgttggtgcattgtgttgacagtgccgacttagcttccacccaaggtgtatgttctttcttctggagccacacaggaacataaatctagattccaccacctaacccccttcttttttttacactgtttttattcattggattctttcaatactgaatatagtattatacaaaccatggtctgtgatgcagcatacttggtgaaaaaggcattcagatgacacataattattttaaaatattccttaatgcaagggtaaggccagatgtaatctctgctgcccccaggacccattagttgaattctaatagggtgaagcttcctgccttgtctgtgatttcatcagatctgagctggaatgcctttgttatgttaaggcasggaaattgtcccataatttgggaaaagacaggaatagaaccgtgattttttttcctgcaagttgcaaatgatgatgaaaagttggaacacccccccaaaaatgaagatattcctgacatttaaggctatacttctatcaaccgacttcaagatttttaaaaatyctttttattttttttttcctccttaaccttttgtttctggggcatatgccttcctgtcttcacattacttgtcagcacaagcaataactgctaaagtggaactgcctggtcacagccacacaataccatgttagaagcactggccgaggaggccatgtggtttgactagccttgtcacttcttcctgccttttccttatcctgaaagtgaggggactggattacgtcagtggttttcctcgtagggtttcttgattatactgcttctgtgaagtggtaatgggagggctgctttcagaactgcagagtagttaatggaaattgcacccttacttgcaacaggctgcacccacaaaccacaaccaccacaacgtattttttcttttgtttagagttctctcatcctggcttgcacagctgacatggattcccgaggccttttattcttccttctaagggtggtgttacaaactgtcactgagtatggatcctgctcgttttgggataccctaagaaaaatactctggaacaaatttgtaaaattatagattcattttgaacataaacgctaaacactagtatgaatatttgaggacctttttacatactattatataaaaacaaatcagatttgtcattgttgaaggcaaatgatcaaatatttaacctaactagtaataggaacagtacatatgaaaatgggatgatattcacacctatcaggcaaaaaaattataaattctattaataccaagagtagatgaggatgtgtacattagtaaaaccacttcagagagcagtttgtcaatacctagtgaaggtacgtgtaacctataaattggcacactcctggctatgcacagtagagagctctttatacccacagagacctgtttaagaatgctgactgcggtactgtttgtggatgaaaaattggaagcatcttgaaaaaccatcattctagagtagataagttttattatttggtatatccagtatacagtagttaagtttatgtgactacatcttgaaaaaagaatatggaataaatactattgatataaaattttaaaacatacaaagcaacactatatgttgtttatcaatacgtattacctgtttctttgcatatgtatatatatgtgtatacccattataaataatggacatttatatgtatgatacatatgtgtgggttttggcatgcatatgatgtatgtatatatgcctgtatctgtgtatttgtatttgtgtctgtgtaggtctatgtatgtatatgtgtgtttgtgtttggaatgtgaaggctacactcctagcctgtggagagtgttcacctatgtgatggaggagggagaagaatgggatagaagggcttcaactgagtctttaatgttttacatatgtaaatattctcattcagaagtggaaaacgttagtgttaaatctgggtagtgcatatataggctgattgatatcttctgtatttttatggatgygtgaaacatttcatatttgtgggagaaaacagacctggaccaacagggatcaggcacgctgccatgtgccaagtacgccttaaatagatgcaagagtcagctagtatctctattttgcaatctttgattggtaactactttggggaatgttagcctggacaaacaacatktgatgaatggctggtttcttttcctgaattttttatgatagcattcttcattgctccctaggtcagctgcaatttggaacctcacctgaggggcaatgtatatgttcagtaccagtcgtaagtattctgcttgtggatgtcttcctgatttgtcacagtttgttgttctgtttctgttgatgtctgggatttttccactggatatataactttcatgtattttatttcttatgtttttatttttattttgtttttttcttttgagacggagtttcgctcttgttgcccaggctagagtgcaatggcgtgttctcagctcactgccacctccacctcccaggttcaagtgattgtcctgcctcagcctcctgagtagctgggattacaggtgcctgccaccatgcccagctaattttttgtatttttagtagagatggggttttactatgatgaccaggctggtctcgaactcctgacctcaggtgatccacccacctcggcctcccaaagtactgggattacaggcgtgagccactgtgtttggcccagctttcatatattttaaaatatttaaataaaattaaagtttaaataaatctaaatatttaaaacttaaatattaagagttgaaacagaaatatagaatggatgtgaaaataatataagccgggcatggtggctcacacctgtcatcccaacacttttggaggctgaagtgggaggattgcttgaggccaggagttcaagaccagcctggtcaacatggcaaaaccccatctctactaaaaatacaaaaaattagccaggcgtggtggcaggcacctgtaatcccagctacttgggaggctgagacaggagaatcgcttcaagagagacctcatctctacaaaaaaatttaaaaattggccgaatgtggtggcatgtgctggtagtcccagctatttgtgaggctgaggcaggaggatcacttgagcccaggaggtcgaggctgcagtgaggtatgactgtaccacgacactctagcctgggggacagagtgagagtaagactccatctcaaaaagaaaaaaataataaatttatatttcattctttatatatttacatagttttgaatgttttacaatatggttatattattactcataattttaataattaaaatacaaactaataagggataactagaatagagaacataaaagcatttatagtgaaagagccggagattgaagcccaaaatcatcttagtgtgcatttgaccagctaagagagcaattaatgtatcatttcttcttatcttgctgtttgcctaggccataccatggctaatgggttaaattaaccagtgtaataagaagaacagcaatcctatctgagaaagaataggccctaataatggaaaacacttctgcatttttaatggtccaatcttttggattaagacggtttcattcaagccaatttccatgcattgaaacctctccgagggttagtaaaaagggttcctgaataaattgggagctttgggagcttgaccattttaatgactcttccctaggtacaaaatcagtgaacttggtggtcctacaataaattaataacggggttaattaatagtagagctaatctacatattaggaagttactgtaaagcatatcatttgatttttggtttaaagggaagaagaatgccaagcagccctttctctstttaayggacgatggtatgcaggacgacagctgcagtgtgaattctgccccgtgacccggtggaaaatggcgatttgtggtaaaagacaaagtgatgatttttttcctcaattgttccactgctatataaagggatattctttgggggaaacccagtattttcaagtggtgaggcatagctttttgcctcacacagtagatgagcagagaactttatataaagaacaccacagtttagatctgtaaccgacctcaatgagtcacttgatagatgaagtgactgaggtcacaacgtattggtgacagaggtggggctagaattccagtcttccaatcttcagtcctgggctctgtgtctgacaaatcaggaagcctgaggagtttacgtctgtggaagccccatttcccttgttgcagtttcagaggtattttatattcattggctcacttcacttgagctgtttgtttgtttctttctttccatctttatccctaatgaatcttctgtcatgaccacctacgttaccttgcccatagcatttcctgccttacttggaataatacatccttctgtgcactagagactaattgtaggcttgggatcagttaaacatgaatgcagtcagactgacatcggacagtggcaacccaatcaggaaatgatccagtcttgtgcagaatagccagcagttttgaaggcctagttatgttctgatttctctcagtggactgttccctaggtgaaaagagatgagctctaaatgcctctggggagcacttatcttaccgtttacttgtgtttctttgctgtatacatgcctgcctaacgcaaagtcagaatctttggcaagcttgtcttccttggattctgtcattctgaaaccatttatgaagggaaaagaaagattttaggattcctggctaagggaaaccagaagaaccattacactttaaaggctcgggggatggaagaggtggaattgttcgctccataaaggcagttacttttgtcagttcctgggaatccagtgtgagttcagtgaggagcttctgagtgtgaccttgactcctccaaagcaggggactatttcattaaaaaaaaaaaaacactttattttccttattgactaaagacactgagcatcttttcattattggccatttgtatgtcttctttggagagatgtctgtttggatcctttgcctattttctaactaggctctttgtctttttattattgagttgtaagagttcttggtatattctccatacaagtacctggtcacaaatatgatttgcaratattttctcccattttgtaggttcttttcacttcatgttcttttgaaatacaagttgtaaattttgatgaaatccaacttaactatttttttgtttgttttggtgtcacatctaggatgacattgcttagcccagggtcacaaagatttacttgtatgttttcttcaaggtcatagtttcatttcttaacatttaggtcttggatacagtttaatttttgtatatagtatgtggtacggaggtatttcacttctaactgttgtgcatatctggggaatttactgcttttaaaaaacgtttgagaaccccaaagatctcaaaattgttcgaatagattttatctgtgataagaatcttctgtattaaaagcayttagtgaatttgaagcattagtgtaatgtttataatcttaaagtttaaagaaaatatagactcctctatgtttaataggccttctcttttttttttgagagtgagtctcactctgtcgcccaggctggagtgcagtggcataattttggctcactgcaacctccacctcctgggtttaagtgattctcatgcctccgcctcctgagtagctgggattacaagcgcctgccaccacgcccagctaatttttgtatttttagtagagatggggtttcgccatgttggccaggctggtctcaaactcctgacctcaggtctgtgcccgcctcagcctcccaaagtgttaggattacaggtgtgagccaccgcacctggccacgccttctcttttgaccagtggttctggcctgtttcctccatgccatcaaaccgtgctaccacagggacccaaagagctggctatttgatgttaatcagggatcaaaatcgtcaatcagtgggaaggtgaaacctggagaagataacgtggtcaccatttgctcagttgcagtctgcaccataatccaacaggggcacaggctattctgcttaatgaaaacttctgatttgttacctttcagagtgtcatttattagagcacgtttgaaatcgtgggaaccaaattatgacatcaatttatgtaagccccttttacawaatacacagtagaaaatagttctagcatatccaaatatcagaaatgtaccttcggaaaaggataaagtagcatcttcagaatatgcagtgataagtgctgtttcatcactgtgccattgcaggtttatttgaaatacaacaatgtccaagaggaaagcactgcaactttcttcatgtgttcagaaatcccaacaatgaattctgggaagctaatagagacatctacttgtctccagatcggactggctcctcctttgggaagaactccgaaaggagggagaggatgggccaccasgacgactactacagcaggctgcggggaaggagaaacsctagtccagaccactcctacaaaagaaatggggaatccgagaggaaaagtagtcgtcacagggggaagaaatctcacaaacgcacatcaaagagtcgggagaggcacaattcacgaagcagaggaagaaatagggaccgcagcagggaccgcagccggggccggggcagccggagccggagccggagccggagccgcaggagccgccgcagccggagccaaagttcctctaggtcccgaagtcgtggcaggaggaggtcgggtaatagagacagaactgttcagagtcccaaatccaaataaactagttttgttcttaaatgattgtatatcttatttattatggttgctacatactcggatagaaggctatgaacgcagatgggttcgcaagtctggctgaaccctgtgtagcctggaattctatttaaaaatatttttattctcttataatcatgaagtatggttagtatagaaaacataaaatacataaataacaacatgaaaattacttgtaatcctaaccctgagagagaactaaacattggagcattgttttagtgtgtacacttttttctttttttttagagataggttctcacgagcagtggcgtgatcatagctcactgcagcctcaaactcttgggctcaggtgatcttcccatctcagccacccaagtagctgagactacaaggtacacaccaccacacctggctaatttttaaacattgttttgtggagacagcgttttgccatgttgcccaagctggttttgaactcctgggctcaagtgatcctcccaccttgtcttcccaaagcgctgggattataggtgtgatccaccacacccagccctatgtacacattttttaatacaaagaacacatatgaatgcagttgaatatgcttttattcacaagaagcagtcatacttcatcaagccctattcttcgttttactcactgcacaatatggatcagttttttcaaccatatcctcattgttagatttttaattttgtactattcaagaatcctgtgctgaaatcaatcctgtgatggattttcttaaatacttccacatatttttgatcatttccttaggataaattgtatcaaggacatgaatactaaaatatttccaagttgcctgccagaagactataaaaaatttattatgtcaataaactttgctgctcccacaacgccaagtaattttaatccttaccaatttgataaattttatgtgttcatatatttaatgtttttttattcttgttggccccctacccctttttttagagacagggtcttgctatgttgcccagactggagggcagtggctgttcacatgatcattgtgcactgtagcctcaaactcctgggctcaagcgatcttcttggctcagcctcctgaatatctgaaactacaggtgagccctgcttgtttgccttttattaataatctattggatttttctatatgtaatagctgaacagcttttttgctttaaagttcattttctcagttttaaagtactgatgggcaaagtccattttttttcctcctactcttcagctgggggctgtcgtgtacttttttaaatagtgtgttggaaagttctttatataggagtaaagtttatttttgtcatttccaggaatattagggtcattggtactaaatatgcctagtgttaaagcaatcctggtataaaaatctcaacagaatggtcagagaatagaacctaatgcagaaaaagcttcaggcaaaatattatacctagatttctgatcataaataagatgctctccagctttatcaattttttgtcgctttctttccattgacatatttgggatctagaattttggagtatgtgacatttttcaatttgagatttgggaataaggacttaaaacatacgtaaaatactgaaacgttaacgaaatttaagtaggaagaaagtttcctcaaaattggaatttctgcatgatatctgttaaggatgagagttctttcatgtgtagtcaataaaagaaatcatgcatgtggcccaggataatttcactttaaaaagttggatttgttccagactctaaatgcctgcttcaccctgaaaatgattgacctagaactatctactgatttcagtaacgccgagtaattatcattaaattcagtattttttaatacttttctaaatacagtcaagatatatgcaattaaatgtggtctgcaaagctgaaatcttaataaatcatggaggctaagaaagaaaaccaccatcttgagctcaggacaactgagatattgatgactttcccctcaaatgttaataggcagggtagaagggcaggaagtttttaaaccactgactggttcattatcctgataaatgtccatcttgaacttaaatttattagttttttttaatatatattgcctgattactatttatgtttcaaaaattccaactatacattgctagcagaaacccacaggcctgttttcagtgaatagctagctgcatgttggaggctttttaaacctataaacgtctttttttccagtagactagcaacttaatttgatggtagttcctgcctccttcttaaatagcccagttttagaatgtaacatttcctatctgtagtaataggaggtcccttaactatcatgattaccatagatttgatttgttgcataggttaggtagtacagtctgcaagtattagtccctttctgttgcatgtgctagcaccttcagttcacaagggggtaagaggaatccagttgatttgaaataccttttgagtaacagtctaagttgttcattcagaaagagtagaaaagtcaactgcatcaaggttttaaaagcagcatttattgattgaaaataaatgtgtagataggctctcagtatggaatccatgttattttttaatgaagtacatgaagactccttagatcttccaccatgtatcttgtgtgtgcttataacaaccaccatattcaaatggaggggaattttcaacattttactgaaaaaaaaatgagaaattcttccttcagcagctctgcatagtttgacaaacttttggaaagagataaaaacacactccagtgtttgtacgttgaacgtttattacaactaattggcgatgtgataagacagtgctcacgtggcctgaatgttggtcacaatcacaacaaagcttaatccagcccagcatatataagtgaaaatataaaccatgaagacatgtttagatatgtataagtacttagaaaagtgacgctgaacaattacatagctttaaaaaatatagagccatctaatgccattttacctcattcaactcttttttgtaagaaatgtgtctttttaaatttttataagacttctgttaactaggcagtgccatggaaagaaaggaagctgctgtaaagtgtgcagcacttctaagtggagggaagcaaaataaatttagctttaacaagtaccccagagggaacattcgtgctttaaacaatgactttacacataatactgtgaagagagcaacacgttttttgtaagatactgttatgaagaattcctggcaaattaccattctcactttattttggggcatcaaaaacaactaagtatttgattatgaccacaaaaaattcatctcaggagtcaaatgtgccttggccttaaaaattatgtgcttactattgtgaaacaatcctgtttctcatcccagattcagaatgcctaagaaataatttttagtgtaagaagtatcactccaatttagtcattaaaaataatctgtagtcctttaaaaaaaaaaaaaaaaaggtatgtaatttccaatacaagtctttggagtaaatttgctttttaaagtttcaacaaagtttccattcatttgatatgtgacatgtcaattccctttttttttttttttacatatgctgaaatgctgcactagtctttggtttcataaaaccaggtttcacattataatttaagagtttcctttgtcaaatacagtaattaataaatgtatactgcctgattttacatgtatatgatgtgccattttcatatgtgcacataatcagattaagagaaactgacctttaaactttaaaatatccagaaaaggtatctctttctgcaccattctaattcatatttaagtcccttatcacttaattaactaaagttcccttttaaaaaaaaattgtgtaggcatgaatgaagcggcttagcaaaacagtaatactgacaagacatcatcttacaccatgagctaacatggacatgaagggagtgaccatctacagtgtgtgaaatgccacaagaagtcatcaacaagggaggagagttatgtcagtccaatttcttcaagaacactacgtggggtttcagcttcctgtggagggaaaatgtgagactctggtaagcagatccagggagtcttgagaatgtgaaacattgacatggaagaacatgcttgttttagagaatcaagaaagcaatttcgtgtcacagtagcattctagttgacagccattggttatttagggttttgtgccctcaaaattggagaccacaaaaggacgttttcagcattcattaagtacctgctaattacctaccaatgtgctagatgccgttgctgtcatgcaaaaagcagtcaagcccagtgcaaacctgctggcaatttatgaaatcactgctactcaattatatatatgaaagataagttatcttagtggtaaaattcaaaacctcttccctccgagttcccacagttcttcgcctactgttgtgttccatgctttttgtcacatgcatttatagaaatgtcttcctcttggagtttttagttaactgtgtccacagcggcaagtcttcagaaacagctatcttcccagacctccccagtgcaaccaatggcatcactagaggccacatatgcaaagaatgccatgggccaaaggcatttttattctatgtagcaaccagcactggtttttaagtgtcaaaggaggtcaaaacaaagtaagcatatccaggaaaaaattatttaataattttccaaagtggctgattttgcaaatcacaaaataaaggaccaaggaggccaactttcaggtattactagcaacgaattttgtaattaaaaggcaacactatattttaatgatggaaaataatataaatttttggcatccagtaataaacttactttcgcatcctaatcatggtacagcacaaagcaaggagaagagaaattatattaaaccataaatctttagaatattaattgcatgtaaagcacttcatggtgtaatcttaagtaaattacttaaactctatggtctgtttccttatttggaaaacatggataatagtacttaccttcatatgttgagattaagtgaattaaggctctgcctaatttatagaaagtgcttcaaaaatgttaggtgatatagttacacaattgaaatcgaaatgatttagcatttattattaaacgcaggtactatacaccaattctacttataaagctcatatgatgaccttttagtatgtctgcatagtaataaaaatgggtaaaaatcagctttagcgaaaaaaggtatttttttaaaaagagtctaacctatgaagtattcttgccccctcaaattgaacctcaatctagtcaggttacagatctaaatagaaatgagggatataagaacagctaaacattgccatatgagtatgatggccaaatccataaggtaggacatcctgcagcataaatgacctcgttttaaaaaaaaaaaatggcaaggcgggaaaaagcagacgatttgttaaagattaaaagagacttaaaacgcacatcaatcagatacaatgtgagagtcttggttggaatctgattctaacaaaccaaatataaaaaggcatttttcagacaattaggaaaaattgagccaggcataagatagtaattattaattcctgttaattttgtggggcatggtactttatctgttagggacacatactgaagtattaaagacaaactgacaagatgtctagggcttgctctaagatactgaggcaaaaatgcggggagtggttggggaaacagtattaagttgatggttcttgaagctcagtgatgtgtacacgagggttctttatactatttcctatactcgtgagtcttgaagttttcatgataaagttttttaagaaagtccagtggaaatgatgtaacacccaagagtgatgtaagccaatccctttcatttatatttag

SEQ ID NO: 96205 - DNA, 45913 bp, Homo sapiens
gatcacctgaggtcaggagttcgagatcagcctggccaacatggtgaaaccccgtctctactaaaaatacaaaaattagccgggcatggtggcacgcgcctgtaatcccagctactcaggaggctgaggcaagagaattgcttgaacccgggaggcggaggttgcagtgagccgagattgcaccattgcactccagcttgggtgacagagcgagactccgtatcaaaaaaaaaaaaatagtataaagcaagaggttgcttttctgtgaacgaatctctaaaactttttgccctcagtttggggcccctctggtcgttgttgtgtcgtttgtgtactctttactgtgggagagacttataggcagcctaagagttcccggagtcgttacagtcggggtgaaataaatacctcagactgatttttctaaaagaaaaaaagcctcctgtcttcaagactagacattcttctagtcaggttttgttgttgttgttgttgttgtttttgtttttaaactccctcattagctgttgtgtaattattgtcgttgtctgggaagaagtccgtgtagcagtttatctgttgtcttatcagttttcctactgggcaaccttaatgcacttgcatgtataaaatggactagtgcatttcaaatatctgattcaatgtatccaagccactgcccaacagacaccgcacgttggaaacaactgtgaggtgggggtagaaaaggccaaaccaaacagggcggagtgcaataagggttggcaagtgtcacagtcactcatgtcaccaatcctgattccctgtgaaacatactggttcctttctcacatatcgaggcatgaaaaaacttatccatatttatttcattcattgtgtcagacatttactggagacttgcagtgtaccaggcactgtgaagtgctcaagggatggtgagatgaataagacatagtgccaacaggcacacagtctcttagaactacttatccttcaagttaagccttacaaaatgtaatttttactatcacaaagatggaaaaggcataaggaagtttaagagctgatgcagtgtttcaaaaaaagttaatttccattgaaagcttaatgttggtctttatttgtggtagttcaagcatggttgcggtttttttccatcatgttttgaataaaatggcaacatgaagttcctgataattggtaaaataataagtagacttaaaattctaagatacgtaacatatatatatatatatgtatatatataagaatgtaaaattgaggagcaagactatttttgttaggaaataacaaggtaaattattctaggcacttcaaaaaacgtatcagaagatacttcgagaaaaagaaagtgctttagaagcgaaataccaagcaatggagagagcagcaacatttgaacatgacagagataaagttaaaaggcaattcaaggtaaattccttacatttttacccccaaagcaacatagaataaaatagtatattctaaaagtatatataatatataatgcgatgaataaatagaagtaagtcatgtaggattcaggaaagttgtaagaattagtgtagagcactttcacatttttgagttggacgtggtaaacttgagatcatttcaaagaaaaacgtatgaaagtgaacattttaatagtaatttcgaaaaaaaggaaagcgtttccatatggggaaaagcatttggaaatgtttagggatgttgtattattggtatttagtgggagagagacaaatttcctaaacatcatgcagtgcacatgacagacccacaccacagacacgcatcctgctggaattccagtggcttccagttgcaaaacagtaaggtaaaggtactaggacattcaccctatgaaagaggaaatcgaggaccaaatgaatattggttttatgaatgaaatatttttcccttaaagttgatgacacaactttttgattatgaaaaagctttcaacattaaaattattctttttaaagatttttagggagaccaaagaaaatgaaattcaggacttactgagggccaagagggagttggagagcaaacttcagaggctacaggctcagggtatccaagtatttgatcctggggagtctgattcagatgacaactgtacagatgtcactggtaagtgtatatcctatttatattttgagctttcaacatggctgtaatgacatgtagagccaactttgaattctgctagatttcttttacttatctatattaggttattgctttaactactgttgcaaatagtgtcgtgtgttctctctgtcagctgctaagacacctcttctccacgaagtgtatgaatttggggactgaagttccttctaccttgtcactctgccaaccctaacccataacttttactctctagtctaagatatctaccccagctcccaccagcacatctgcattttagccaagggaaagaaggaaggggagaacacgttcctttcccagaaggtacaacctaagatcacttctcaaatcccattagtcagaactataactgggaagactggatagtgtaatcagcagccaggcagacatgtgtccaactaaaatgtagtgttctgttactgaagaaagaagaggagaatggatattggagttactagtctctgcaatgttatttctttacataatgatgtattctttgcaactatcatttagaatacttgccttatagttcactgagtggtttccagtatagccttgtgaactattcaaaaagtatttgttttataattaaacaaatgaaacatgttttctggaaataaaagcttgaaatcacagagtgaaagggtttacatattctaagaaaatgttaaagtgtgattgatactgaaaaaagaaaaatattctattttaaaatgcagtggaaaaatgtagtcactctcccatttgtaatgaactgtaagtatattctcacaaatggatgcattttggagtaaaatatggtaactgacagttccttcttaattttcattgtagtatcattggaatctgaccaacatcctggaatttttattgctaacttttaaggaaaaaaaatgaaggccgggcacggtggcttatgcctgtaataccagcactttgggaggccaaggcgggcggatcacgaggtcaaaagatcaagaccatcctggccaacatggtgaaaccccgtctctactaaatacaaaaattagctgggcatggtggtgcgtgcctgtagtcccagctactcgggaggctgaggcaggaaaatcacttgaacccaggaggtggaggttgcagtgagccaagatcgcgccaccgcactccagtgtggcaacagagccagactcatctcaaaaaaaaaaaaaaaaaaaaaaaaagattcttaatggccaagagtagctgagaaaatgctcttttataccccaacacaagtcttagtgattatttcagtattgacatactcaaatgtacagtgtttcaaaactattgtaattgtcttggcaagttagaaacaaattcctttctaggtcttttttcatttttgttttaaacatgaagaaggaacacttgagggggaatgtcacccatgtgagattcaaagagctacaaatagtaagctcagttttgccagagatttagctcaaataaccatttacttaaggttatcaaggatgtagatattctgacaaatataattgattagaaaatcatcatgttcataagtagctattgattcagacattaattttgttgctctaggaggttgagaaggaggtacttcctgctgcaaagagtttatgtcctaataaattatgaatatttttatatttatgtgtgttagtaacagtctgcctttgaggttttttccttcagattttaactggtgtctaagctgtacagttggaaatgttttttagaatttttttttgtaaaatgtttttaacttccttcttattatgatttcttttttattgtattcttgtttattttcatctttctctttttaatcctctctttgaatttgagatgataaccagaattatgttaatcagtatctttgaactttgccaaaagtcgatggcaaagtattttcaaaatcatttgaatatttgtaatattttcatattttttaaaatcagcaatcctgttcggtatatgtgatgagtttttgaacattcaataagttggctttcacaagataaaaatctcttgctgaacagctgctggaacccaatgtgaatattggactggcggagccttgggaagtgaaccttccataggaagcatgatccagcttcagcagtccttcagaggccctgagtttgcccatagttctatagatgtggaaggaccctttgcaaatgttaatagaggtaatacatgctgtttgtcaattacttgcctagtggtagtgactgttcatgttttataatcttgtgctggaactattaataccattagcaaagcatgaaatttgtgttcctagtgctttccattgacaaaccatcatacagtggggctgtaactaacaaggaaggatgaggttgcataattcatatggtgatcagatggtactcctgccaacctggccagccaggttctagtaactgtgttatggtctgaattctctggtgttttagttgagcagcaaatctaatgtagattaattgaaaaacagtaggttttaatctttccctctgcttctttgatagtgttgaagattagagcaggttatggagataataccaaaaagctctattaggtaatatagtacagttttccttctatatccacagatccactcaaccactgatcaaaaatatttggaaaaataacaatgaaaataacaatgcaacaataaaaatagaaataagaaacaatacagtataacaactatttatatagtatttacattgcatgaggtattgtaaataactagagattatttaaagcaggggtatccaatcttttagcttccctggcccacattgaaagaagaattgtctttggccacaaataaaatatactaacactaatgatagttgatgagctaaaaaaaattgataagaagtcttacaatgttgtgttgggctgcaaagccatcctgggccacagattggagaagcttgatttaaagaatatgggaggatgtgcgtaatttatatgcaaacaccacatgattttatgtaagggacctgagcatctgtggatttggtatgtgaggggaagtgctggtaccaatcctccattgataccaagggacaactgtattcatatccaaaagaatattttccttatttttatataacatagtgtccagaatagctctaagatctgttcagaatttcaatatcagtgcagacctaagaagttataagtagttctactctttttccttaaaaccctacaattatttctctatcagcaaaatgaaaatcatttttaaaattgtgctttttgaactagccaaatatgtgttaaatttttactctcactaaatatagttagcataaggctacttttcattttatgccattcttgaacattcttttaactcaatatatttcaagaataataagaaagtaaagctataaatcctcttgggaatgtaggctaacttcaggtaaccaactaattgagtaactcatgtaaaattttttcatgacacttgactggaaccactggtgcctcagggaagaccactggtgacattcattgcttcaagtcctaggatagaatttgagtttagaaaactaattgcctttgaatatattactctagaaggtatggcagtattaacatgtaagatcagattccattctatgatgcctgttatgtttttaaaacttttttagaatgatcaaatgtgttctggtaattttttcatgaacttgagaaattttattttcagatgactgggatattgctgtagctagtttattacaagttactcctctgttttcacattctctgtggagtaacactgtcagatgttacctcatttatacagatgaaacccagcctgagatggatcttttccttaaggtgaggatatttataaattctgtatcaaccaatttaaaatataagttaatattatattctgtttctgatactactgtatctcaaccaaatagtttcctactagattatatgtcttaaagaacaggaagcgtcttgggcttttcttaagagaaaatattgttcaatattatatgtaaagaaaggtggtgaattgagagtttatttatttatttttactttctggaattaactttcctaggacaggagctaagacagaaaaagaaggttttaactcgttttagttagttttaaatgtcaaactaaggtgttggaactttctggacttttttttgtttgtgtgtttgtttgcttgttttgagacagtgtcttgctctgttgcctgggctggagggcagtggcacagtcatagctcactgtagcctaaaactcgtgagctcaagcaatcttcccactcagtcctccagaacagctaggactacaggtacacaccaccacatacggctaatttaatttatttattttttttttttgcagagaaagtgactcattgtgttgcctaggcttgtttagtgaatttttcattgcatattctccacaatgtttaagactcttgttgattgtgtctactttagttactctctcttccagctctatccttgagtctgtctcaggtagtaaaattttctccttactgtggtttaaattttccaaggcagccgttggagttattctaaggcaagggtcactatagccagttggtgaaatctggcctgctgcctgttttaaatggcccagagataagattggttttcacattttaagtggtagaaaaaaatcaaaaggagaataatattttatgacatgtggaaattatatgaaatacaaatcttagtgtctatcaagttttattagaacattgctgcactcattcgtttacgtatcatccatggcagcactacaacaccaattcaatggcagagtaaattgtgatagaaaccaaataagccacaaagatccctgctaaagcagccaagttgtaaagctattattatttttgtagacatatttgctatctaaccctttatataaaaagcttgcctaccagtgttccaagggaattttatagaatctgtgtgtcacatgctatacctgctatattaacatcttccctgttgttgattaccaaattcatttagctttcctttgtgatattattcaattttagtaaaaagataaaatattttaaagcccaaagcttccatccagtaattgaaaatgttattcccaacgacattttgagggcattactgatttctttcataataatagtcatcattacttactaacttaattatagatttatgtgtttttaacttatatcgctctgctttagcgttctgatatatcatcgtggatgttttttactatacagatttatggatctatattttgcactctttatgacaataaaacagattgttcatagtaataataacaaaaagaaacaaataccaaagcaaaatagcctaatactgtctcctgttgttctagctttactatgaaataagtcattttctgagctagaaaaaggccaagttgctaagctattattatttgtatttgagagaaacttgcctttttaagattttctttaaaatgtgattatttttaaaattttatatgaaaagatatccagtataacctgttttaaagcgtgctttttattttaagtagtatgaatctcacttgatctttagttaaatacattaaacttttgtatgttttcatttgtttttaggactattcacctaaacttaagagaatgtgcgagacaatgggatattttttccatgctgtttattttccaatagatgttgaaaatcaatacctcactgtaagaaaatgggaaattgagaaaagttctttagttattttatttattcacttaacattaccaaggtaagctgaaaaaaaatgtaatttattataagcagtaaactgtaaatagaattgagtttgccaaataagcttcaaagataaattttattgcatccttataataaaaaaatccatgaaattcaataaattctacaactgtttcacacttaaataaaataattaaaagttttaagctgttagacttgtttcataggtcatatgatcaacaccttaatttttagcttattttaatcagagtttggcaaatatagcccaarggccaaatctagccaggagtttgcttttgtaaataaagttttattggaacacagccacattcattcattcatatatatataaatttttttttcttttttttttgagacagagtcttgctctgtcgtccaggctggagtgcrgtggcgcaatctcggctcactgcaagctccacctcccaggttcacaccattctcctgcctcagcctcctgagtagctggkactataggcgcccaccaccacgcctggctaattttttgtatttttggtagagatggggtttcactgtgctagccaggatggtctcaatctcctaaccttgtgatccccctgccttggcctcccaaagtgctgggattacaggcgtaggccaacacacctggcccattcgtgtattttctacagctgccttcatactataatagcaaagttgaatctttacaacagaaaccatgtgtcctacaaaacctgagttgtttactatctggccttttacagaaaaagttgataacccctaatttcaataatcaacattaaccttcattcttttctttctttggatacaaactgagaggtatttgaactatgtattttacatataaagttcatgtacttgatcacttgtgtaggtgttgaatcataatttacattttttgaggagcttactatttaaatagacccagtaaagtgaacaatgttcttataatgtgaatataatcatgctaatgaatcttgtctgcaagtaaagattttttttcaccagttagatatagagataaaggacaaaataagtttaataagaggctaatttttctttctagatttactgtctaaatttaacctttccaaagcattttgcttttttaattgtggaccaactctgactttaactgtgtatagatatatgtarggccttaagtttcaccagtttccctgtagcataacccattgtagacccttaagactttgcctagtggccgggtgaacagggaactacctggtcaatgagccttcatccagaatatgtttaaggagttcttcaacttgattgccttcagtagggtttcattgctatccaccccttcccttttctttccctgtttttatatttattaaggatatatcttatcttattacttaatgaytgagtagtttttttatcttacttggtaatatgttatttgttgttacattattttttctaattcttatctttgatccataaaaccattttgttttttctttacattaaagaaactttctgggtgacagagtatgaccctgtctcaaaaacaaacaaacaaaaaccttactttttaataaaacattgtatacattattcttacactttaacatttatttttcttttccaattttaaactcttcttaatgttttcctccccatttatttcatattttattacttttgcttagatttcagtttatccccttttagtaaaattttatattgtacatttttaaaaattttattcttattaaagaaatgaggattttaatttcttaaatttaataattttagtctctactttggctttattttacttaaacttttcttattccagttgcttattattttattatttgtttctttcatgcctgtcaagaggtatggcagtggggatgggctccacaccacaaacaagggctgttggagcctttgtttcagatttttccttcgcctaccctgatgactaccccatccttcccaaaagatgaatctagaaaagcctctcctgagcagcttggaagctccatggggaaacactttcctgtcaataattattccctgtgtgcagatggtatccacagagttatttgaagatagtgttcactggcttctcacactattcaggcctcttataagaaattatgaagctcaaaatgtatggttttgatgtatgaaatgattggatttggagcaagctatgctaacaacatacttagttgtaggctgggaaggtaggcaggaagtcatgcttagtgaggtgcacaggcactgtgcctctcggtgttactgactggagaaggtgcattagagggaaacggccaggctcctgcactgcttttccaggggttcttctttaatgcctttaatttgaccagcctcacttcatggaaggagaaaaatcccgggagaaatctcctacaacgaagaatgggaactgaaatakggtgagtccgggagaggctggctgagtaggaatattccagataaaggtttaaaaatgaggaattctttgctcatgattggccctctttcattacatcagcacccttgttgggcagaccagactcactaagaaagcttgaacctacgtagaaggagaggtgcctctccctttgcacagcagcacagaggggcgactgtgactggttttcctcagggcatcatcagtctttctcaagggatggggaggcttccgtgcctaaatagtaattcagtcacctttcaggacttcttaggccctattattggtttcattcagctttttttttttttttaccagatcacctatagagtttcgttatagaatttaggcaagtggaagcccttgtttgttctatacttgaactttcttcattatgcctcagctttactgttttaactcctccagccccacaaagctacatcttctcttgcagctcctcccctacatttttgtctgctcaggctactttctgaagggatcctaaagtgcaacttatcaacatattagctggcctgttatactatctaacttcagcaattatcacctcatgactcgttgtttcatctgtagcatctgcttccgttccaccagattatttgaataaaataccagagatcataccattttatctgagccccatgggtcagttttgtagggaatgccttgaaatatggacgtgtgcctgaacagcaagcccattgtttggtcttctaatgggccacagacttttcccacaaagcactgacagatgaatcattgaaattccaaaattcgatagaacatggccagagtgattttaatatagaaaacttctgtggtttgggtagaatggattggcgcagaaatatacaacagaatgtttcttaatttttaatattttgggctagtagtctaatttgcagattctgaatcatacaatatcgcccttctacacatacacacacacacaccccccacaaaaacatttgtttccctagacaactttcatttaatgctttctagaaaggggaattggtcgcagtgtcctttgttgtgtagaaaaccccagtagatgtgggctgcactcagtggctcatgcctataatcccagcactttgggaggccaaggtgagaggatcacttgagcccaggaattcaagacttgcctgggcaacatggtgaaaccccatctctacaaaaaatacaaaaattagctgggtgtggtggcgtgtgcctgtgggcctagctactcggtaggctgaggtgggaggatcgcttgagcccaggaggttaaagctgcggtgagctgtgattgcaccactgcacaccaggctgggtgacagagtgagaccctgtctcaaaaaaaaaaaaaaaaaaaaaaaaargggagagaaagaaagaagggagggagagagaagacctcagcagattattagttctaggacttttttttctagaattttcattaaaaatataattttggttccctataacaaagttgttttttgggattttttttaccttcacctcagtcacccaacctcttccaatctgtctccagatctttcctgtagtatatattgggtataaggattagggtcatttattagatgagaaaagtctgaaagaactgggaaagagaaaactctcaaaactttggggctgccatccaaacagagaagcacctctccttctacataggttcaagaattcttagtgagcctggtctgcccaagaagggtgctgacataatgaaggagggccaatcaagagcaaagaattcctcattttgaaacctttatctggaataaaggcctctcctggacwtgccatattttagctcctatgtttcattgtaagagatttctcctgtgattcagccatgaagggaggcgggtcaaattaaaggcattaaaaagaactcctggaaaagcagtgcaggagcctggctgttgccctggatggtgcctgtgtacctacccacgcatgacctcctgcctacttgtgttaacatggaaattatacatttttaaatggaattttgtttgccatctattttcaaagtctcatgagtctagtccattattttgagccaagtttaagagkatttttgagatcttttttaggtttaaaaaataaagttttatgtgctttacaatttaatgcataatttattatatttatgctcactgttggctaatgaatgtattatattttaagaccaaactggaagagagccataacacatccatttttggaaagcttcacttgttgtgcagttggaccttttctggccacttgtcactgtagtaaaactccattattggcacttaggttgattaactaactgcttgctgccacaatgcagtatagcacacaaaatgctgatttccaatctagccttttattggaagactgtgaagaagcttttctgaaaaaccctgaaggaaaacctcgattaatctttcatcgtttggaagatggaaaagtcagttctgactctgtccagcaattgattgatcaagtttctaatctaaacaagaccagcaaagccaaggtaaaattcataggcatttttgaaaaacacacttagctgagggaaaaactggagcaaaggccatgaggtgggcataagcctggcatatctggggaggggagagaaaccagtgtggctggaacagataagtgaggggagtaggaggagagggggcctcattgattgtgaagaacctcggaggccattttgaggatattagcttttcacttggagtgagattgggagccactgcaggactataagcaacagaatgagggctggcgtgatcatctgacagtgatctttctggctgccatgttgagaataggtggtcattcaggggtagtgtgcagagtctgagagccattgccatcatacaggtgagagatgctggtgactccaagcagggtggtggtagaggaaatgatgagaagtggtaggattctgagtaaattttgacagtagagccaataggatttcttaacagattggttgtgggttgtgagaaaagagagagaaataaatcgcagtgtgtggctagcaagagtatgatctgtatgatcagatggtattttgtgcttttctcccaagcacagagttcttctgtctactgaccaaggattagtgtcaggaggagacttttttttttaagagacagagtctcactctgtcacccaggctggagtgtggtagcttgttcatatctcactgaagcctyaaactcctggactcagagakcgagcagtcctcccacctcagtgtcttgagtagctgggactacaggcacaggccaccatgcctggctactttgttaaaatttttatagagatggggacttattatgttgtccacgctgcaggaggagactttttatagtgacttttcctaagagcattggggaaagcaaaaagctgatgatgggatgagagaaatttgatcattcctagatgcatgttgggataatttttagaatacatattacaggctttttattactgtacacggaggcaacttggtaaatgtctgtagttaatgtgaataatacaattgaaaacaactctaggatttttacagagttttcacttccctgtgcccagccaagaaataaaatcaaatatgaatacaagcatttttctttccatcatttagtattgaaaagatagcttgagagcagcatgacacataaaactaaagagactaagacaaaaaggaagtgcatttttattataatttccagagccatttcattctttgttttaattattgtagtatcagcctagtccactacgtcccacaaaaaagatattaatttatcttttttattctatttattctataacctttactttaaaaaatttagtatgctggaaggatgagtttattttataaaataggagtgaaataagatctctctgccatgattataaatgtaaatgtagggtaaatctccatgcttgttcacttggtatgtattgtaaaatcattgccttattctaattgtatcaaatattagtagtagtagtagacatgttcttacagattgggcattcttctttcagccagctcagtgagactacatagtatactattttgcttttgtcttttatagaattatagctttattgacataaaattggattttgatgcattttgaagggtaaatatgttgagtggtatggaaatacataagagaaaatttggagacagagcaaaaaaaaaatgtatacttcttggttttttttttgttttttgtttttttttttgagacagagtcttactctgtcttccaggctggagtgcagtagagcgatctcagctcactccaagctccgcctcccgggttcacgccattctcttgcctcaacctcctgagtagctggcactacaggcaccggccaccacgcccggctaattttttgtatttttagtagagatggggtttcaccatgttagccaggatggtctygatctcctgacttcgtgaaccgcccacctcgacctcccaaagtgctgggattacaggcatgagccaccgcgcctggcctacttcttgttttattgctccatttttcacactaaatcccttgtgtgaccttggacaagttacttactttgcctcagtttactcttctataaaatggggataataatagtatctccctcctaaggttgttgtgaagataaaytagctaatatgtgttaaatatttagaatagttcctgtcacataagcagtataaaagtatttaccaccacttccttctgatattatggtttttctcattgttcttaaatgatttttatctagatcattgatcactcaggagatcctgcagaaggagtatataaaacttatatttgtgtagaaaagattattaaacaggtaaatatgcattctctgtaagttttcatctaaaatattttaagatcactttctatgaaattgatttttccagagaaaaccacttgcttgtctttttgaacacagtacctgaggaaggcgctgttgtttctgttgggagtccatcctgtggtatgttcttagtattactaggaccatgtattaatatctttatctctcatctatctcagaggactatttgatgcttcaatacctaagtgtaaaacatattacaaaagtgctagccaaaaactatttaagagaaagtgttcattttattcaatagggaggctcctctgtgaattttgaatttttatatattaggaaagtctctctcaggttttccccccatgttatccctaacagaagagggggatgaaagcatgcctccagsggggtgagaacatggaccagggaggggccttgagctggaagtctctatgaagtttcatgtgctatcttgaaaatttatgtgagttatatattctgcctgatattatgtctatgtttgtgtttaatataaaaaaattttaaattatatattagaaaaaaatagtaatagtgattatttattattcccctctccctcaaacagaatgggcgcagtgggaagatgtaccatgtttagcctgtggttgcccacaccttctgacacctcccccagccaaccaaaaaccctatttgagaagtaggaagcttgaagatttattattagagaaaaagagtgagccccaaaatgatatgacctctggcaacacattttgtatggtgctctctagtataaagattgtctttatcaaatttgagcttcacaatcttgcaaattttaggaccaagataaattaattgagcagaatgaatggcagcaagtgaaagtgaatgtacttaccatcattagtgcttgaaggataacatattttcagtaacctaatataaaaactgaatatgaccacagagatacttgagatcaagaaatcacatcttagtaattcaattcttatagcatatttcctagccattagtactttataactattcaccagccagatacaaccaaaatgttgtgtaacatttttcagaaaacaaattccatgggattcaaatattcctttaattttatttttataaaaagaggtattcatttctattattttaatatttttatttctttgtttttaaattagtgatttttttgtagttatcagtttattcttgtaggtattatacaaaggctgtatgtttgaacttgccctcccaaaagtaggtgaagcccactttgggcctgggtgaccccgctgtaagatctttattttcttcattcatttttgtgtggttgttctttgtgtttaggacatactgggttttgagaacacagacttggagactaaggatttgggcagtgaggattccattccagaagaagatgattttggtgatgttctgtgggacatacatgatgaacaagagcaaatggaaacttttcagcaggcttctaattcagcccatgagttgggatttgagaaagtaagtgcttggagtattattgcaacaaagatctgtcaccacttaaaggctgtattatgattgtattttcatctaaatatagttaaggtttatgattatattagttgtctaatctcatggcttgattatccatgttgagatgtgcttaggtttgtgtcataagaaagatatgtgagattcaaatgtgcttataaagaccgaacatttttagttatggactagaatttatcaaccacatgtttattatgctaccatctgcaactcactcagaccaggattaggatagctaggaaacttgataaggatagtaaggctgaggccaggtgcagtggctcacgcatgtaatctcaacactttgggaggctgagacaagcagattgctttaagcccaggagtttgaaactagcctgagcaacatggcaaaaccttgtttttacaaaaaatacaaaagtttaccaggcatggtggtatgcacctgtaatcccagctacttgggaggctgaggtgggaggatcaattgagcacaggaggtcagggctgcagtgagccatgaccacacccctgccctccagcctgggtaacagagcaagaccctgtctttaaaaaaaaaaaaaaaaagaaagaaagaaagaaaagaaaaaaaagaatagtaagtctctctgttcttccaattcttgaatcaaaatattacattcagaaaacaaagcatagtagttcatgaaataggcagataagtccttctttatcagtcttatcaacatccttaaatatctaaacaaattatcagaacttgaaatatacaatgaaatctatgtgcaagttaaaaaaatataatagttaaaaattaatgtaagaactaatattttaaagaatactatagtagctaatattaacagttgtatttttacagaactttttgaatttagactgtccgttaatgtcctggttccatcatttactaactagatttcttcaagttacttggccactctaaactttgactttcttggctgtaaaatgagaataactaatagtacctacctcataggtacttgttgcaaggattaaatcagataatgcacataaagtgcttagcacagtacctggcccatgataaatgttagtcgttattttatgagaagtattgctattgttattttataaataaagaaactgaggttcagattagggtttgcctaagagtacacagtgagtagattgcagatctgggagttgaacctcgttcttttctggctccagatcctatggtttttcttttatagccatgggtcttaacctgggaagcatggatcctataaatgggctttctgtgggaccatgaactaagttgttaggacttatgaggtagtaaatcaagactttcttttctccttcagaagtatcatttctatttgaattatttgagttcctggggaatatattctttagagatataatttttctgcttgttaattaaatataacaagtagaaaaattgattgaaaaactataccaagtaattcattatagttgctggagaattgtgttattctaaagcaagcctaaagctggctgcaaactacttactatacacttttttaaattcctcatcagctatcatttagaccactggtacactgaagaaaaagtcaagtctcaagataatttttgaaactccttaataagtactaagatattttggtttttgagtgtgtcctttttagctttgaaccagttttgagtttctggggaaaacttgggaaataggaattcttggactttacactgaactcacttagtttcaaaaagatctcaggcagcctaggctaacctgattgycttgagcagattgggagactccaagtccccagacaaaacctgctgttatttggaccttttctcacccccagaaactgaggtgattcccaggacaggtgtttattcctctgaccaggagatctaggtggtctgctagtaccttcaaggtcttctgcagtattttctgtgatttgggggctacagtgagctccctgaaacattctgcaaacatttgagtgttgcaaaaccccacagggacctgaaatgttgtcctttacccattaatttacagcaatactacatgtagaagaaattggggcccattttttgtttgtttgtttgtttgtttgttttgagacggagtcttgctctgtcgcccaggctggagtgcggtggcactatctcggctcactgcaagctccacctcccgggttcacgccattctcttgcctcagcctcctgagtagctgggactacaggcgcccgccaccacgctcggctaattttgtttttgtatttttagtagagacrggrtttcaccgtgttagccaggatgttctcgatctcctgacctcatgatccacccgcctcagcctcccaaagtgctgggattacaggcgtgagccaccgcgcccrgccatttgaggcccattcttagtttactagttcagtcatgtttttgccagccataaaagtaggcaattatgagggtgctgtcactaaaaatagatttcattttctcacacagcttttctccagtattttcaaagaataatcagaagttgactcttcagtagtctcagaggcatgtgcttccttacaatgtaaattcatttttttttctagtattaccaacgccttaatgatctagtggcagcaccagccccgattccacctcttctcgtgtctggaggaccaggttctgggaagtctcttcttttatcaaagtggtatgatgcagtgcaattaaattattgttgtcattgtttgaattactgaatctattcaacaaaatgtattgcatgcctgccttcctgcgcggcctacactaaacattaacaaagtwaaaaggaataaaacaataggttcatgccctgaaatgcatagaatttggatgttagagagaagacacagaatgagaaaggaataggaagcatgaacatttatgattatgtatataaatcacataagtaacagctatgggagtgctttgtaaggaagtgatcatatgtgatatgtcatataacacatgttattaagtggattgtaatgtgcctttatttgtaattattgcctttatttaaaagtttcattgatactttaaatatttgaaacgacaaaagcatactagttagagtgaaatacattctacagaacatcaaaattaaggataatcttcaccatgaatgcaatctagttcttcaaattatggactaaggttcatataagctaataaactttattatttcattatgttatttaaaaacaagcagtaaaaatattttctttctttcataattatttatattgaagggttagcatatgtagttgtctcctttttattacccttttatttaaagttatgtttggaaaataatatttttgtatctaacaaattttcctctagtaggaatttttaattaaaagttaatgcttgttttactaataccttaccctcatatgtaaagtactttggtttctgttaattaacatctatttgtaattaaaatgaatctacaattttttaaaagattatttagaaggatctaaaagtggagtaaaaacagaaatctccatatttatttaaaagtaactgaccacctgattgctcagttaggcaacatttgatgtttactgcattgtgaattctttttttattgacagtcaaggaactttatcggttttataaaagttctgtctttttctttcaggattcaattacaacagaagaattcccccaacacactgattctttcccattttgtgggaaggcccatgtcaaccagctcagagtcctccttgattattaaacgactaactctaaaggtatagtatcccatcttttggaattacagaattttatttagattcagaaattgttgggactaataagtacctactggtaaaccaattttcagtattatccacctgttttggttttatataaggttaaaaataatattcgatacaatcgggtcctcttggtgacttgattttggyttataaaaaagtaagaatagaaatatttcccccagctctgtaactacttcagtaactacgtgtaactacttcagtttgtgtgtgttcttatcttgtagttgatgcagcactcttggtcagtctctgctctgacactggatcctgctaagcttctggaagaatttccacgttggctggaaaaactctctgctcgtcatcaaggcagcatcatcatcgttattgattctatagatcaagttcaggtaccgttttccatttgttacctattgatatgctcagaaagagatgtaaattcagtaatagctagagcaggcatttatatgtttgtgagaagaaaatatgatgttattttttatatttctgctttatttctagggaggtaacatggattaaaaaaatatatcgtatgcccacagacactaatatcttattaagaaagaccaactgaatttacacaattaacaaagactattcgttctgacatatttttagggccttgacatttcctgacgtgtccagagttcagattggtgataataatgttttgctacttgttcttttaaaattctaaaataaatcaccccaaaataagatttttatccttaataagataaacttaatgagaatttcattttatttggggagctattattggattgttttgaaatattttgattaatagattgaattttgtttttatatttttaagcaagttgaaaaacacatgaaatggctgatagatccactgccagtgaatgtaagagtaattgtttctgtgaatgtagaaacatgccctccagcatggaggtacgatgccaactttagttctttcagagtacatgaaatgttttaagtacaaacaaggaaagatttttaatatgcatttatggttttcacattttttatgtaacttgcagtgaggatggggagaagtgggtgaatttatgaaaaaaaaatacaatctatagaattgtatagatggtgtgaacctgtaatcccagcactttgggatgccaaggcgggtggatcacttgaggccagcagtttgagaccagcctggccaacatggtgaaaccctgtctctacaaaaaatacaaaaattagctgggcatggtggcgcatgcctgtaatcccagctacttggaaggctgaggcaggagaatcgcttgaacctgggaggcagaggttgcagtgagcagagatcatgccactgcacttcagcctgggtgacagagggagaccctgtctccaaaaaaaaagggatttggggggaggttagatagatctgggatgcaagggaaaagaaagagccaggatgattctggagtttctgacttgagaaattaattaatgtagcttcatgaactgaaataggaaacacaaaggacaggcaggttgtggggaaaaggtgatgagtttagtttttaatcatggttagtttgagtagctccacgtaacgatgtctagtaggcagttaaatttatagatgaggaaaatagagaaagggccgggctgggaataatagacacctgttattttgaaatgcaagctcactttaatggttctttaaaaagtagtagagtggccgggcatggtagctcacatctgtaatcccagcacttcgggaggccagggcgggtggatcacctgaggtcaggagttcaagaccaacctggccaacatggtgaaacccatctctaccaaaaatacaaaaattagccaggcatggtggcgggtgcttgtaatcccatctactcgggaggctaaggcagaagaatcgcttgaacccaggaggtggaggttgtagtgagctgagattgcaccactgcactgcagcctggacgacaagagtgaaactcccatctcaaaaaacaaacaaatggctgggcgcagtggctcatgcctgtaatcccaacactttgggaggccgaggcgggtggatcgggaggtcaggagttcaagaccagcctggccaacagtgaaaccccgcctctactagaaatataaaaaattagccaggcgtggtggtgggcgcctgtaatcctagctacttgggaggctgagacaggagaatcacttgaacctgggaggcagaggttgcagtgagccgagatggcactactgcacaccagcctaggcaacagtacgagactctgcctcaaaaaaaaaaaaaagtagagcaattggatcccatggagcagtgtttctcaacctgtttttgctcctataaggagccattttagacattttatttgtaattgcctcccccaagaaattttaataccacacacatattgtatatcagcttgtgtatatagatatatgtgtctatgtgtactttatacataaaaagagtaagttttttcactcccccacaaatgcaattttcagtaccatatcaagaatgtatattgtaatagttaaatttcagttgcattacaagtgcttgtggacaataattgtgtctgatgccactcctcatagatactcatacctatgcttagttttactgatagtatggaacatagaactagaaatgttttaccatgtaactatctaatgtatatactgtttattttataacactgtttgttgtgattcattgctcaaagtaatgatacacatattagaataagatatattaattacttaatatgattaatagacattagttttgcttattttacaaaagcagtataaagtgttaattcctgtggtggattttaaattgtgttatgggtaattacagttcttgttgtattattaaaatttcatttttcttttctttacataaaaggttgtggcctacacttcatcttgatcccttaagtccaaaagatgcaaaatctattataattgcagaatgccactctgtagacattaaattgagtaaagagcaggtgtgtatttttcattttgatgcaatcttttactctctcatctttcctatgaaacatcttatgtgagacttaaaattcaatataggggatctgttataaggaaaactggagtttagtaattactttggtaaatgtattgcctcttaaactaatgacaggtagaaaagaagcaataaaaagattttggtcttaaggttgactttagtatataatattaagcaggtattttaaaagcaaaagagcattttcatactggccatatctgtggtctgcagttggaaggctgcccacagccgaggagccaccactgcatgttgtgatgtcacggatggcagcaatagtgttatttctgtcggggtacttgttgatggctgggtagtaaagaccgcttaattccagggtggtttttgtatttctgttttgtttttcttggtaaactggtgcaggagaagaagctagaacgacactgtcgttctgctacaacctgcaatgccctttatgtcacccttttcggcaaaatgatcgcgcggtgagtggtgattattttacatgatcttctgcatgttttgtgtttgctgcagaccctttctcaccctgcaaaactgagaactgatcactacaccagtctgttgagccactcagattttatttgaatagtgatactaacatttgtgagaacrtggcttacaggtgcctactgtccatgattgtcagaacttgatagatttgtctaattttcttcacactaatctgttccctattggaggttgcaaaagaaagccatcctcaccctcatttgtggcccctagctttgggaaagtgaaggaaacaactgagggttacaatattatttcaggtatctttgaatatcaggaggtagatatatggatatgaatttttaattgtctctgttctcaagtcctgataaactttttaattataaaaatagttctattttagatatccattagtaatctgcctttagataagcattagagtatcactacttttatttcctcagtatagctttaccctattctatctattctcaaccgttagaatgttttactacttttatttcttcttcagtatagcatcactctactttgtcttttctcaatctgaggtaaaaaaaaaaaagattaatacattttttgttattcattgcaatagatggcaattctagcacacatatttccagacaccgaatctagtacttcttgtctctttattccatgttctcatcttgagaaccaaatttgaaataaaaaaatcttctgaaactttacattgcccatgatatttcatctttgtttttgtttttgagacagtgtctcactctctgttgcccaggctggagagcagaggcttgatctcggctcactgtaacttctgcctcccagactsaagcgatcctcccacctcagcctcttgagtagctgggactacaagagcacaccaccatgcctggcttatttttgtatttttagtataagcggggttttgccatgattgccaggctggtcttgaactcctgggctcaagcaatccacctgcttagcctcccaaagtgctgggattacagcatgtgagccactgtacccagcctgcctgtgatatttccactgtccttttccactgttagttgtrgcaacacatctggcctctgtgaacatcagtgatacaatgagtatgattcaagagtgtgagtaatttttcatacatttaataatgttcattgaaagtattttactgtttttatttttgaaagtacctattttaaagagactatggaccctttgttttttctctttgtacatctttatattatttttaaaaactggtaaatattgtgtaatcttttaaaacatacccccctatttaatgattttctttagccttgtgttttcaaaattctggctccacacaaatttaatttgcatggctaactaacaatacttatcatcgtttccctgcttcctgtatgtaggtggcatgcttctggataataagaaccgtgtctgactcatttttatgttccataatgcatagtaattgcttaacaaataatagatttcagcatgtttattgcactgaattaaattatrtatagtaaaataaacccaatgactctagcagccccataaaactaccactttcctktatcatgttttattgaatttgttattggttgcagtacaaaaaatagagttcacrttgtttttaatygatctcaaaattttcacagatgttggcaatctgtaagaaattaaatctcttctcgattccaacagtgctgggagagcaggcaatttagataaaatccttcatcagtgtttccagtgtcaagatactctttcattatatagacttgttctgcactctatccgggagtccatggcaaatgatgtggataaagagctaatgaagcaggtagaatgtaataaacttataaaaaggaatgttagtttgctttgtgtgtgtgtgaatggaaataaataacaattcttttaaaatttgtgcttaaatatgtttcaggcatatgcaggaatgctgatagccatagtgtgcttgtggaaatttgtgtttacctgattatcattgagatttatcatcttttcatgttattggctatcctttttttctgaattgctggttcaggtctttacccattttttaattgggtcatttgtcttttccttatcgatctgtaggtgtcttaaatgttctgcatactgaaaacaaatcctttattagaaaatttgcaaataaatgtctttttcctgtttgtttcttgtcttttaactgtatggtatcattcattatgtttcattcattatacaaagctttgtttcatatatatatgtgtgtgtgtgtgtaaacacacacacacacacacacacataatttccttcaaaaagttttatagttttttcttcgtgtgtgaagtccttaactcttgttgatatctttttgtttattgtgtgaggaaggattctattttttaatcctctgtcatatggataattaattgttctttttactaaataatacatctcttctgctcatttgcaatgccaactgacaaatatcaagctcacaaataaatgtgggtctgtttctaggctcttctgttctgattttgcctattatttgccagtaccatactgcttagttgttagaactttaaagtaagctttggtagttacttgggtaaacctccttttattattatccttcacaattgccttgtctaattttccatatatatatttttagaattaagtgctatgtaattaaaataacattgtagttttttgttgatgtattcaattttggtttttgaaaatatatatctagcaacctcattttttttttttttttcccgagacagagtctcgccttgtcgcccaggctagagtgcggtggcgcgatctcggctcactgcaagctccgcctcccgggttcaagcaattctcctgcctcggcctcccgagtagctgggactacaggcacccacgaccacgcccagcttattttttgtatttttagtagagatggggtttcaccgtgatagccaggatggtctcgatctcctggcctcgtgatctgcccactttggcctcccaaagtgctggaattacaggcgtgagccactgcgccctgccgaacctggatctatttttatgttaacttttcagcttggtggttcccagggtttggacttctcagcccactccaagcccacaagcttcctcgtattctctccacgtctgtgggctaatgtttttctcatgcaccccttcactgagggtgaaggtccttcaaagcccttcaaagatcctggtgttgacaagaaatctaattctacctccttgcctcacacagcttaagggctcaccttccatcccactgtggctgtgaaaacctgagctcttactgggggatgctgcctgtcctctagctccactgcccccatagccagcagttccagccctttacactctgacttcaatttcctattcatttttggcagttggaggatttccctttatttatctaaaaactgtgcttttagaaatgtgtctgatattcatacgtgtttataataggagggctattttcttccactgtcttcctggaattggaattctgccattaattataataatacattttatgcagttttaattttcactgtacttttttctgtaagagtgttatctttggtgtgctagattttatatatacactatcttaatcttcattaatgtcttttggacagtgtgttttaataaatctgtttcttgatttattaaatcatttgaattataagttttggtaaaaagaaatagccttaaaagaattatggaacttttaatggccgttagttacttatacaggtgctttatgattactgttaatttgtttttctacctagatcctctgccttgtcaatgttagtcacaatggtgtgagtgaatcagaactgatggaactctatcctgagatgtcctggactttcttgacctcccttattcacagtttatacaaaatgtgtttgttgacttatggatgtggcttgcttaggtttcaacatctgcaggtaatgttattttaggcatctttttatttatttatttaagaaacagggtcttctctgtcacccaggctggagtgcagtggcaagattatttctgccaaaggaataaattctaaagatctgctatacaacattgtccctatagttaacaatactgtagtacacttaaaaatttattaagagggtagatctcacgttaagtggtcttaccacaatacaatttttaaaattaaaaaataagtcagacacaaaagatcaaaaaaagtttcttaaaggtagtttatttcttgaagagaaaaaaagtctttttcaattatgtttcattgaattgcggtattattatacagtcatgcattgcttaacaatggggatatgttctgagaaacacatcattaggtgattgtatcattgtgtgagcattgtagagcgtacttacacaaatctagatggtacagcctaccacacatggaggctatatggtatggcctattgctcccaggctacaaacctgcacagcatattactgtactgaatactgtgtgtaactgtaagtatttgtgtatctaaatacagaaaagttacagtaaaaatgtggtatgaaagttttaaaacggtatgcctgtatagggcagcttcattataattttataggmtcatcatcatgtatgcagtttgttgttgaccaaaacattgttatgtgcacatgactgtatatgtattaagagtttggactctgtaagccagtcagcctccttttcatggattaatgcctatctaaacttgggcaagatctaagccccaggcggactttggcagtttatgaaaggggttgtgaagcaaattaattgaggtsgttcttggtccttgtgaggtactagaaagatgtttagcacatagaagtaaatctttaggaagttttggctaaaataattcctatcatctgcaatgccatggttgatttatatatatatacaattgtaaatgaagtcttacatttgagtatgctgtatcatatttgtagatgtgaaatgtttgcaatttcacagcctttttcctttctttattgtgtattgtttgaatataatttattctttttagtaacttttcattccacacttctgagatttttaatgtattaactaaagtttgaattaaattgtgttttgagcttataaatattagtacagaaatttttattctagtaacagtttatcaaataaatatgtcctaaatttaaaaacatttaagtgacatttctattatacagctataaaataggaataattrtaaattcttttytgcaaatctcttgttagatgtacagtgacttacgtgaaatagaactcagtatttcttctttttctccctaggcttgggaaacagtgagattggagtacctggaaggccccactgttacttcttcatacaggcaaaagctaatcaactatttcaccttgcagctaaggtattgtaaatgttcctgttgttcttctgtaacttctgcaacacactacctttgtgtccttatttctgtttcttagcttacaacttaaagtacaaaaacttaattattacaaaaaagattaaatcctctccctattctgttaatgtcaaaagagcaaaagatgattttgtcttttaatattatgctaaaagtttaaacaaggaaaatcaatgtaggatcattttattatttttattttattccaatagtttgtgtccatgtatctgtatgtgtatatacgggtccattgagtgtttttttaaatagttcaattttaggaaaatacttttagagtttggttgatggttctgcatatcactgaatttattttcttagattggtaaagtctctgattttgacctaacttttttagtattaaattatacttaaagaatcagagatatatgttaaatatttttcttcctttgacatttgcctgaagcctttttgaagcagtctcattgtaggaagatattgaatattgtctcctctcttytgatagtcaggacagagtgacttggagaagtgcagatgaactcccrtggctttttcagcagcagggaagtaaacagaagctgcatgattgccttcttaatctctttgtgtctcaaaacctttataaaaggtaagaaacattatagaacatctttccccagaaagagagatttaaagttgttcagtttaacaaagaaaaaatggtatttttaatttaaaaattagtctaagtatctgaaatacaratagtgtaggagaaatcttgagacaatttacaaatctctattagatctgcttttcccaagaggaaaacatagagtactgctgctttatgaaatcagagctggaatgatttcggttcaactttttatcttatgcttacatttaagcatgtctaaatttaaaccactcagagaggtggttcgtaatgtctgcttctttgggccttcagatatctgaaagcgtagccttcaaaccagactcgggtccaagtagaatctgtctggtgttgaatttatttgtttttgtttgtttgtttactttctatgtctggtgttgaatttaaagaaagaattaccctaattcaaaaatgtattctgtttgtctcttttgatatgttatagtttgtcagtggcagaactacctttttatgaggcaactgtctaacctactaagcttcatgagggtttttttctgccttacttagagatttagacatttcttatacaataagtatcataatttattttgctcctacataaactctctcaaatttgttgcatctcttatttctgatctccattccaatttttcatgattcctttgaaatcagatattttttagtttaccagccccatactacttaagatcgcctacagatgaataagcttacttttgtcattcaatttcttgatgaaaatacaaagtagatacyctgtgacagtttattttttattagtttcttctctttgaatttccatacttaaaataattttgggagtgaactcagtggttggctccatattgtgaaatgtgtaaaaaggattcagatagattcccattggtaagtagccatgatggtattaaggataacagccaacaccgtggagtacttactgtgtgccataatccccctacagtaccagctgaggcaggtagtgtctccatttctgcagatgaaggtgatgaggtctaagaggtcagataacctgctcaagattacatagctaggatagtggtggaattcagatagtgagtggtctgagtcttacctcattacacagtactcgcctactaataaattgtcaataacttgatattaattctggagttttgattctgtaatggattttaaagtgtgtttttcattaaagtactgttatttgttgaaacaggggacactttgctgagttgctgagttattggcagtttgttggcaaagacaaaagtgcaatggcaacagaatacttcgattcattgaagcagtatgagaaaaactgcgaaggcgaggacaacatgagttgcttagctgatctttatgaaaccttggggcgatttctcaaggatctaggccttctcagtcaggtaagctcagcagatcaatggcaagccagagacaggtgggatttttgtgttcactcttctctttttccaagatgttaatgtggttttcatttgttgtgctataatccttaatatttaatcagatgacagatcttgcagcatttcactcactttaactggcctttcaccccttttccccccaggccatagtacctttgcagaggtctttagagattcgagaaacagctttagatcccgatcacccaagagtagcccagtccctccaccaactagcaagtgtatacgtgcagtggaagaagtttggcaatgcagaacaactgtataaacaggcgttggaaatctcagaaaatgcttatggtgcggaccatccatatactgctcgtgaacttgaagcacttgcaactttgtaccagaaacaaaataagtaagattttttagatcagtaatacctgattttatgcagggggattacagttttagtgtacttatagggtaagctttgttttatcactgtgtacttttccttaccctgtgcctagtcttcatgtggtaaacagagaaaatgagaactataagattcatctctgtttgaagatgcatgaaggatagaacatggactttcgagtcatatagtcttgggtttgaatcctggctcattcactgactaactttgagtgctttactaatataggtttagtatcctttatccaaatgtggaaccagaaatgttcaggattttggatttgttcagatttcagaatatttgcatatatataatgagatatcttggggatgggacccaagtctaaacatgaaatgtatttttcatatacaccttatacacatagcctgaaagtaattttgtgtactagttttaatttgtgcataaaacacagttttgactgtggcttgagttgacccatcacttgaggtcaggtgcagaattttccacttgtggcatcatgacagcactcaaaaagcttctgattttggagcatttcagaatttgggttttcagattagggatgttcaacctttatggggccagcaaaccattgcccataggccaagtccagttgtgtaaataaggtttaaagggaacacagccaaatttttttcatgtatatattatccatggttgcttctgtgcttcagtggcggagttcctcacttggaacagaaagcacacggcccacaaagcctaaaatattaactctctagcccgttatagaaaaagccaatctctggtataataaaaagtctttcttatctatcaggcacccaatgaatggcatctcttcctctattaaaaattatttcttttgctctatcataagtgatacataatggaattttttaacttatagaagtattgcttcgtacaaattttgtgtgaatttcacatttaaacttgaccagaaattagcctgtgcagaaaaagttgttaattaaaaattattagtgtgctatagaaaactgaaattttgacttttcatttagttaggttgcccttcagagacttaggatgagttaaattagttaaagatgatcagatgtcagctacttaaaggactagacttgctttgttttgtcaaaatttttttaattgaacagaactttttrttagaaaaacatccatgatagactaagatatcttagtgttttgtcatattttgttttatgaaagggtttttagagattcttaatgtcatgactatcatttctagaaaaaatgctgtatttaatagcccaaaaagactttacactatgaaaagagtgctttcatttcactgaagtatactttgaatatgtttcttttgtttgacttactgtaatttttttttaagatatgaacaagctgaacattttaggaaaaaatcctttaaaattcatcagaaagctataaagaaaaaaggcaacttggtaaggagagatttcttttgtgttgtgttttgaacgtaagaggaaaagagcatcataaatgcatacaccccacatgtttaagagctttagattttaaaatcttctagttttttagaagagaactacttaacattttcttatttatgtgttaaaatatcatattactgagaagtacaatttagactttaaaaagtggaactctaaattcatttgaaggttagattttgaaagacggaatttaaagctacctcagttctttaaagggttggaaaaaggaataaaataaatttagttaacattttgtgttatgttcaaatgtgaagaaagccttcccctcaaatacacaataaaagttattttaatttttttaagttgctgataaaatctaaatgtagcatatttctttaatttaaartgctgtgtgcatttttatggacctgatgtttatgtgtttacctatggggttgataaatatctgcaaattaattatattctattatttcttgaagcactttgagatatagtttactttctaaaatataatcattttcatgaaatagtttttaatgaattttagaatgtgttgccatgtggaaatatttgtatttgtaatcatcaagttaatttagtgtgatgcttaaaataatagttatctagrttaaaygggaaaaaaggaagattttttaggaccctcatatattgtttcagaatcaaggattgcacctacttagtgattgcttttcatttttcatgtttgctgcagtacggatttgcccttttacgtagacgggctttacagttagaagagcttacrttaggtaaggacacacctgataatgctcggaccctcaatgaactgggtgttctctactatcttcaaaataacctggagtgagtaccatggggttaataatgaaaataattaaccattttctctttgatgcaatgctgttttacatttttgtcaagtctaaagctagaaaaaaaatgataaaaaccacgcaaaatttcatgtatgatgttatataatgagcatacacatacctaaagaccatggcattttctctactgtgtttcttttcacactcttttttttttttttgagacggagtctcgctctgttgcccaggctggagtgcagtggtgtgatctcggctcactgcaacctccacctcccattcaagctattctcctgcctcagcctcctgagtaactgggactacaggcgcatgccaccacgcccgactaattttttgcatttttagtagagacagggtttcactgtgttagccaggatggtctcgatctcctgacctcgtgatctgcccgccttggcttcccaaagtgctaggattacaggcgtgagccaccacgcctggcccacattgtttcttaactgaaaagttattctgtagcttccctggtgtattttatatatttatgaaaagtgagtttgtgtagatattgtgcataagatctcacagaagcagcagcttgggactaatggtaaataatgtagacggtttctagttttgtcagtttatttgggcaaaaggattcaaaatgacatttatatttatatgttataaaaagtatttttggacttcatatatcagaaaaatataacaaatttgaaactttggatgtcagaaaagtataataaatctgtagcccacttacagaaacttatataaaaaataatgatttattcttttgttaaaaattatttagtactggctgggcatgatagctcatgcctgtaatcccagagctttaggaggctgaggcattaggatcacttgaagccaggaattcaagaccagcctgggcaacatagtgagaccctgtctctacaaaaaaaattaataaattagccagacatggtggtacacacctgtagacccagctacttgagaggctaaggtgggaggatcacttgagcctaggagttcaaggttacacacacgcacacatacaaaaaaacaaaataaagaaataaaaattatttagtactaactccaaagggaggaagagtgaatacaaaaatcttttattggacctaggtctaataatttttaaagtataaaagtttgttttggaaaatatctatcagtttttctttcagaagtggagaattgaggcaatcatccacacattttaggccctcaaactgtcaggaaaagggcaggaagagataggggtggggaagagggggaaagtaagattttgagctgaatctcttattttaactagaatctaagaataaagatgagtcagttctccacttaatttaggggtcaggattccaaactctagaaaatagatagtttaagccattttgggattgtgttcacagaacagctgaccagtttctgaagcgttccttagaaatgagggagcgagttctaggaccagatcaccctgactgtgctcagtctttgaataatctggcagctctatgcaatgaaaagaaacagtatgataaagcagaagaactttatgaaagagctttagatattcggagacgtgcattagctcctgatcacccttctttggcatatacggtgaagcatcttrccatcttgtataagaaaatggtaagtaagctttgacattcttacatgttttataacatatcagttaagccataactactatcagcaaaataatttgtctttatgagggacaggttagtttatatgagctttaaaaatcrtgatttaacttttaacaagtaactgagcagaacatttaaaaataattattttatactgaactggttacattgattcttgattctgaaataatatactagtaaattaatatgctgggtttgttttgttaaatacattccaagtacaaatgcatttattagcattctaattcaaacttattttacatttcagaagttctaaaattccaccaatattaagtttgctgtgtaaagcaacataaacataagaaatcaggagatgtctttgtagttgattaaatgaacatttttatttcgttctttcttggctttgcctgtaattaaatgtaaccattgtttgccatagggttctatactgagtgatatttgggatttttatagctgttctcaaaaaagaaaaaattccagggaagcctgctttcatttagcatagttacagagctttgtagactgtctttagactttgtgggtccattactggtcatcctgacaccaaagttgttttagtaagaagggtacattgctgctatttctgcccaactttcaggtgaagtgaagtagttagaaaaatctggaagggatttggcaagaaatgagctttttattttgatgcagtctccaaattatgtgcaatagtaaatctacttcagctgatatgtttttactacactagaaacagtaatagtggatgatcctaaagggttttctgaattatcaaaaatgcttttctatacagtgtagctttaaattttcagttatctataaacttaatcattaagctgataggaaatgcttctgagatttttttccctcaaaattaccctttaatatgaaattttacttatggaaaaagctctgataagatagtatttattgccttatatttttgttagatttaactcttgttttttaggggaaacttgacaaagctgtacctttgtatgaattggctgttgaaattcgacagaaatcttttggcccaaagcaccctagtgtagctactgccttggtgaacttagctgttctttatagccaaatggtaagttcccatattttaacgttgtatcagtgaatgattttatggtataaaacataggtaaacatgaattagatagggaacactaaatagaatgaaagacaatttaaggatatttctaatacttcctttagtacttgagaaactattgaagttagacttgtatgaaggtcccttcctcttagtgtaaaacactgttagttcagagcataggcttagtttctaaaattctggagataccctacatccctccatataatatttatttaagtatttaagcctgtggcatttgattatgatgggtgagaatcaggtgggggagccattgggcaataaaggaacaggtttgtgcttacagtattggattatggtcaaatggttaccaagccaggtctaaatcttaagtatctgactttctattatactgcttctsctatgattattcataagttaatctgtttattcccatcttttaggaggatattaacattttaaagtactaatcaaagtaggttagcttagtctagaatacattaatttcagaaacccagtgtgcatgagcattatcattttttttaataagaaaaaacacgttgaagctttgccattatatgaaagagcattaaagatttatgaagatagcctrggtcggatgcatcctcgagttggagaaacactgaaaaatttagctgtgcttaggtaagaatttttttcactttccttatacagcctcttttattcgaagtagctttgtcttagaatagcacaaaatatgtattactgaatgttttttcttagagtggggaggggttgttttttgctgaytgacttcaagaagtactgaagtagtatccagaaatgaaatgaagcctgcatgatctattttgcagaggagcatatgtatgcatcatggcaaacagtgaaggatggtttatactacatctggctctgggagtaatatgggtaatttgctgtccccagagtgaagttgccattaagtatatgttgacttttgcttgctcatttgtatttttctcaggatgcagagaatacctaactttgcttagcaatttcactgcctctattacaacatggttttaatgatatccatatgagacacaaaaatactgatactggtagaaaggagaagagtttgggtgttgttttactggtctgcttgagtgaatacactggaaaaagaggggaaatgggcawatatttacagcttctttttctgtatcccataaggtcattttgaattggtaagagkttatattctcattttaagagtttttgttttctctctcaaagctatgaaggaggagattttgaaaaagctgctgaattatacaaaagggcaatggaaataaaagaagcagaaacatcactcttgggtggaaaagctccttcaygccattcatcaagtggagacacgtttagcttaaaaacagctcattctcctaatgttttccttcagcaaggacaaaggtaatagcagcagttagaattctttgcaaatgtaccttaagacaaaataattaaacatttggaacatttgaatttgaaactttaaaaaaatgttgtacgaaattttactacgtgtgatttaactgctatttgtatgaagttgtattggattacattaagttggaattgtgattatgtctgttttagttgtttaaaagaattttcctattatatggtatccaaggatgtagacacattagaattataagaagacatgaggagcaaatcatraagagcggattggtytttgttcaacaagagctggcagagtagttaagacaaggagttcaaaaattccatgaatcttggccaggcatggtggctcatgcctgtaatcccmccactttgggagggtgatgcaggaggatcacttgaggccaggagttggagaccagcctggccaacatggtgaaaccctgtctctactaaaaatacaaaaaaaaattagctggacctggtggcgcatgcctgtaatcctagctaytcaggaggctgaggcatgagaatcgcttgaactcagcaagtggaggttgctatgagctgagattgtgccagttcattccaccctgggcaacagggtgagmctctgtctcaaaaaaaaaaaaaaaaaaaaaaagaattccatgattcttttgagctctcaagagctactttagccttgccattcctcttgcttttcagcagtagtctggcccaattctctacctcaaaggaaagtttcaaggattaaagggttaatgtttatgaacgattcaaattgtcttcagtgaaacacattagtcacaagaatccctgattgctgcactttaaaaaattctttaccttttccttgagcagattggtccagtccctctgctttctgttctgtctacattgtgtattatttattactatatagtatatgtatctgcataatgtctgaagtcattaatgcagtaacaggtcaagctctttagcattctttgacttttcccaaaatatagatatgacattctcctttatcttccttcttagatggcctaaatctgtctcttcatttacctcaaactcaaattagtatgccattttcatactgaaaattaaatatttttatggattttataaatattgcaacattttagatattgttttggaccatttgtgtatttatatataataaaatcatcaatttaatacttgtaagatcctaacatgtattgattgtaaaagtgaaatatgtaatagccacacttcactgttttaaaataaaagtgcaatttcaagttcttttttccccactctagtttatacaagagggctgttttgcatgatttttaaagaaatacgttgaactttttttagaacttgaaatggaccgggcgcggtgtctcatgcctgtaatcctagcactttgagaggccaaggcgggaggatcataaggtcaggagatcaagaccatcctggctaacacggtgaaaccccatctctattgaaaaatacaaaaaactagctgggcgtggtggcacacacctgtagtcccagctacttgggaagctgaggcaggagaatcactcgaacccgggaggcggaggttgcagtgagccgagatcacaccactgcactccagcccgagtgagactccatctcaaaacaaaacaaaacaaaaaacaaaaccttgaaatgttgtcaatacttgctgctcagtagtttgctcagcttaaggttttggttaatgttctcttaaggccgagttactattcacagggtagtccacaaatcattgtcaccaccacctggcagcttattaaaaattcagactctcaggcctctccccaaacctactgaatgaatctgtattttagctagatcccaaggtgactaatgtgcacataagtatgagaagcagtggtataactctacggcactatagtggtaatttaaaaagaaatgaggcagtatataatgagcatccttcttcctcctttgggagtagttcaagagggaaaaatagaagataaactataaccataacatacctttctgggtttggcagctgtgaaagacacaaagtaattgaaaacacaaatataccagacaatgattttagaattaagctgttagagcttagaatttgattatttagtggtacaagtcatttaatacatagcaagtaatgtgttcggtttatcaccttagaaaaactgctttagaaaataatgagaccagtactctagaagaaccctgataaaaggaaaaactaccttaagaatattatttattctttgtacctccaaaatttgtgcctgaataactgtagttggagacatgatcactcaaaattatgtattccaaaagaatgaaatttaaacataataaactattttgatattactatttattttactaccaacccaaacgttctcatgtagaatgcatacttaagaagataaaaatagctggaacatctttgtgtatgcatatttgaagttctcaaataggaatattttcttcacattaatatgcactttcacaatgaaaaaggtagctttcagacaactcaattataaatctgaattgttagagtacttattctagttataatttttattcatcaatacctttttttttgagacagagtctcactctgttttccagactggagtgcagtggcactatctcagctcactgcaacctctgcctcccaggttcaagcgattctcctgcctcagcctcctaagtagctgggattacagtcacgcaccaccacgcccggctaatttttgtatttttagtagagacggggttttgccatgttggtcaggctggtctcgaactcctgacctcttgacctacccacctcagcctcccaaagtgctgagattacagaaagggaaatatgaaaaaaatgtgatgcaggggtcaaagcttcctttagtaaatattcttggctgggcgtggtggctcacacctataatcccagcactttgggaggccaagatgggtggatcacctgaggtcaggagttcaagaccagcctggccaacatggtgaaacctcgcctctactaaaaatacaaaaattagccatgcgtggtggcgggcacctgtaatcccagctacttgggaggctgaggcaggagaatcgcttgaacctgggaggcggaggatgtggtgagctgagatcgtgccactgcactccagcctgggcaacagagtgagactctgtctcaaaaaaataaataaataaataaatattcttaagtggccattacgttttttgtgttgttcagtgtacgtatccagggagtatttttatgagaagaaactagtaatacttattttctctacaacatttaagtagaaccataactaacttcccattaacaataagacaggaattaaagttgaatatgttgttttactatcatttagagtctctgtgctaagccaattctgggactgcttttccatctttcacattagaatcaatagtgtttacaaatctggacaaatgctatgagtttagtaatactaaattcaatgatgattaatttttcgtaatcagctgccttcttatgcaagttttcatggcatacagactgtcaagagagtattctaggatagcaacatctctattaccagattttttttctggttaaataatccaattgtttttaatgaaagatattagacaaaaaaagttaggtcaattaggtaacatttggtgcagtgtaagacacaggcagtgatgcaatgccaacttgagagcagataaaagaagacagtgaattctagatgtgatactttatcaaattgtaaaattttataaaaccttactaaattgatatgcaagaatttccaaaggaaatttatttttgaaaaactgcatttcattttttaaattcaaaacatctctcatactagaaaagctattttacagttcaataagctaaatttttaaaaaatgatagaagactcaccaaggcaacataaataagtttccaggctaaaaaaactatccttctgctttccagactttactataaacataagaatcacagtataatcctagcatctcaaaactaatatattgaaaacatttggtagttgagactttctgaaatcagttttttgaactttattttacaatcagggatgtacttttaattttttacaacattttctccctagagatataatttagatattcctatcttcaaagtaaaaatcaaaataggaaataagcatagaaacagcctattggcagtggttacacctgcatggtatttatgagtctccaaactattggaaatttatttcaaccaaggttctcttaagtcttcattacttgggtgtaactcgagagaaaactaatttatatcaatttacagtttagtggtcatgatcaggggaaagtgatactcttccactgactacaagtcattgcagaggcagtttagaacttttcctttattcctaatatacaggacaaaccttgccgacatctcactacctcgaaaatcaaatttaaatgaagtatccaggagtagcctaaagaatgagtgtaatctggatggattttagtctaaatttatgccttgctcttcagtaaagtatagtaactccagatatatgttccacagatgcaataatttctgttccttgttcggtgcagaatataatttatacttcctgaaatcaactttgtctattcatgaaaatagctgctttttatttgcctttgtctcactttgaatatatatgatccacaggttacagacttttccaataactacatttcaacttgtacttcatcagcaaacatttgagaggatgttatttcataggttaactattttgaattcattgttgatcaagttagtagtagtgggcaattttcttatagaaagcaattccaaacataatgagcagatgcttgccagctctaatcaataagctgtatgccttgtccttctccctgtatctgaggatcatatactactttattgtccatgtcctcatgcaacagacacaagggattactggaaagaaaaagattacaggatcagatttgtccttcccccactccaaaaggccaaaacatttcaacagctatgttttcaagtaagatttatatcctacaatatcctttgaggttttcttactagaatgaaacacattttaggagagttaatgatttcgttggagcggggagaaacaggcaagtcacaggattttcaaaaagtataacaattcaggtaagaatatacattaattaatgttgccctaagttttatcagttaaaatttttttttaatttcaagggaagaggctttaacatgagaaatacaatatatcccagtccattatctacatattcttcattttggccatgaggtcttccaagctttcaccagaatcttccactgttaactcagtgacagaatcttcttgctattgacaaataagggaaatacagtgaaaaaagaaccatatagaattcttgatgcttaggaatatataatcagcaagttttgaccatgctcaacaaggttataaagtaaattttctttaacaactatcttctaatttttagaagaaagacagagtcttttacattcctcaccagtcttttgatttacaaggcagtaatttcaatattcttgacagctctagctttttaaacgacatcgtagctaaaactaccgataaacaaaaatgagatcttcatttaatcaaaatctactatacttggttcattaatgagtgaacaaaaccattttattctatgttttaaaagtttaagctataaatatttgcatattaacactgcatacctctctctcacatcttaatgcctatagcataaaatatctaaaacaggaaatacttcattggcattacaaattagaatgaagatgataaatattttatatgatatttacatatgggtaaatcatatttttgaagtaccttttttggaattgtgtatgccactgtaattccttcaggtaagtctggaactggacctgaaaaatttttcagttcctcttctgaaacctcagataccagctcaatacctgtaaatttgatcctatgtcagtttttaaggaatttaataagcaataattattcaatttgtataatcttattagatttgctaccataaaaggttttgttttatactgccatttcaatttataaaagaatacctaccccattcattatcttcatggattatctcttcctcttcttgtataacctcttgtttaggcagtgctgctacctttttctgtagaaatcaaacagcatcaaagtgttcttactcattctcagttctctaaagcattaatcaagaattcagacaggctttttatcttaccaaaagcaagaaagaacattcatttttgaagtatggtgaataaattaaccatttatcttgtattccaaatctgtttatgtattgtcctattcaatatgatccctcatgcattctaacagattgtcatataccttatattcctcctgctgcttcctgcaatttctgtcatcacactgaggatttggcttcatggacatagtaggaaaaaaatcctgcattgcattgtatccaaggtaaaaactaacagtaccaaaatttaacagaaaccta

SEQ ID NO: 96206 - DNA, 13014 bp, Homo sapiens
tttacctacccaaatcttataaaacggccccacccctatctccctttgctgactcttttcagactcagcccccctgcacccaggtgaaataaacagctttattgctcacacaaatcctgtttggtggtctcttcacacagacgcgcataaaatttggtgccgtgactcagatcgggggacctcccttgggagatcaatcccctgtcctcctgctctttgctccatgaaaaagatccacctacgacctcaggtcctcagacccaccagcccaaggaacatctcaccaattttaaatcaggtaagtggcctcctcttactctcttctccaacctctctcactatccctcaaccactttctccttcaatcttggcgtcacccttcaatctctcccttctcttaatttcaattcctttcattttctggtagagacaaaggagacacgttttatctgtggattatccatggacccaaaactccggtgtccatcamggacttgggaaggcagacttcccttggtgtttaatcattgcagggatgcttttctgattattcacccacgtttcagaggtgtctgaccacgcagggatgtctgccttggtccttcacccttagcgccaagtcccgcttttctggcagagggccaagaactccaaccccttcactccgtgtctctaccccttctctgcttttctgggtggcaagaacccctgatcccttatttccatgccccaacccctgatctctgcaccctgatcccttattttcatgccctgacctcttatttctgcaccccaaccccttatttccataccccgacccctttcccacttttctggagggtaagaacccctgaacccttcccttcatgtctctactctcccttttctttaaacttgcctccttcattatgggcaaccttccaccctccattcctccttcttctcccttagcctgtgttcataagaacttaaaacctcttcaactctcgcctgacctaaaatctaagcatcttattttcttctgcaacaccgcttagccccaatacaaatttgacaatggctctaaatagccagaaaatggcactttcatgttttccatcctacaagatctaaataattcttgttgtaaaatgggcaaatggtctgaggagcctgacatccaggcattcttttacatatcagtccctccctagtctctgttcccaatgcaactcatcccaaatcttccttctttccttcctgcctgtcccctcagtcccaaccccaagcatcgctgagtctttctaatcttccttttctacagacccatctgacctctctcctcctagccaggccaggctaggtcccaattcttcctcagcctccactcctccaccctataatccttttatcacctcccctcctcacacctggtctggcttacagtttctttccccgactagccctcccccacctgcccagcaatttcctcttaaaaaggtggctggagctaaaggcatagtcaaggttaatgctcctttttctttatctgacctctcccaaatcagttagtgtttaggctctttttcatcaaatataaaaaacccagcccatttcatggccccttagcagcaaccctgagatgctttacagccctagaccctgaaaggtcaaaaggccgtcttactctcaatatacattttattttattacccaatctgctcccgacattaaataaagctccaaacattaaattccggccctcaaaccccaaaacaggacttaattaaccttgccttcaaggtgtacaataatagagtagaggaagccaagtagcaacatatttctgagttgcaattctttgcctccactgtgagacaaaccccagccagccacatctccagcacacaagaactcccaaatgcctaaactgcagtggccaggcgttcctccaggcccgcctcccccaggagcttgctacaagtgccagaaatctggccaccagaccaaggaatgcccgcagcccaggattcctcctaagctgcttcccatctgtgcaggaccccactgaaaatcggactgttcaacttacctggcaaccactcccagagcccctggaactctggcccaaggctctctgactccttcccagatcttctcggcttagcagctgaagactgacactgcccgatagcctcggaagcctacaggaccatcacagatgctctaggtaactctcacagtgcagggtaagtccatccccttcttagtcaacatggaggctacccactccacattaccttcttttcaaaggcctgcttcccttgcctccataactgttgtgggtattgacagccaggcttctaaacctcttaaaactccccaactctggtgccaacttagacaatactcttttaagcactccttttaattatccccacctgcccagttcccttattaggctgagacactttaactaaattatctgcttccctgactattcctggactacagctgcatctcattgctgcccttcttcccaatccaaagcctcctttgcatcctcctcttgtatccccccaccttaacccacaagtataagacacctctactccttccttggcgacaaatcacgcaccccttaccatctcattaaaacctaatcacccttaacccactcaatgccaatatcccaccccacagcatgctttgaaaagattaaagcctgttatcactcgtctgctacagcatggccttttaaagcctataaactctccttacaattcccccattttaactgtctagaaccagacaagccttacaggtttgttcaagatctgcaccttatcaacaaaattgttttgcctatccaccccgtgatgccaaacccatatactctcctatcctcaatacctccctccacaatccattattctgttctagatctcaaacatgctttctttactattcctttgcacccttcaccccagcctctctttgctttcgcttagactgaccctgacacccatcaggctcagcaaattacctgggctgtactgccgcaaggcttcacagacagcccccattacttcagtcaagcccagatttcttcctcatctgttacctatctcggcataattctcataaaaacacacgtgctctccctgtggatcatgtccagctgatctctcaaacccccaacacctacaaaacaacaactcctttccttcctaggcatggttagatactttcgactttagatacctggttttgccatcctaacaaaaccattatataaactcacaaaaagaaacctagctgaccccatagatcctaaatcttttccccactcctctttccgttccttgaagacagctttagagactgccccgaccctagctctccctgactcatctcaacccttttcattacacacagctgaagtgcagggctgtgcagtcagaattcttacaaaaggaccaggatcgcgtcctgtagcctttttgtccaaacaacttgaccttactgttttaggctggccatcatgtctccatgcagtggctgctgccaccctaattctttagaggcccttaaaatcacaaactatgctcaattcactctctacagttctcataacttccaaaatctattttcttcctcacacctgacacatatactttctgcttcccggctccttcagctgtactcactctttgttaagtctcccacaattaccattgttcctggcccagacttcaatctggcctcccacgttattcctgataccacacctgacccctatgactgtatctctctgatccacctgacattcaccccatttccccatattttcttctttcctgttcctcaccctgatcacacttagtttattgatggcagttccaccaggcctaatcaccacacaccagcaaaggcaggccatgctatagtacaagccactagtccacctcttaaaacctctcatttcctttccatcgtggaaatctatcctcgaggaaataacttctcagtgttccatctgctattctactacttctcagggattattcaggcctcctcccttccctatacatcaagctcaaagacttgcccccacccaggactggcaaattagctttactcaacatgccctgagtcagataactaaaattcctcttagtctaggtagacactttcactggataggtagaggcctttcctacaaggtctgagaatgccaccgcagtcatttcttcccttctgtcagacataattcctcagttgagccttcccacctctatacagtctgataacagatcagcctttattagtcaaatcagccaaacagttttttaggctcttagtattcagtgaaatctttatatcccttacattcctcagtcttcaggaaaagtagaacggactaaagatcttttaaaaacacacctcaccaagttcagctgccaacttaaaaaggactagacaatacttttactgctttcccttctcagaattcaggcctgtccttggaatgctatagggtacagaccatttgagctcctgtatggatgctcctttttattaggccccagtctcattccagacaccagaccaacttggactgtgccccaaaaaacttgtcatccctactatcttctgtctagtcatactcctattcaccgttctcaactactcaaacatgccctgttcttgtttacactgccagtttacactgtttctccaagccatcacagctgatatctcctggtgctgtccccaaactgccactcttaactcttaaagtaaataaataatctttgctggcaggactatgctgaacctccttaggcactccctaattaaatatcctaggtcctcccaattctcagacctttaatacctgtttttctccttctcttattccatttttcaattcatacaaaaccgtatccaggccatcaccaatcattctgaatgacaaatgtttcttctaacagtcccacaatatcaccccttaccacaaaatcttccttcagcttaatctctcccactctaggctcccacgctgcccctaatcctgctcgaaacagccctgagaaatatcacccattatctctccaaaccatccccccaaatttttgccgtcccaacactttaccactatttcattttatttttcttattaatataagaagacaggaatgtcaggactctgagcccaagctaagccatcatatcccctgtgacctgcacatacacttcctgatggccggttcctgccttaactgatgacattccaccacaaaagtaatgaaaatggcctgttcctgccttaaccgatgacattatcttgtgaaattccttctcctggctcatcctggctcaaaagctcccctactgagcacgttgtgacccccactcctgcccgccaaagaaaaacccccctttgactgtaattttcctttacctacccaaatcttataaaacagccccacccctatctcccttcactgactctctttttggactcagcctgcctgcacccaggtgaaataaacagctttattgctcacacaaatcctgtttggtggtctcttcacacggacgcgcataaaactatgtaccatttatgtctgattcctttcacttacataatgcttttgagtttaatccagatcgccgcatgtgttagcatttcattactttgtaaagctgtggattgttgtaaataccatcaactcttcctgtccatgagtttggcatccttggatttaagcaaccaagagtaaaaaaatatttgggaaaaaaaagtgtctgtattgaacatgtacagatttttttcttgtcattattcccaaggcaatataagaagtatttacataaaatttacattgaattagatatcataagtaatctagagatgattttcaatctatgggggcagagccaagaatgggagacaagtggaggtctaagcatcacgacggctccccctcttttctctccccacctttaccggcctgctcggcccacagaccacctttccaccatgaccgcttcagcaagttcctgctttaacaaaagcatcaagcaggtgtacatgtctctgcctcagggtgagaaggttcaggccatgtgtatctggataattgtgactgcagaatgactgtgctgcaagacccataccctggacagtgagccgaagtgtatggaagagttgcctgagtggaattttgatagctctggtactttacagtctgaaagctccaacagtaacatgtgtatggtgcctgctgtcgtgttttgggaccccttccacaaggactctaacaagctggtgttctgtgaagttttcaagtacaatcgaaagcctgcagagaccaatttgaggcacatctgtaaatggataatggacatggtgagcaaccagcatctctgctttggcatagagcagaaatatacactcatggggacagatgggcagcccttcggttggccttccaattgcttttttgggccacggggtccatatcacggtgctgtgggagcagacaaagcctataagaggaatgtcttggaggctgattaccaagcctgcttgtatgctggaattaagatcgtagggactaatgttgaggtgatgcctgcccagtgggaattccaaattggatcctgtgaaggaatcagcatggaagatcatctcccgtttcatcttgcatcatgtatgtgaagactttggagtgatagcagcaacctttcatcccaagcccattcctgggacctggaatgatgcaggctgccacactaacttcagcaccaaggccatgtgggaggagaaaggtgtgaagtacattgaggaggccatcgagaaaataagcaagcggcaccaataccacatccgtgcctatgattccaagaggggcctggaaaatgtctggttcctaactgaattccatgaaactgatggcagaagtgacccatctggagcagatgctgccataatgccagctgcagttggggaagcaccacctgggctctgtgctccatggagcaggtgggagccaaaaacaggtgggatccctgcccgctcctgagttggagggatagaagctccactcttccaggtgaagctgtagcctcccagccacagctgaggacccaggcatccctgtgctctcgggaacctgggaagcctccccttcccccagactgcttctgctacctggcctctcctggctcctggtgcccactccgattttggagcaaagttgatgctgagcccaggcacagttgcgacctgacggtgtgtgcacacttgggacagtgctgacataccaggctcctgcagccttggacccctctggactatgggcacctgtgagcacagaagggaggccaatgggggtgagggaagctccacttgagtgtgcaggcacccctcagcacaaacagcctggacaccatggttgccttgcttggcaggttgatggtggtaggaggcagacaggctcctggagggaaagggttggttccctggtgaagccccaccttcaagccagagaaggcctgaagcattggggccaggctgctagttctgcagaccagaatgagaacttatggtgctttttcagctgcccaaggccacccatggaaccaatcagcatgcactttctccactctgaagcccataaaaaccctggacacagctagactcaggcaaacaacacaatgacctgagggcagatagaagctacttatcctgtgtctcctttggttgtatcttttatacttgcaccagcaatgaattatagttccagtagctccacattttcatcaacatttggtagcatcagttttttactttagtcatccttgtgagtttgtggtgatagatcaactatgtatgacattataattttaaagttgtatttttctatttatgaataatgctgaaaacattgtcatatgcattgcccattattacatcttcttctatatagtatttatttttattgttttttattattggattataggagttattttatgttctgaatgagagttgtctgattttatacacacacccccacatacacagacacacacatattacttctgcctctgttcttaaaatttattagtaaaaatctcaactatgtactacttgtgtctgattcctttcacgcatacaataactttgagattaatccatgttgcgcgatgtgttaacatttcattcctttgtaatgctgtgtattgctataagtactattgaccctccatatctccctctttctgtgtgtgagtgtgtggtgggggggtgattatatattccctgtctgagatttaccaatttgcttttttattgatgtctttggaggaccaaaagtgattttttaaaatgaaatttatcagtttttatttttaagtaggcttgcattagtttcctattgctgctataaccaattaccataaattttgtagcttaaagtaacagtaatttattattttacatttctggaagttagaataatgaaaatatgtttgctggactgctctccttctggaggctctgttaaaaaatccattgtatttccttttccaatgtgaaaaggttgtctgcattctgtgactcatgtctcttccttgaattattctaacctttcttcctttgtcacatctactctgagtctgcccctcttctatcccgcatataagaacccttttggttatattggttccagcctgataatccggcataatcttcccatctcaatattcttaatcacatctgtaaagtcttctttccatgtaaagtaacatgctcatagtttcaaggaattagggcatatatgtcttcgtgggacattattttgtctatcacattacttatttggtcctaagaagtatttgcttttcccaggattacaattatagtttcctgtgtttatgctagaagttatatggttataactattaacacttggtctattttccaactcaaattataatggtgtaagggattgaaattcattattgattcatagttttacccagtatttccagcaacatttgttagaaaatgtttcctcttctcattaagctgttttgatacttttatctaaattttttttatcatgtgtgcaaatctacttctgactctccaattgattacataaatagaaatacctgttgaccaatggtgtgccttcttttgagagatgtctgtgcagatcatgtgctcacttttgaatcagattttttttttggggagtcgctattgagttgtttgaggtccttatatatcctggttattgatttcttgtcagacaatttgcaaatattttctcatcttctggaggacgtttcttcactctgttgattgtttcctttgctgtgcagaagtttgattagcttagtataatctcatttgtctactttcacttttgttgcctgtgcttttgaggtcttaccacaaaaatctttgctcagaacaattgatgtcctgaagtgttttcttaatgatttcttccagtagtttcatagtttgtggtcttacatttaagtctttaatgtatccatttgatttttgtgcatagggaaagataaaagtctagtttaattgytctccataaggagatctagttttcccaacaccattaaggagactgtcccttccccgatatatattattgctgactttgtcaaaaatgagttcgctgtaaatgtgcagatctatttctaagttctctattctgtttctttggtctatgtatctattttcatgtcaataccatatcgttttggctactatacctttgtagttacagttgaatcttgaacaacacagggagttagaagtgccaattcccacacacttgaaaattattatatttttgacttcccaaaaacttaactaggaatagcctactattgaccagaagccttataaataacataaataatgtattagcatatatgttatatattatatattgcatttttacaataagttattaagaatcacaaggaagagaaaatatagttactattccttaagtggatcatcataaaagtattcttgttgtatttacattgagtaaggagagaaggaagaaaaatatgagcagttggtcttgctgtcttataggtgacagcaacagaagaaaattcagatataagtggacctgaacagttgttaaaggatcaactgtactttgaaatcaggttgcatgatgccccagctttgttctttttgctctgtattgatttggctattcagggtctttcatggctctgtacaaattttaggattgcttttttctatttctgtgaagaatgtcattgatattttgataaagattgtgtcgaacctgtagattgcattgggttaagaatggacattttaacaaaattaattattccaatccatgaacatgagatatctttccatgtttcatgtcctcttcactttctttcatcagtgtttatagtttttattgtcgaaggcttttacttctttgattacatttattccaacatcttttaaattttttgtaactagtataaatgatattgttcctttattcccctttcagattattcactgatagtctatggaagtagcagtaatatttgtatgttgattttgtatcctgcaagtttagtgacttagtttttctgttctgacacctttttggtcaaggttttaagtttttctaaatgtaatataatatccacacactggggcttatcgtagggtgaagggtgggtggagggagaagatcaggaaaaataactaatgggtactaggtttaatacctgggtgacaaaataatctttacaacaaacccccatgacacaagtttacctatataacaaacctgaacatgtaccctgaacttaaaataaatgttaaataaaaaaagatgtcatctgcaaacaacatcaatttgacttatttccaatttaaatgcctttaattttttttctgtctttcccgatttctctttatagggcttttgatacaatgttaaataacagtagtgaaaatgggcatcattgtcttcttctaggtagtagaggaaatactttatttttttctctatttagtatggtactggctgagggtttgccctatatggacttgttatgaggtatgttccttctatacctagtttgttgagagtttttgtcctgaagagatgttgaattttatagaatgctttttcagcatgtactgatatggtcatatggttttttgtctttcattttgttaatgtgatgtatcatgtttatttatttgcttatattgaatcatccttgcctccctgggataaatcatactcgactgtcatgtattatcttcttgatgtgctgttgaattttgtttgctagtattttcttttttgaagatttctgcatttattttcaccaaaaatattggcctggagttttcttttttaattatattgttgtctgggttttgtataatgataatgctggtcttatataataagtttagaagttttcctttcctttcttttgttttgaaattgttttagtagaactgttattaattcttaagtttcagcagtgaagctatcaggtcccaggcttttcactggtgagagacttattattgctttcatcttgtttcccattattgggcctgtttagactttctctttcttcttggttcagtcttggtaggttgtgtgtgttcaggaatttattcctttcttccgggttttcttatttgttgatgtatagttgcgtatagtattctccaatgattctttgtatttctgtagtactgcatgtaatgtctcctttttcatctgtgattttgtttatttgggccttctctcttttttcttagactagctaaaggtttgtcaattttatttatctttccaaaaaactaacttttgattttgttgatcttttattttttagtctctactttctatatttctggtctgatctttattatttttttcctcccactaatttgggtttctttttgtggatctctagttttttgaggttcattgttgggtagtttatttgaagtctttctacttttttgatgtaagcatttattgctatcatctgtcctgtttgcattgctttggggtatgtggtatgttcatttttatgtgttttgagaacttttcaaatttccgtcttaatttctttattgacccattgatttttcaggaacaccttgtttgatttccatgtgttttcatagtttacgaagttgatttcattactaaattgtacttttatttcattgtggtaataaaagatatttaatatgattttgattttttgaaatttgttgaaacttgttttgtaaattaatatatcatctatcttggagaatgttccatatgctgatgagaagaatctatattctatagcaattaaataaagaattttgtaaatgtctgttagatccattgggtctagagtgcagttaaactccattatttatttgttgattttctgtctgatgatttgtcctttgatgaaagtggagtatttaagtcctctactattattttattgcattttatctctcccttcggatctattaatatttgttttatatatgtgtgtatgtatgtatgtatacatatttacgacaattgttatgtcttcttgctgaattgacccctttatcactatataataaacttttttgcttctttttacagatttgacttggtctgttttattttgttgttgttgttgttgtttgttttttgttttgttttgttttgtttttagatggaacctcactctgtcacgcaggctggagtgcagcggcacgatctcggctcactgcagcctctacctcccaggttcaagcgattttcctgcctcggcctcccgagtagctatgactacaggcatgtgccaccatgcccggctaatttttgttgttgttatggttgtatttttagtagagatggggtttcaccatgttagccaggatggtctcaatctcctgacctcgagatctgc

SEQ ID NO: 96207 - DNA, 461556 bp, Homo sapiens
  misc_feature (1)...(461556): n = A,T,C or G
ggcagccctctgggttgtacaacctgcagcccacgcacgccgagagccaccagcgtggagtcaggatgaggagtcctcctcccacctggtgtgggctggagtcccaggagcgggtgctggagtgggatagcgggggatcagctcatctgaagccctggttgtgggtgagtgcgtgcacacggatgtgcgtgcctgcgcatgtgcgtggcgagggaatgcgcccttgtggaatctcccctagggcaacctggcagtgtgaggctgacccttgccccaaacctcctgttctcgggcgtgacatcagtccccagctgggctgtgaaatgagtcccagtcgaatccttccctacacctacttgaacttacgtccctcattgacactttcagagctgaccctgggtaagcggccctcttattcggcagacctcgccttactcaaatgatttttggcctccccaggatttgccctgatacattgcttcggctgcctgcaggggtgggctctcctagttctctgaagggtcagaggatcgagaaggcgccgtgtgggaaccacctggaacagggcctggactgtcacgcatggtgcttgagaagggagagggcagctgtcacctttaacacccacccaccaccttatttccagatggcacccagcacccttctacgtactgctctactggcacctgcgcagacagccaaaagtcaccgggagctgcagcgttccgttttggagcaaaagcgagatcatggagttgaaagggactgattttcactttcttgcctggctcctaggctcactcaaagggcacgtttcaaagaggctctctggaacgaggagccttctgtggagggacctgctccatgggactttaagaagggggtggtgggctgttttgggggaagatgagtgtatgccacaccctccacaagccatttggctggctcatcccaacgtgttgcagaggcggctggcccggggcagggaggctcattctggccatccctgggttgcttgtggggctacttttctggccatgatgacccatgatttattatgaccccaagcacgacctcttagacttgggaagtgtggttcctccaaagggatcagagaatagtgacagagtaaatccaagaacgctgtagaaggaagacacttctttaggcctcttagagttaactgcttcctattcaacctggaattagttcacggaccctgctgtctttggtaatacctcggtaattttccttaataattgtaacaactgtttcaccttgttttcctcaaatattaggctgttatttcaaccaagtgtgttttggactttaaccagagactatggcacaaattctgaagtcaggtttatttattttttattttttaattttttccagctgtgggctggctctggctcagccatctgaaaataagttatttatatatatgtgtgtagccatatagatatactcatccacatatacgaagaccacttccaagtcttttttagtttgttgcatgtgaccccacagaattccttggacccagctgaccagggtttgacacccacttcgtgtgatctggccagacccagctactccaagcccctctcctcacagggaaaatggcaaaaagcagtgtgtaaatgtcttatcagggctctgtatacattagatgctcaataaagctctcatttggggaagctggataacagaagtggaaagaaacagagggacctggttcacttccttgtgaaataaaaaaagaggaagggagggaagcaaagaaaggagaggggaagggggagaaggtaggatggtgatgagtgaattatgccagcttcctgtccttgggtaagttatttatttaacacctttgaggttccatgtttttatctataaaatgaagacaataacccctacttcatttagttgtttcgaggattacacaaggcgatgggtgcaccccacacccgatttctagttagtgtttgtactggacctgcacgtaagcaccgtagatgcataaaaaaaggcaaaggttgtattttaattttttcgagcaccaatgaattagctatgatgccattaatagaatgagatgtcctattaccattagatgatgttcttaacattcacattaggaactgtgggacaggctggtccccatgaactggggcaggctctgggatagttgtatttataggcctgagcaagaggcaaaccaaatgcagtcgtccctccggcaagtcagccgcaactccaagagcgtggagctgtcaggaactgaaacccagtcagaggcaaaagtgaaccacgctgctctgatttccttgcctgtgggaaagcaggggccggggcgaataaacaggtcagtgggttgtttcttctccagcactgctcagagcctgaagtcctgccgagagcttaagcaagaccagcgtggggggtggggaacccccacaaatacatcgcatctcttatccgttaaaattcaagatgactcatcattttgtcttcctggtaatccagacagggtcacttttccaaaggccaaattcattggcaggactttttaacagggacattctgactttttagaaaaaggccaaagtcaacatcagaaaatcttttttctggtctgcggtaataatagccactgtttgtcaaatgttactgtgtgccaagcactgcacatggtgctctaggtacttttcttatttaattctcacaaccccgggaggcagatatttattcccattttatagatgaggataacaaaactcagattaagtaaagacagacattggggccagctcactccagcagaggctcccacgatgaccctccctgctcctcccaactctgcgtccagtgacctcacattggtggcctgcagtccatcatggggggagtatttacaccatagaaattggcaaattgtacaaaccaaggtccttctctttttttcctctctcatcctcaacttcatattctttctagttcatgtctccacaagaaaatgagctttaatagagcatcatttgaggctgggcgtggtggctcctgcctgtaatctcagcactttgggaggccgaggtgggcggatcacctgaggtcaggagttcaagaccagcccagccaacatggtgaaacctcgtctctactaaaaatacaaaaattagccgggcgtggtggattacagccgtgtgcctgtaatcccagctactcgggaggctgaggcaggagaatcccttgaacctgggagacggaggtcgcagtgagccgagatggtgccactgcactccagcctaggcgacagagccagagtccctctcaataaaacaaaacaaaaaaaaagggtcatttggctgtaggcgatgggtcctcaggaagccgggctgctggaagaagctgagcattggctaaccagggtcccttgcccctccttctcggggcctcacagatgcttgatcatatccaagtattgctggtaaacacgtgtgagtccttttcctcatcagtgctaagcaagagagattcaactgaaattacaagggctgagtaagccggagacaggatttactaagtattaataatatgctgtcacatatggttcttttcatcttcaaagcattttatagccatttactaattagtcttgggctgccctctgtgtgcaggtacaatgctcgatgacaggctgaaccggcaggaagtatttacaaatatacaggtgaccttcactcgtttacaggcgccaccggcttctgttgctgttgcggggtaaagataaaatcacgcaaaccctggtgtttgagtccctggttctggaaacatacagtggtgactgtcaccttgtgctgaatcccctctaagaaaaccagcccaaatcctcccctgtggcaaggaagctgaaagtcttttaaaaataatcataaatttccatcttcacaaacctatataacgtccatcatccttcactgggaaataaaaaaataagcttcagtttgttcacgagagtatcgacacacgtgagaattgttgctggaggggagccaagagcctggattgggtcttggctccggccctgaccggctggtgatcgtgggtaactcacttaacttctctcatcttctgtttcctcatctgtggaacaaaagcaaccctattcagttgctcacagcccaggtctgctgtaaagctgtgtgagctaatgtgtgtggcaaaacttctgagttagactgtgtgcttcgctgatgggcagggtctcattcgttttctgggtctgtgggcccccaggggctggcaggggcaggaggatgacattcccagaccacactgcccactactggctgctgtcactgctgaatgcttatttgaaatgctgaggggacgaccagtccacaggacctcaccccctcccacagtgccaaccaccatctgctagaagtggaannnnnnnnnnnnnnnnnnnnattggtcagcaaacaacagggagaaacgaacgtggtgatggcgtcagttcatgcctcaaagactgcagagctgggggaaagaagtgaatgtgctggaatattctggcagagtgaaatttcttggtctgtgcacagtagagcccaatccgtacccctccatcaggggagggtgaccctagcaatcctaagtgaccatgccatggcaccttagtgggggatggaggggacatggggcatagcacacagctgccctgagtagaggggcaccttcttgtgggcactcagcgggtcagggtcagaagcagtgccagtgtggtcagctggcttagtgggtcatgatcacttgctcagtagaatcgctgggggagttttatcaaaatctagaaggctaagctccagctagtgagattccaagtcaacaggcctgcagtgggaactaccagagcagtagttcctaaaaaaatctccccgggtgatctgatgagctgagcccacaatccagtccagccccctcctagtattaatattatggagaggaagggacttactcaaggccacatagccagttaatggcagggctgggatatggacataggacactggactgttgttcttgtcctgggaattcccaaagtttcagggtagggggcatagtacccacacggtgaaaaaacccagagttgggcaggcctccagctgacaggcaagatgggaggtctgttccagctgatctccagcctcctgagaacattcctgggtgccagagaacacaggaagcagaggcacgacttctcctcaccagtcttcacaagggcccagggatggttctcttttgcgctcacctggtaaaaatgggctccaatagccacgaggggaactaagggaccaggtgagaggccctgtaaaatcatgtgtgtgtcctgcaggaggggccagtggcttcgccttggaatgggaaggccagagggtgtcaggtcgagcacccaggccagctcttgccctcacctctgtgggtggtgcgtgggccctgcttccctgtgtggaaggccatcaggacaggaccatgctaaaccaaactgtaaacctggtgatatggccaagccgacggtagccatcttgtgtttcagctaagcgagtgtgtgatggtacaaggaggcctggctccaagttcccaggtttgttcctaatttgctgtttctaatttgcatgtttccttaactcttgggccttagttctgtcctctgtacactgaagggagtaacggggtagaaacgagatgacttctgaagacccttctggctgtgatgatcagtaagttcagggaagatgtcgcctgctcagggtatcttccccagctctgttcctggctggctgcacaactgccagtccccaagcccagaaagcagacacattcctctgataaaccatgacacccaagctttgtctttgtgtataattcacacagtgctgcagaggcccagaggggatggagaggggagagccggaaggacagagccgttggtgcactcaccaaactttaatgactgcctactgtgtggggctggcctgggaacaaggtgtccacacagggggctggaggggtatggatggcagcgggtggggctgtgtgtgctagaggccatttgttattgagcaacagccttaggtcaggctggatgagtggctgaaacccagcaggttggtcacattgactcaggtaactccttctcgccgtgaaggactgccccagataggaaatgcttgggtatgaaacacacacatgcacgcacagagggaagacactagtttcagaggaagaacagcgaggggcatttaatcttagaacttaagaggtctcagagacaaaggctttggaagaaaggcgtgggcattcctgaggctttactttccccggaaaattactgcaccataatttgtgagtttatttcttccaactaagaaatagaggcaakaaagagggagtaacccgaagtgaagggctctaggatccagggaccaccagccagctcaagttggatttcagcagtcggggctgcctggggcgtgcaaaagctgctgtgtgagcaaaacgctgccgtgaagacattccaggcggcttccaggaagcggctgtatgtgctgacacgcatgtggacaggcagtctggctggccacctctcaagactggtgtttcctagagctttccattggcaaatgctgcctcctggaactgagggacaaaggttttgaaataagccctggtgggaaagaaggggagaaaaaaaattgtggttagcacaaacaacttgaaacaaagtgcaactgggagctttcaagctaactcagaacagttgttatttattgttcatgcatcttgggttggatttgccttctctgctgaggcaaagccctccggatttttccgaggagatgcatgcagttcactactgtgacatctctcaggaatattcaaagggcctgtacgtgcaccctcctggctgccaattcctatgagatatctgcacttaggtccggctgccttttttcaggacaaagacaagggcctggtccaagctacaagacagtgtgtgtgcaattgaaccacgcagtcatttagtgatctagagtatcaggaaggttgcattttccactcagttggacctttgacttcataaagacaaagagggtctaataagttttttaacacatttgatttttttagagacaggacctcactctgtgagccaggctggagttcagtggtccaaccacagcacactgtaactctgacctccaggactcaagtgatcctactgcctcagccacccaagtagttaggactataggtgtgtgctaccatgtcagcaattgttttttcattttttcayagagacagggtcttgctacattacccagactggtctcaaactcctggcctcaagggatcctcctgcctcggcctcccaaagtgctgggattataggcctgagccaccacacccagccctaataatttctaaatgattcatgggctccatttatttccaaacgcacatgcagtctggtctactggaaagaaagctaggctgggtgttaagagaacatttcccagtcagtggaagaggggtggcaggaccgggggcagcccrtttggcctttccggcatccaggtttctaatctgtggaagcagggccacgttctacctcagatgtgcacccgccgagcccacactgtgtcaggcactgtacaaggcatcaggggtggcggggtgacccagccatgggatcacgccgtgtgggagaatgcagtgtggaggagacggacacatgggtaaccccacatcagggcaccaatggcagtcccgcgggccacagtccatgcagcagggaaggggcagtggaggggcatttccagcagcagcttgctgtcagctgagaggtgagggagaaaagtgaggggaggagaagggaggggctgcagaggaaggaggtgggcacccgtgctcctggtcaccaggcttgccttctagccctgccccaccgacacccacacaatcacagtgacaccttacgtgtccagatatctcacctcagagcaatggcaagaaccaggcagggccaccaagacctgtcaccctcagcactgcaaaggtctcatcgcctcacccacagggaacctcccacagtccatttcatttaggatctggtcctactgagcctggctctaccagctgccagctcccaggagatcagaagcagcaaatctggagtggaggagctaacccaagggtaggaggcagattcacagcagcagtgagaagagaacagaaaactgctcaggaagcacgagcactcaccggggatcctgtgccatagggcaaagagccccacgcaatctgacaggccctggagttgtctctggagcagagcaaatgcagcggctggtgccaccggctgcccgcccccttcaagtcaactgcagccctctttccaatctggccttggaatgctccagctctttctcagtgctggcctccaccatggcctctgcagcactgaaacgtcagctcctctctctggaagctctctttccctgtgacttctgtgacatgtggtgccacagctgtcctgcctctctctacctctccctgcccctccttcggcactcccaggcgccatcatccttggggtcacacagagcaaggtgggaactcctggtcctgcagcaccgctagcccagccctccctcccctcaaacttccagtcccacgtctccaaccacctgtgggacaccctacctgtcactctgtaactcaaactagtgttccaaatggatgttttcatcacttttatgtatctgaaaatgctctgaccaatttggttttctgtaacagaaccttcagtttccttccgaaccagtttccattctccctaaacccctacggtgaattcatcctcaaggttcctgccgctaagtccctccatccgtagtgactcccatagctcctgtcttatctttcgatggcactgctgcagaagctgcttctcccctggacatgaggcctcctttgcctatgtttgcagctacactgattctcttacagtgtgagtctctgtccctttcctgaccaagaccttaatgtcctccaaactctcagcctggcattcaatgactctatctggctccaagtcattaggaagaaaatctattctgttcctctatcacattttttgagatcatgcgaccctttgagaagctaagaaagtgaaggatcctctcctcagagaaactgcaggtaagacgccccacagcaacccggggatgtcacagacccccctgagctggccacggtccaggatacgagccctggatctactgcctctcccttcttctcatttgactacttgctcttcctcacacatgccatttgccacctctgggcttattcatgctcaggacaaatactcctgcttccatcaagtctcccctggtccccaggaggtcatctccctgcacactgtccgtgcttcttctggggcacttgtcccatgtgcacaggtcttatctgccagcccctggaaagcgggagcacatcctgctcccagtgaccactaggcctggctcagtgtagaaagcacttggtgatgggctgtggctttaatgtaactaatgatgaccacgagcttgcaagaagcagttacagtatgtccattacaagctgtttaagaaggcgggagaggctgggcgcagtggctcatgcctgtaatcccagcacttttggaggccgaggcgggtgtatcacccaaggtcaggagttcaagaccagcctggccaacatggcgaaaccccgtctctactaaaaatataaaaattagccgggtgtggtggtgggcgcttgtagtcccagctacttgggaagctgaggcaggagaatcgcttgaacccgggaggcggaggttgcagtgagccaagatcacgtccgcaccatggcactccagcctgggcggcagagccagactctgtctcaaaaaaaaaaaaaaaaaaaaaagaaggtgggagagacagcagccccagaaagagaacaggtacaatatttaggtactaaggaagaacactttagtccattctcaaatttcaaactttgccaacagttagtaagaaaaagcaccctcttccatccacttgtgatcagcacagccctgagccagccaaaccgccaccttctctggcactcaggacctcaaagcccttatccattaacggcaccatgccacagtcgccacagtcacccttaatgcaaaaggggtgctgtggtgtgacagagctccagacctaggcaaggccgggcagggcaggagaagccctgggctctgttcccttacgaacagtaggggtgataaggccacctgatgccacactcgcatgggacagtgtgtgggaggagacagtcaactgttggctgccacccagacgtgagggccacttattccttccatatgtttcacctgctgctatttccccagcaacatggaagtgcggccggagagagccttgtggccccgcttctccagagggtctgagatcgacaggctgccaccaacctctgctgcatggactctggcctgatgtgcactgtggagtctggcccatcccagtaccactttcagggagggctgaatgttccctaagttagaggtgaggacgtcaccttccctgaccttacagctacgaacatcaaggggagaggctgcagctgagctgcactatagcccccacaggtgcctgatgagcagatggtgctggagccactgctgccctggacgctggcctgagctgggcaggggtcgggtccggggagccctccacttacctccccaggcccagagtcacactgggtcccgaggcaagcctcatcagcttagtctttccttgtaaacttctaggggaaggggctacaacattgcaagctccttacacagaagggagcacrttttaaaggcaagcttttttctttttagaaagttctaaagtttcctgttctgtcctgggctttccctgccagggccaactgcgtgctgccaaggggaagcgtggcgagggctatttaaaggcatgatgctaccagctgttttcggcgagtgcctctcaacttggatcctcattaagttagttaacggagggggaggagggggaaagggaaaatgacaactggctcccacccatttatagattttttaaaacgctgttttcatttatttcactttttatcagagaaaatggagagctgcccagagtacagattgctaatggcaagaggtatctgtcatctttgaaaaaacctttgacccagagacaaagtatgtagtaagctttaaaagtgtaagcgtgttctaggggatagtgaagtcttctcacctccccattaactggccaagtggggcccacaggagagggccctgagtgtcaagctcctcactgaatgcacactgtaagggaatctatttttagatggcattagagctcaatatgcctgagggcaaaatgaggttcagtccctcttcactgatctcagtctctctgctcagggtttcataaaattacaactcggtccaacccaggagtctcagttaggagaagaaaacgtaaggactgggtaggtttcccatgaattcagagcagaagcagggctggcccaggcttcagctcacaggcatggcatggtggagggaactgaatcaggagtcagggggtctacttttgtgggccttgggcccagggtaaatctcttctgggtttcagctccctcacctacaaagcagggtgccataactgagggtcctaaggccggtgggctgtagaaggtgagggtagcctgtgcggggcaggctctggagccaggcggactgggctcgaggcctggccacactccttactcgttgatcatgagggcaagtgactgcagcgttagtttcttcatctaaaaggcgggagtaactgcctaccttaaagggttcttgtgaggagtgaatgagatggtctgggtaagcgcttggcatggtacctggcataagagatgatcaatagatgtcaactattatcatgggtacccgctggggccaaggggaagaggctctgagtctgtggaaacagccagaagaacgcgtgtgtgccgaagcgggaaacctgtgagaggtctagggtccttgtcctcagttcagcctttcccgaggctccttggatcaggccctcccttctcactgatcacactgagctggcaatcgcaggcagagatggccaatctcaggcttggatactcagccaaagtcatgggacactgtgtgtcttttgcaatccagtctagagctgctcatggcatccttgtggcatcaaaggacaaattctgtagccagaggcacctccagcccttgcgtgtcttctgcccccaaacctaccaggtgtactccttgtgtgtggtgtgcagttttggtcagggcttgaccagggatgatgctgcagctcttcctagaagggtatttaggaatcacatggctccggctgccaagagcagggtgttggttggcctggtcctcaaacagctctccttctgtccaggacaacatgcatcgtcaaggggaggcagtgggggaagtggaaagagcactgcactaggaggcacaggactcacagctctagcccgggccctggctcattgtgtcatccagaactgggactccatttcctcacctgtaacaggatgatttctacttaatgatcttatgaccacccagttatggtctgagatatcatccatgtgatcttgagcaagccacttaacccttttgtgtcctgattcttcatctattaaattcagacactagcacctcttttttctcttttttaaaaaaagttccgggatccacgtgcaggacgttaggtttactacataataaaagtgtgccatggtggtttgctgcacctctcaacccagcgcctacgtattaagccctgcaggcattagctatttatcctgatgccccccgatcaacaggccccagtgtgtgatgttcccctccctgtgtccatgtgttctcattgttcagctcccacttataagagacaacatgtgtttggttttctgttccggtgttagtttgctgaggataatggcttatagctccatccatgtccctgcaaaagacatgatctccttgctttttatggctgcatagtattccatggtgtatatgcaccacattttctttatccagtctatcactgatggactgggttgattccatgtctttgctatggtgaatagtgctgcagtgaacatatgcgtgcatgtatctttataacagaatgatttatattcctttgggtatatgcccagtaatgggattgctgggtcaaatgatatttctggttctaggtctttgaggaattgccatactgtcttccacaatggccaaactaatttacattcccaccaacagtgtaaaagcgttcctacttctccacagccttgctggcatctattgtttcttgactttttaataatcgccattctgattggcatgagatggtatctcattgtggttttgatttgggttttctctaatgatcagtgatgttgagattttttcatatatttcttggctgcataaatgtcttcttttgagaagtgtctgttcatgtcctttgcccactttttaatggagttgtttttttcctataaatttgtttaagttccttgtagattttggatattagacctttgtcagatggatagattgcaaaatttttctcccattgtgtaggttgtctgttcattttgaagacagtttcttttgctgtgcagaagctctttagtttaattagatcccatttgtcaatttttgcttttgttgcaattcttttgacgtttttgtcatgaaatctttgcctgtgcctatttcctgagtggtattgcctagattttcttctagggtttttatagttttggttttatatttaagtctttaatccatcttgagttaatttttgtatgaggtgtaaggagasggtccagtttcaaatttctgcgtatggctagccagttttcccagcaccatttattgaatagggaatcctttccccactgcttgtttttgtcaggtttgttgaaaatcagatggttgtagatgtgcggccttatttctgagatgtctatcctgttccactggtttgtgtctgtttttgtaccagtaccatgccgttttggttactgtagtaaagtctgaagtcacgtgatgcctccaactttgttctttttgcttaggattgtcttggctatacgggctcttttttagttccacatgaattttaatgtagaatttttaaaaaaattctgtgaagaatgtccatggtagtttaatgggaaaagcattgaatctataaattgctttgggaagtatggctattttcatgatactaattcttcctatccatgagcttggaatgtttttccatttgtttgtgtcctctctgacttccttgagcagtggtttgtagttctccttgaagaggtccttcacataccttgtaagttgtattcctaggtatttcattctctttgtagcaactgtgaatgggagttcattcatgatttggctctctgcttgtctactgttggtgtataagaatgcctgtgatttttgcacattgattttgtatcctgagactttgctgaagttgcttgtcagcttaagaagcttttgggctgagacaatggggttttctagatataagatcatggcatctgcaaacacagaccatttgattaactctcttcctattgaataccctttatttctttctcttgccttatttctctggccagaacttccaatactatgttgaataggagtggtgagagagggcatccttgtcttgtgctggttttcaaggggaatgcttccagcttttgcctgttyggtatgatattggctgtgggtttgtcataaatggctcttattattttgaggtatgttccaccaatacctagtttattgagagtttttaacatgaaggaatgttgaattttattgaaggccttttctgcatctattgagataatcatgtggtttttgtctttacttctgtttatgtgatgaattacatttactgatttgcatatgttgaaccagccttgcatcctggggatgaagctgacttgattgtggtggataagctttttgatgtgctgctggattcagtctgccagtattttattgaggatttttacactgatgttcatcaggggtattggcctgacattttctttttttgttgtatctctgccaggttttggtatcaggataatgctggtctcataaagtgagttagggagaagtccctccttttcaattgtttggaatagtttcagaagaaacggtaccagatcctctttgtacctctggtagaattcagctgtaaattcatctggtcctgggctttttttggttggtaggctatttattactgcctcaatttcagaacttgttattggtctattcagggattcaacttctttctggttcagtcttgggagggtgtatgtgtccaggaatttatccatttcatctagattttctagcttatttgcacagaggtgtttatatagtattctctgatggttgtttgtatttctgtggggtcagtggtgatagcccctttatcattttttattgactagcacctcttttcaaggaggttgtgaggagaatggaaatgtgtatcaagtaccaagcccagggccccacacaaatgcaagtttcagtaggaggtggyaatgctgcaaaggtggtgggagtagttgggttattattggatcgtttccatctgcatagttttatacaaatggggtagggttagtgaacgctgcagagccccgagcaaaaagtgccatagacagttttgtcgggggacatgaaggcctgttcctctcggccacccctctgccctctagctcaggaagcataagttatcaggggtaatgcctggaaaatgacataatggttgggttctagagaaggggaaatcaggagactgaagaaagttaagacagggagctatcagggaaatgctcagaggccttggggttgaggccagtaggaaactttgttcaacgaagtctcatctaaagggttctttcctactggaattacaatgctttattgattcaatagatcttttcaaaaggataaaaatccataaaatagacgtctgacaaactgaatcaatatagctttaaataaatgaaaacaaaacacagaatatacaacccaaagaggttggggactggcagcggggagagagcacctaaggcagttaagctttgcaaaggtggtgctcacaacactactgggtgtggcaggggtcatgctccccattttgcaggagagaaaacagaagcttagcaagtttagttaagatacctgccaatktcactccaaccccagtgccactagagcccggccccgtggacgagaccctgtggtcttgttgctgttagcctccttcacttggaactttttatttggcaagagcctaacagttgccttcttccaaaacaggacttgaattctggaattcaaacatgcttttctttgggtaattgtaagatgagcctcatgatgtttgctagagtcaggccaatgtggtggtagggtggggtgtggtaggagaagtggttcagggacacagccctcactgtcaggaaatcaagggcataaatcaagtcagaggtcatttttgcaaatagaggcaagttccaacatctaaggctcactgctttttccagttttcttctgcagctgtgacttcaactggcacatgtttttaatcagtcatatgaaaaccgattgtggtctgaaaatcaaagcagtcctgtaaatagtgtaagacaagtcctgctaatcatgcctcgtggtcttgccttgtcctcattgtcctgaaccgccactgtaaattctgactcacttggggttactcgcctcgtgtcaaagggcctcgtgtcaaagggtcatcctcacaacaggatggctacaaagagacctgcttctgtttcaatgtccttcaccccaaaccctccaaaggcccctgtgacaactgccatccaattctgggtgccttggtgagtgagtgactggcacgatgggagcttgttttgtaattatgccccgggcgatggcagcctggctctcgggtgtgggctttaggaacaaacaagtgcttgtaactggttcatgtacacagtcaatcttgctaaatgcgccaacccctgagcatgcctggtctgttttcagggggtctaagcttgcaaaacaaggaaattaacaaacttgagatgcaaaggcttgatatcgcagtgggaacacagtaccacatgctcacagcttcaggcagaggcccttgccctcagctggaatcaatctcccctctactcgattccacagcatgccgggcctccaacctcaggctgggctatgtctgccttgcgtttgagatatttagattggtgtctagactacaatttatacagctcggcctcctcgcctgtgagaaggctgactgtggtctcagtatgtgttgaattaaatcaaatgccgttttaggaggacttcaacaacaactgactgagatccatttctagacatcaaagtattgggatgaattctggttcctgctaaatcacagggtatttttaaatacttaccaaagtgatcaaaattactgagcagttctctctccctctgaggccctccaaggaggccctctggagcttggccagttcctctggggctggagcagcttgcagccagtttttgcaactgcaaaggccaggacttgctcccacgggctgcaggcatctctgctcccttggcatcccctggtgcagcagatgagaaggaggaggagaagggagggccagctggctaaatggagggagggacagggtagtcctaatgggctcctgagcctccaccggccatgggaccagcttctttctctggcgttcatcacagatgtatgcacgcatctacacataccaaccattctctcacaccctggaagaagctccctgagggcaaagcccatgggtcgtattcatccatctttgcatccccagcctggagcatagtgtccaacactcaccagctcaataaatatttctcaaatgcaagcatttggcttacttaagatatactttagaatgatagaatgttgtaatagaaggaaaaaggaaactgccgaggtcaaacattacarggaaggggaaggggagactaagggcgggaggttaggatggttcctgtgacactgcstatcctaatggcacgttagcataggtcatccctgtaagtgcctagagggcagaatttggggatggttcacccttagtgcccttggtgctcaccctgtcagaagctcccagaagatgaatgtcaatttggtgctaaatgaatgcctgcctgcccagggggttgacctgaggccccagagctagtaggcggagcgtgagccagtcctctccatccccctccctctcagactgccgtgcccatcataacctgcttgatgagaggcaggaatggctgtgtggcactgagagaggctgggaagatgggtgcacctggctgggctggggctgggaacgaggccaggtggtgggtgtkgggggctaaggaatgtgctgctgcctggggcctgggaacccagagaagagccccagccctgggtttatcttgtctccccatctgcacctgcctggtgtgcccagatggtgagtcctctgctcactctgcccagggctgcaagagcaggcgctcagcacagaccatgatgtgctgatggccacgtggctgcctggggtggggtgcagggagctcaccacagtcccggccaggaggagggctactcacgcagctcacctgctgggaaaagtgggccgcctgtcggatggtggtgagtcaccaccaagctcacagattaccctccactttttagtcatcgaaaggggaaaaaccaaagggtgaccctsaaagaggaagtgcccagggacccagcagagctgaacctggaatgtgggtccaggccccaagtcacaccccagctggaacagtgctccgaggtttgtgcgcagcatggtcaggcatcagcctccacagcaaagtgcaggactcccaaaggagggcctcaggaacacttaggagatcaactccttgaggcctctaaccttcccctcccctgagtctctctagggctttgaagtgttatttgcctggttgtaagttcastttcttccaccagatctcagcatccagaggccagagctcatggcttccacaggtgctcaggcccctgcatgctggcttttggacacagcttttggtcacccaacactctgggacattcacccccctggctgggtgtttgaggatgtgggggaggggcagcaagatggccatggtccctcctctcttcacccttatccccctgacagctgaaatcacaccgcagacacctggctctctgggctttcagacagaaaagcagcaattcccaaagaagaaactactcaatgggagagggtgtccaagctccactctccctgctggggtacagtggccttctggagacaatggcctttggtaacaagagtaattctcacaacaggaacttcaggtgggctctgctggggtagggtgtggggaagttccatgcaggctggcagatgacagaacgtctggcaggagggggccttacaagtcttctgtaatcatgcagtagagaggctgggggcaagcacaggaggaggagatgcatctgctctgctgggctgcagggatcactccacactgcaccagctcgggccctgcacatgctgacagcaggtagccctgcggccccaggcttccgttacagaaagggagggagggaaggaaaggaagggcatatatgcaacgtggatgaatgatatccacacatggtgtaaagaaggcttgttcaaacagtggatcacaaaatccatttagtgggttctgagcagcattaaaataaagtgaaataaaatcagagtgcactgtatgtggcacttttgttttagttatatatactggattcaaatgtaaaatatcttgtagattgtggttaaaaaaaaaagtctggaagccatgagtataaggaaagggaggtgcctactacatgccagatatcatgctacttattttcatgtgtattattttatatttactccttctaacaggcttactaccaggcaggtgattctatttttgccaaaaataaatctacgatcagagatggaaagtaagttttcttttcttttctttcttgagacaaggtctctctctgtctgcactctgtcacccaggctggagtgtggtggtgcaatcttggctcactgcagcctcgacctccaaggctcaagtgatcctcctgcctcagcctcccgagtagctaggactacaggagtgcactaccacgcccagctaattaattttttttttttttgtagagatggggtcttgctatgttacgggtctcactatgttgcccaggctggtctcaaactcctgagctcaagtgatcctcctgcctcagcctcccaaagttctgaaattataggtgtgagccaccatgcctggcccaaagtaacttttctaagatcacacagctaataggtggcaatgctagttatgaatccagagctgcttgactccaaagggcacattctttccatgccaccatgatttccagtggcaagtgtactgtccactgagtcgggagccttgggttctgtccctggctctgctatatcgtggtgaatcactgctctgttttctcatctatgcagtaagggagcaagataaataatttctaaaattttttgatttcgtgttctctcccatcccaaacctcattgtggctgtattttagtctcctccattaaacttttcctagagctgccaacagctcagtaatgaatttcgagggctacttactgccaacccccattgcacctacatttgttctacaaaaccccctagatggccctccctctggtagctctgtgtgtctacaggtattgactggtgctgttcactctcatcttgggatctgcatcgtgtagcttttcagcagaattatgactatgataacaagagacaaaagggatgaccttgacctccctctcacgggcccatgtggttcttggaagtgctggggcaccctaatgaagaatgcaggctactctgagtgtctgggggaaggaaaagaagttcaagaaggagggtgtgtgcagtccacctaggtgacatgtgagggaccacaaatgttctctaaataacgagccccagaagagcaaaggaagcccagaaggttcctgtaacataaaggtcatcttaaaactccctagggttgatgaggggcaatatctctgtgacttgctgtcacaggggaggtaacatcatcccgcatagtcaaactgtggacttggcacgggagctttagctgtgattccagctctgcttttctctgctacgctgctttggagaagccacttcacctctctgtaccccagagatgcctcatctgcaaagtgaggggatggtttctgaggtcactgctcagtctaatatactattatccattattattatttctgctttggtattaatccaaccacttagccagagacagtttcttaagtggaagcagtaatgtaacaaatgacctctcccagcgcttagctagaggggttaagaggcaagagccttcacaagcatcatcagaggtgctgcacgggtctgagccgtctatctcccctttgtctccagatctgacttaggacctcaagaatgctggccagtatccatcctgctcatgttccttccacccttcaaatcagcagacaactaaatattcacacactcatgggccactcctgtgctagtaatgggctggttcctgcaggggtaagggactgcatttgggcagggccctggccctcaggggacacacagtcacttgactcccagagcagagagagctgcgtgctcaccctggatgagagtggggggctctgctttcacagccacgggcagagccctccttggcctgccgcttcttactgctattgctttggaagagcaggagcaaaattcctgccttgggctggctttcttttctgctcagaggtatgtggggatattatccagcaggccagacgtctagcccctttaatgacaataatgataatttacatttatacaaggcctttcattgggggattttaattgtatcacaaacaataattaattcccctttgcaagtctggcagtcagctaagcaggagcccctttactctgcaggtgaagggtgctttcctgggcctgcaacatgctgggggtctcccacctacctgacacctacccaccctcaaggcctggcctaagcatcggggcctgcggccgccaaccacagcccatgactgcttgtcctgcctctgaagctccacaacacgaactgttgagccactcatttggtgctaaccagagaaccttgctgttgggcgagacctcaggatcttgttcaaggcagggcttggcccagcagcacttctggggggtgatcctcaccctgctggaacaccttgagagcgcgttgctcaaaggcgcctctaagagttacagggttcttctctctcccgaactggaatctgtccccttgaaacttctgcccatggatcccagttctgctctctggaatgaagcaatcttacataaactgtctggggttgctggttgatgtttctggttcgtaagttgtctacttctgtggtcacccttgggcggagcttggtggctcatacttcaccgaagttcagggacacttgtgmaccgaatggtaggggcagctggaagctccatcactggggagtgcctagctttacatgcagcactccagactactctgccccagtctcagtggtataaacactggaggcttctgagttcatttcactggggctgcacctcagtgacacagaagtaccctaattttctgttgaatgactgaatgaacagccttccttcctaaggatctattattcttaagttcatgcaaccactgtcaattgcagggacttgtttttggagaccaagccagacaataatcgatctagttttttttttttttaaactcactttatcagaataaatatttggtgctaaacttgagaagcagatgtatcaatgctgagctgggaactgacccgggacaaggaactccacaatcctcctcctctccaagcagtgagaggcaaaggtggggcagaggggcaaatgaaatcctttgctaagtttatttttaaaaagctagatcttctggggaaaccaacactccctagagtgatttctgggtccctgctggtttgctttttgcctgaaaagacaccggccctccctctgccaagagcacattgtttgggtgagatttttctcacagtggcttaccatggaaggaatttcgagcatgcattaaaggctgttgttttcctaaaacctgcgcagtatgaacaagaggtttggctagtggtgacacagcctcattctgcttagatttcacacgattcctattttctggcctagaatcaggggtgatcatttttggcttgggtttggcctgggtcatagatctgagggatgcttgggaaaagaaacatgggttagagatggaacctcctggtgtcattctgtggcaagaggaacacgtggcaatcattccctatctgattaagtgggaagaacatggattttcgagtaagagaaaactgaatttaaatgtggatctattacttactagctgtgtgtctggaaaagcccccaagtctctgtttctctccagtgaccagttgttatgaggcaacagtgccaggcacatggtaagaactcaagccttggtttccttcctgcccacccctccactgccatcatacagctacggacacacacacattgaggacctcctgtttcacgttaactcaacaaacagttattgaacagctcttattgacaagggcctggacctcctgggaacactgtccaactagtgtctggtaccaataggtatatatataacatttgttgaataagtgaattaactaacttgatacttcttattttatagtttataatgtgctttcaaaataacctcattttaatccaagcaacaatcatgtgtatgaaatcgatcccattactctactccccccatatacatgaaggagcaggcttggagaggagtaacttgaccaaggccaggcacatgataaaggcagagcgggacttggaagctgcaagcccgtgtcctgatgacagcacactgccagccctggagggtcttcctgccttctgcagccactgagggctaaggctgagcaggaagggcaaggctctgggtgcacccatgttccactagaaggcaccccgctgagtgatgctgccaacctatgcctggccacggcaggctgcagctaaatgtgaggacatcaccatgggcctggcaacgtggagtagtaatgaaattggagacatctgccagcagtcgggtttctttctctcaggccctgggcccccgtcctgccctgatgtgcacagatgtttccaggttgacttcactgggctcccactgcccttctcagagtgtgcgacagcgctgacatgcaggtactgtcctttaccttcctgtcacatccttctaggtcacagagaagaagcgatgggcgcaggactctaacttttccttagcatggtgctctgcacatttgggtctcacaacaggaacaaacttcattccttcttgttcccagtaggctcttaaaaccaagtaaggggacaggaagcagacactgggtcctgggctgctgtcggctcgctgcctctttcttcccactcctctagcctctgagctgctgggaaccgctgatagatgcagaattaaaagggtaggacaggagtctttcaaagtttgcccatatggctggctcaaatacaatttccagcatgaattgagyggtggaaatcggatctgaccacaacactgcagcacccacagagttcatcacagtcttctccaggccattctgacaacactccctgccgagggtgggtgtcccggtggaatgccgccacagcacacactgcgcagtggggaacccagtgcctcgggagtgaggtcacttcccccaccgtgagcctgtctattctggacctctgagcacatttctctgtgctgcaagtgtattgcctttgaggttgaactgtgtggaaaatcatgtgcactccttgagctgagctgaagctggcaggaggagccaaggcttgggctctcctgcataagcacctggcctagggcagggcctacagcgtctgcggccagaggaccaactctctgctcccagcatggggcaccgatccttcagccctgacaccagccacacttgccttgcagtgttgctgaaggagacagggatgaagaggtgtgctggtggctagcctagtccgctgtgtcctcaaagaccaaggccaagcagagttaacctgttgttgtccagctagaaccctgagggaaccccacagacttctaacatgccaggtacaaggggcgcagggagctgtgcatttggaagtgcagcttctgccccgcacaaaggcatcaggccaagagagcaaacgggggctgaaattgagcctgtgctctgcgtgctaagctgtgtgctcactcagggacagaggcccagacaaagggacagcttctactttacctaaagctaactctgcaccaacccaaagggggagccttttctttgtttgcacaaaggttcttactggccaaggtgaccctgagaagtccattcagttctgtgtgttgggttccctattacacatctggtgcactaacatgggcatggggaacttcactgggacgcaattctataaattagaaccttgtttggatgggctttggagtaagaaagtgaagatttcttccttcctaatttgcatttttaaaggcatcttcagaacccattcttgttctcctggccacagcctactgcactgccccaccgcttagagttaatcttttccatcccattgcttaggctcagaaaggaaggcaaacacagacagcccaggggtgaggtggagtttgggcagccctacaggttctccaggacagcatttggctccctttcctgccatgtttattaagcagacgaatcagcattctcttccaggtgggcacaaatgggtgtcccacctcaaaccatgccactgaagacagtcagattaaaccatgcctacacagctgggatatcttttctccaaaactgggggacaccatgcataccagagccattagaccaataaacaaatacagacacacagcaaaatcaactccgtaaaaacacggcaaaataagccccgccctttgtaaagttcaacaatctcaaagcatgctttgttttgctaactactacaggatggaaagaggccctttccagttagcccctattccaggagctctttctattcaagaattgcctcaagttcaagagtcatagaacgctggatttgaaaaccctagagattatctagttcagggatcagcaaactctttctgtaaaggaccagataatcaatatttgcagcttccaagaccatacctgtattctattataacaattcaactctggccttggagtgataacagccatacatgatatgtaaatcaaagggtatggctgtgttccaataaaactttatttataaaaacaggcagctggatagctttgccctcaggctgttgttcgcccaacccttatctagtccagcccttccttgtacagaggagaagagatgaggtcgctccttcacagtcagggtcatttggaggtccacccaagaccaagacccgacttgcaaggcttggtgggaggaacagagatactactgccggcctcagggccaccaaggcagaggccaaaatcgctgcttggataactagagattgactaacacgtccaacttcaccagagaggaccaaaaagcaggtggaaaatcaggagttaaaatctatccacagtttaaatctacaggttaaaatcaaatgggattggaaagacaacctacatatcaagctcagcctgcagagatataaccatcggttacagcctcttaagtgtatgctgctagtgttcattcatcagttagactcaggcacaatcttaaaacgtctctggtgaagaaaaggctgggaaaaggggagaaacaggaactggaaagccactggcacttgtctgtgaacaatatgagaagaaaacagcaaattcatgttttccagtcagcagctagtcaaacctctaacagtacgtaagtggtcagagaggacaagccctctcatccagggctgagaacaggttgttttggctgtcaagcattttcaaaacaagttttcttggtctcatgacaggttgtggcaagaataagaaaataaaaagagtggaagatcccatgatcgctgccctgggcttccatgtgggctggccctgcctgcacagtcaggtttgccttcagtgttcagatgaagctggtcttagggttaataccaccttgccagtgacaccattgaacaaagtgattcctctaagaactctctggcagccagataatttttctagtctgggaggaataggtcaaagtcactcttaagcccaagggtgctattctgcttgaacctacgccctgctttgttttaatttttacctcatgttatgtggatgaattattcccctgaaaccaaggtgaaaagctatctgctctgagttggatttttccatctcaaccgcaggacgcttagtcagggtggggcaaagaaagcagtgaggaggcactaatggggacggccatgagccggctggtagagaaagtgccattagctcctagcagcagtggtcctgctcgctgttaggagaggagggtcaaagcataaagctgagcacggcagtgccgaaggacatgcagccaagtgggggtctgggggatactcatcaggtaatccagtgaaaatacccagaaaccaaccaacaagggtgccaagaatactcagatcccctgagctattactggagagcccaaagtagtagacagacacctagacctgaattcagactcaaaatctgtgaccttgggcagaattctcccttgtttcatttctaaagtgaagcagcgagattatctttctggcttcgatatccatgatccttggattgccagggcacagtgcactgaatctgttcccatcacgtgtgggtggctgtgtcaagtcactcacacacgcatctccccacaagggacaactcaagttcccgctgtgagcaatgttcctggaagaaacttgaagaggatgctctgccctgagacgtgctcgtattctatgagacatgttatcagaccacaaaggctgtcttcattctaccaattgactgtgggaatgttctgaagaaagcaaagaaaatcccccataaggcctttaagttggaggagggaaaggctgatgtgtgttcttgcccagacagagggggctgaggatatgtgaaggctggggtaagacattcttcccttgcttcacgcccaaactccaacccaaannnnnnnnnnnnnnnnnnnnttccactcccactcccactcccaaacatgcacagtgggacccattagatttgatgtctctacccaggaagtgatttgaaggccctgctcaaagcctgctgcgtggagcctttatcacccgagagacaaggctagcaggcaggtgagcctccttccccaaatatggggaacaggtttgttctggctgattcctgacctgctcctcaatacaggatgccttgttaaatctgaatgtcagataaatgactttttagtataagtatgtcctcaatactgcatggggcatacttacactaaattatttgttgtttatttgaaatttaagtgtaactggacatgttgcatttttaattgctaaatctggcaatcctaactctgaagatccagagtggggtctctaaaagccctggacatggaggcggcaaagaaggggtgaaagaacccaagccaaacattcctttatagtgttccatgagcatgacccttagtttttgactgtgtttattaatatttccaaggccaagaaggatctattatgatttacatatcaacaccaaagcagatcattataccaatatgtaatttgtaaactgacaaaaaacctggctgggtgaggcggcttatgcctgtaatccctgcactttgtgaggtcaagatgggaggattgattgagcccaggagttaaagaccagcctgggcaacatagtgagactccacctctaaaaaaaaaaataaaaaataaataaataaataaataaaaaatcagcccagtgctgttgcatggacctgtaatcctggttacttgggaggctgaggtgggaggattgcttgagcccaggaattcaagtctgcagtgagctatgattgtgccactgtactccagcctggcaacagagtgagactctgtctcgagaaaagaaaagaaaagaaaagaaaagaaaagaaaagaaaagaaaagaaaagaaaagaaaaaagaaccacacacacaaagaaataccttactgcctacagaaaaaaaaaagataaaatgttttagcatggtgaacaccaacaatgtgccaggcattttacaatcatttcagcatttaacactcacaatcctctgtgagaaagccaaggcccacagagatttaaaaacaaacaaacaaacaaacaaacaaaaaactctactagacagtggttgaacaaggacttgaattccagctggtctgattccagagggcatgttctctgtaccctgcatatctcctcccctctccttctctcccttcccttccccttttcccctcctctcccctctcctctccttccttccttccctcccccctttcccctcccctccccttccctttctttcttctctctccttctctctttcctttctttcttttccctccctccccaccttccttcttttctcttttcttttctttcctgccttatctactgctcttgtcttcagtggacaccggcatacctcctggaacccccatgcttcccatcttctgggcctttgtgcactctgtttcctctggaggagtgtcctcccctctctgcacatcaaatcctacccagcctccaatttcagcttcctgggtcccagtaaacagacataatcttctttcctcgactcctagtgctctttccctgcacgttgccaccttaaagagaagaatctatgtgcaattctcatccctcctctagttcaccgaaagcagggactgtatcttacacatcacttaacatcgtacctaacacctagtttgaattcaataaacatctgctgaatgaatgaatgggaaaagtgatctaggctagtgatctgggcaaaatctaattaaatgttagccactacaaatccacactggggcatgccaaacctgagtgtcaaccaaggcaaacagcctagaccctgcagttctaaacagagagctgagctcagctgcctggtgaatttgggataactcagaccttaatctgaggaaaagaggtggtgcagtatgaaaccaatctaaaagttgggaaagccaaggtatatgctcagttcctacactaagtgactctgtgaccttgaatacgtcccttccttttgcagggtctcaatttcataacccgtaaaataggtgtaatagcagtacctagctcataaggttgttacgagaattacagaaattaaaaaacataaagcacttagagctatgctggtgtactataattattcaatacattttacaattcttattgtctgtaaggtgattaggaggcactgggtgacccattgtttattctgagaaaatacgtgatcttgcccttatatgcacgttcctgtaatgctcacttttctggatacctggaataatgacagtttaaggattatccagtctcccaaatgatcaataatgcaaaactggggttttctacattttgattttgattgttagaagaactacatagcttcctgctttgcaattcggactgtactcagtctgctgagtagttaatgccgtggacagcctcactgtcagaatgtaatctcaagcagcgatggaccattccagaaatcaatcagtaggctttgagttggtgctcttcaaaatgtgtgtgtgttagtcttcagtgctttgtacatattctgcatatagtgagctcttacacgtttgctgaagagatttagcagtaacttaactgcagctacacacagactgtaggcttactagttgcttctggatcaactaggaaaccactgttctgcccaattctcacaatcatggctgctctaaaggctgttcttccgagtgtcaaggccccgctacctggcaactcagccctgcccactcatggcacacaaggagacaaacaaactactttttttcctcagaagtgactttggattacagactaccctagctcacccccaccccatttctgctttcttggcttcgattttccattaggcatgactaagtgccagaggttctgtctgtctgggaaaataggagtcactggaattttctatcctcttctcaatgtgcagcctccctgctgctttggagatagcagtaaagtgatgtctttcctttggcgcattccattacaatactccttcttctcttttgcccatagacgctagtaataagtttggccacagaagcatgttaccttctcttaaaagtacttggtttttagactctcagcagggttatttctgctcacaaacaccctgggttttccccatgggcacagaggccttcagcctcctgggtgagccactaggaagaaggcacccatgccaggccactccacgggtaggtggatgtgtacgtggtgcaggctaaactcctgcccttgatgattctgtgctgctcctgtgagcaagggagcaggaaagaggggaaacgtaggaggtcagaggtggcttgggctgggctttggaccagtaatcaggggcatagggttctaatcttgatactgtatgccttgcacaaattcttctaggaaatgaaaatgatgaactgaaagtcaactctatgccaatcactgtgcttaaaggtctatatcgattatttcattgaatgtctatcacaatagttaatgcttaccatatttagacctggcagtactagatgatctctaaagttccttccatgttccatgttctgtgactggcccccactgtcacacttaacttcccaggatgcattcctacttagtcacccaacttatctctgctgttggttgtggattttgcaggacagtggagtagaggtaactgccccagtgagttttctaaattttggttttgatttttagaagaactacgtaacttcctgctttgtaattctgagttgtactcagtcttctgagtagttaatgccatagatagcctcattgtcagaatggaatctcaaggagtgacagaccattccagaaatcaatcagtaggctttgagttggggctcttcaaaatacgtgtgtgtggtagtctccagtgctttgtacatactctgtatataatgagctggatggtacctgcttcccatttttgctcacctctgtaaatcctctactttaataaggcatgaatctagttcattttcacaggtggcccttgtgctgaatgatctgacaaaagacaagacagaatcttgtttctgcagaagcaaggcctctgcttgtcattatgatatgcacacaayggacaatcctgatggttctttgatgcttcccttttttctagaattcatgccttaatgagaagtgatagaaacaagcggcttggccctcctgccttggctggactccacatcactcatgacagccctgagcagccctggcggcacctgtcataaactaacacacacatctgaacagtcaagcctaattcctaagaagctgttttaacttgacatctgaaaatgtattgcatctagaattattttattgggtgtgtgttcagggcatatgtgtgcacgttctgcaactgaagtgttctataaatatcagatacgagctgtacaaaaaggcatcacgtacacggtgtacttaattccatttagtaatgttttcaatttgtgtctgacctccggcaacagagatggaagtttctcaacatgaataaaaaagtatgctcagctaccttaaacaattttcacttaaaattccagaaatatattagagcttagtgattaccaggtgggtactagcccagtactttcagaggaaggtactgaagtccagaaaggtgacgtgtcttttccatgatcacgaaggaaattaataatggtccctagatgagacccaggtcacttgactcccaggccactatcctttgctttttcttgacttactgtacgtttcttcccccagctgttcaaaaggaactctgattccattaatagcatatgttcctactatggtttatcataaaaatcccaaaccagctcctctaccctttcctttctaactctataggacacctgtctatttttccaggaaagagaatacgtgaccctaactcacaagcaaggaagttgctctccttggtgatcccaaacacttccccagtggctggcggggtaattggaacccaagcttgaacactcgattgttcttttttttttttttttttgagacagggtctcattctgtcgcctaggctggagtgcagtggcgcgatctcggctcactgcaagctccgcctcccgggttcacgccattctcctgcctcagcctcccaagtacctgggactacaggtgcccaccaccacactcggctaattttttgtatttttagtagaggcagggtttcaccatgttagccaggatggtcttgatctcctgaccttgtgatccgcctgcctcggcctcccaaagtgctgggattacaggcgtgagccacygcgcccagcccactcaattgttcttgaaagggcacacctgagttaattttcctgacaaagatgtgctgaccttccagttactctttttttctttatttttatttttgagacggggtcttgctctgtcaccctggcaggagtgcagtggcacgatcttggctcactgcaacctctgcctccccggttcaagtgatcctcctgcctcagtctcctaagtagctgggattacagacgcccgccatcatgcctggctaatttttgtatttttagtagagacagggtttcaccatgtttcccaggttggtcttgaattcctgacctcaggtgatccacctgcctcggcctcccaaagtgctgggattacaggtgtgagccaccacgcccagcccagttactctttctgtgtgactatcctgataagctgagttcagtgcagcttcttctggcttgtgtgactgaggccagaacaaaagccctaactgttttccactgagaaagcaggataaacagggggtgcagtctttaaaactgctctcagagaagcttccagtggaaccaaaggaatacagatggagggcctggggagagatggcctgaggggacctgcagaagggatttacctgctgcccctcccccaggggagccaggagactgagctgggctgtaaacactccgtgcctggtgcagcctggtctgcacaggctgagaggatggtgagtggcttcctctgggatgagggctgtattggcagtaattgatggccaggcttttcaatggagcttatcatttcactgcaacagatgtcaggttctaataaataacacgttctcactgacctatgcaatttggagaggatgcctggatgtcaggcagagctggattcctccccatctctgttgctctctcttctgtaaggaaaaacaaaccaaatccctttaagatacttttcaaaagggttcaaggatccaataattccacgttatttatatgatttgcttttctcttcacagctctacttctaaaccccataaggaaaaggcccaggagggacgggtgagcttgctcgtgcggaatggaaggccttggtgacctcagtccccaattcctgtgtcgctcaccagcactgactttattgtcttctcgggggctctgatcacccgagctatgttggcctgggcctggaaaactccctcatctctcttgtggggagttcagctgagatgaggttggttcagctggttgtgctggtaccaagaagatacaaccacaggggatgacagtccattaatggggtggccttaaactttgggaactctagccaagttaccgaggttaagggactgtttactggggtacatatgatggtatcaatattgactctgcttttaatttaaaaatctcctctttttctctagggatgttgctgctgatagctaaaaatgatcaaattcttaccatatgccagaccttatgctggacaattcactgacattatcccacgtagtaggcagaattctaacgtgacccccaagattctccaccttctgygtaatccccaggattgtgaatgtgatggatttcattctggtaaacaggttttgttatatggcacagatgactttaagacagggaggctttaaatctgtgactagcagaagacatatggaaggcagagattcaaaatataagagggatctgacgcaccactactggcttgaaaatggaggggaccacatggcagaggacgcacgcagcctctagttgctgagggtggtctccagttgacagcggcaaggtaacaggggcctcagtcctacaaccacaaggaactgaactctgccaacatactgaaagagcttgaaggaggagcataagcctcaggggtgagatcatagacccagacaaagccttgattttagttgcctaaaaccccgaactgagaacccaggcatcttgagtgggactcctaacccacagaaactgtgagattaataattagtggcgttttaaaagggttaacttatgatatttttaaaattagcaacacagaaaatcatacaccccatgtgatacccatcataaccctctcaagtaggcttcaccattttatagacaaggaaacaaagacccagggaaattaggaatttgcccaaagtcacatagcctgtgagtggcagagacaggtttaaacccagctatgtcttgactttatggtcagtgctcttcattgcctcatgcatttcctctctgtatgagaagagagcctcagacacatggtgaaaagagtatggaactgtttctgtctgcctgggtgtggatgtgcagaagggtcagaggacctatgcttttgttttggttttaaatggtgaaaagacatatacatagaatcaactagctggattcagtttagatgatcccaatatgccttcttctctccatcaggcctgatcagggtgttggctttggccacagcagtgtcactgagcttcttcacagcctgtttgatctggtgcttgttggctttgacatccacaatggacacaagttgtgttgttgtcttctatcttcttcatggctgactcagtggttgggggaacctgatgatgaattattggtcaagcttgtttctcctgggagtgctcttccaagcatatttctgctgcctgcagagccacactgtcttgggccactggcaggtgggtgatgtgtggattggatcttctttttgtggctgtggacacctttaagcactgccttcctggccttcaaagcattcgctttggcttcagctttgggaggggcaagaacttttttcacttttggtgccataatgtgaaaatgaggacctatgttgagccctcactcctctagaagccagctgtgtgccctcggcaaagtcaattaatcactctgagcctcagtttttataatctgtatgaggcctactaagaatttctgcattataacccttgaagggctgcagctgatgatcccataaaagtgtgtgaggggccactgtgaatgaagtccacagggcagacagaggcacctggatgtcatgtagatatcattttcttttcttgatgactgccaatttcaatgtcctctgcctataggctggatatggtcactctgayggcttatttggaggaagtaattttaaataggttttttttttagaggaaatgattatttattacatttattgaaaaactacagaataagatggaaggtaatttttctttttttcttgaattctttaaaagttagttgactattaaaagccaaagtaataacaatgtattgtggaattcataaaatacgaagactgaaagtgtgtgaatatgacagcacaaagataaatagaaggtacacagataattacactgtttatacaggaagcattataatattaattcacggtaggctgtgataagttaacggtgtatttttagtgtataaatgactaaaatatacaaagaaatatagctaacacaccaacagaagagaaaatggtaaactaaaaaatactttaataaactgaaagaatacaggaagaaaaggacaaaggaataaaaaaaaaaaacccaaaccaaaaatatgaatagaaagactgtagggcttaaacccagtaagcttattatttatattaaatgtataaataaatgaaatactccaattaaggccaggtgtggtggctcatgcctgtaagcccagcactttgggaggccaaggcaggtggatcacttgaggtcaggagtttgagaccagcctggccaatatggcaaaaccccatctctactaaaaatataaaaaatagccaggtgtggtggtgtgcgcctatagtcccagctatttgggaggctgaggcaggagaatcacttgaacccgggaggcagaggttgcagtgagccgagatcacgccactgcactccagcctgggtgacagaataagactctgtctcaaaaaaaaaaaaaaaaaaaaaaaaaaaaaggccaggtgtggtggctcatgcctgtaatcccagcactttggggggccaaggcaggtggatcatgaggtcaggagttcaagaccagtctggccaacatggtgaaaccccgtctctactaaaaatacaaaaattagccaggcaatagtggcgcgagcctgtagtcccagctactcgggaggctgaggcaggagaattgcttgaacccaggaggtggaggttgccatgagccgaggtcacaccactgcactccaatctgggcgacagagtgagactctgtctcaaaaaaaaaattaaaataaaaaaataaaaaagaaatactccaattaaaaggcagacatgttaagactacattaaaaaacccaaggtctacaaaaggtttctttcaaatataaagacacagacaggataaagaaaggatgaaaaaaatatataccatgyaaaaaatacacagaagaaagctggtgtaacaattttaatatcaaatggagcagatttcaagtcaaagaatattgccagaaatagagtcatctcataatgatagaaggaccaagttattgagaagacctaacaattctaaatatgtatctaaaaataaagctttaagatataaaaagtaaaaattagcagaaggggagaaacagacgaatccaaaaccccacaggtgaaaatgttaatacctcctttcaataactgatayaatagacataaaaaaacagtaaagagctaaaagatttgaataacactaacaagtaatttaacttagttaatgtatatatagaacactataccccaaaactgcaggacacacattcttttcaggtttacatggaatatttatcaagatagatcacatgctggtctacaaaacaattctcaacaaattccaaaggcttgaaatcatacaggttatgatctctgaccaaaacckaattaatataaatcaataagatatttagaaaagtctttctaaacacttgaaattcaagaagcacaactataaataacccatggttcaagaagaaatcacaagggaaatcagaaaatatttctaataaaataataatgaaaaataacatacaaaactttgtggaatgcagcttaagcaatctgtagaaagtaattttatattaaaaaagaaaaaaggattaaaattgtgacctaagcttctactctaagaaacttgaaaaggaagacattagaaacaatgtattgccaatcactttgacaacttagacatgatggatcaatttcttattaaaaaacctagcttgctaaaatgaacacaagaagaaatacagcaatctgaatatccctacatttactaaagacactaaatattttttgcacaaaggaaaccctaccaaacatttggaaagaaataatactaaatctgcacaaactctttcagaaaacaagggaggaaggaatactttccagtttatttaatgaagccagcatagtactgataccaaagacctgacaaggacaaacacaagaaaagaaattttagaccaatatcattcataaatgtagatgtaaaaatcttaaaattttagcaaatcaaatttaataatataaaacaggataaaatcatgaccgagaagggtttatctttggaatgcaaggttggttcaacatgcaaaaactaaataatgtaattcacattaacagaataaagaaaaaccacatgattatgtcaatgtcaaaagatgcagaaaaagcaatctatggaattcaacacccattcatgataaaaaaagaaaaaaagaaaacctcttagcaaagtagtaatacaagaatttctttaacgtgataaagacatctatgtaaaacctcaacattagccttaatagagaaacatacagctagattctgctcttatcacttatgtaaaaaattgtactggaggtcctattcagtgcaagtaggtggaaaaagaaacagaaaaacataaagattggaaggaaagaagtaaagctgttagcataaggcgtgactgtttatgtaagaaattgcaggctgggcgtgctggctcatgcctgtaatcctagtgctttgggaggccaaggcaggtggattgcctgagctcaggagttcaagaccagcctgggccacatggtgaaatcccgtcatgcctgtaatcctagcactttgggaggccaaggcaggtggattgcctgtgctcaggagttcgagaccagcctgggcaacatggtaaaactccgtctctactaaaaaaaaaatacaaaaaattagcctggcgtggcagcgtgtgcctgtagtcccagctacttaagaggctgaagcaggagaattgctagaacctgggaggtgaggttgcagtgagccaagataatgccactgcattccagcctgggtgacagagtgagactccatctccaaaaaaaagaaaaaagaaattataagaaatctatttaaaaaatctattagattttagtagtaataagtgaatttagcaatgtcacaggatgccatgtcagtatagaaaaatcatttgtattcctgtataccagcaacaaactagaaaataaatttttaaaaattttgtttatatttttatatatttataaatattttatatttatatttttatataatttacaataaaagcaaaaacaggtggaatgcagtggctcatgcctgtaatgccagcactttgggaggccgaggcgggtggatcacctgaagtcaggagtttgaaaccagactggccaacatgccaaaaccctgtctgtactaaaaacacaaaaattggccgggcatagtggcgggcgcctgtaatcccagctactaggaaggctgagacaggacaatcacttgaacctgggaggtggaggttgcggtgagccaagatcatgccattgcactccagcctgggtgataaaagcaaaactttgtctcaaaaaaataaataaaaatacaaaaattagctgggtgtggtggcacacgtctgtagtcctgggtactcaggaggctgaggcacaagaatcttttgaatctgggaggcagagtttgcagtaagccaagattgcgccacggtactctagcctgggcaacagagcaagactctgtctcaaaaaaaagaaaaagaaaaacatttaaaaatatttcaagatttctacattgaaatattttaaaaatttctgagaaactaaagacctaaataaaaccatgttcattgattcagtattataaaagattcagtattgtaaaaatgtcaattcttcccttgttgatcagcaggcttttggtggggggggcgttggagtggggagaggtgggaattggcaagctgattctaaaagatatataaaaatgcaaaggacctagaatagccaaaacaatctttaaaaagaacaagcttggatacctttcctgatttcaagaaatattggtatacctttcctgatttcaagaaatattggtatacaaacctatcaatggaacagaatagagtatccagaaatagatccactcacatgtggttaattgacttttgacaaagatgtaaaggtaattcaacagggaaagaaaagtattttcaacaaatggtgttgtaatatctggatacatatgaacaaaaaattaaccttggcatctacctcatatcatatacaaaaattaatttgagatggatcataggcctatgtatcaaaacaaaagcttctagaagaaaacataggataatttcttcatgaccttctagtaggctaataattttgagtatacaaagagcattaacgtaaaaaacagatttcatttaaaaaatgaagattttctgctcatcaaaagacactcttaagaaatgaaaagggcaggaatagtggctcacacctgtaatcccaagattttgggaggctgcggcgggaggatcaaggatcacttgagcccaagggttcaagaccagcctgggcaacatagcgaaatattgtctctattaaaaaaaggaaaaagaaaatgaaatggcaagccacagattgaaagacgatactcacaaaaaatatatctgacaaatatataaagaaactcatatatacaactcattaataaaaagactaacaaccaaattaaaaataggcaagatttgaacagacatttcatgaaagagataaaccaataagcacatgccaagatgctcaacatcatttatcaccaggaaatgtaaattaaaaacatgagatcttactttatcctctctagaatggtacaatttaaaaagactgacaataggatgtgttggtgagaatgtgaagcaactggaaccctggcatattgctgatgggagggtaaaccgataccactttaaaaaagcttgtcaccttctcataaagttaatcacatatgtactcccactcccaagtatttacctgaagaaaggaaarcacatgtctacaaaaaggcttggtcatagcagctctattaataaaatcctcaacctggaaacaacacaagtatctacacatgggtgaatggattaatacattatattcatataatagaatattactcagcagtaaaaaagaaatgccataacagatacattttttttttttttttgagatggagtctcgctctgtcacccaggctggagtgcagtggtgtgatcttggctcactgcaacctcygcctcctgggttcaacagattctcctgcctcagcctccggagtagctgggattataggcttgtgccagcatgccctgctaatttttgtatttttagtagagatggggttttcccatgttggccagactgttctcgaacttcctacctcaggtgatccgcccgcttcagtcccccaaaatgctgggagaacagacgtgatgactgctcccggccaccataacagctaaatcttaaacaattatgttgaatgaaatgaagataaatttcattgtgtcagacacaaaagagtatgatctgtattatttcatttagaagtatctaaaagaaaaaactaagacagggtgatacagaacaatagttgccttgagagtaaagagactatttggaaagaggctataaggtaacttcgtcaaaacttgtcaaaagatatacttaaaacctgtccactccattgtatataaattatactgtaattttaaaaaaagatatatatgcaaagccatttccttcaaagtactcatggtttggttaaggaaacaaaatatatatgaagatgtgaagaactaaaagaaaataccaaagagattccaaagcagtatgtgattagagtcaaaggagactgggaggggagagagctgctggcaaagtagagtggatgggaaaacccatatgggagaaggttgaaggatgtgtctgtttgagggggcagaaagagggtgggaggaaaggcgtgagcaaaggcactgaggtacacagcagaagctaaaacccatggtcttccaagtgttaacttgctggcctctcatagcaagtccatccaatagggaggagtacagtcctgttttaggaatgaggttcagagaggttaagagctctgcccaagaccacagagcttgcaggattagactttgcaatagcaactggggcacacatgaccccaaagcctgtgctcaccttgtaaatgctgcttcacttgcgagggacagaatctgctagacagccatgagaaagaaagaagcacatgtggtaggaaaagccctggtcagtgccaggaagtgtcctttctgaggttacattgtttagaattttgctctacaggagggaataaacagctgattccactcaaaaggctccactgctgttcataaaccatgagagtgtttatgtcatgggcagagctccccaagtgaattatagccttttacgcactgtgtacgtacrgtattttcacaggacaaagaaacagggtgtggaaggaatgctacagttgaccctcctctctttccatcctttgtcttcaaccttctccaccaatctcaagactatactgcaggacagttctttcacggtgtttatctggctttctgacacagcacagggtrgttactcagttcagctgaagaatggaaacttaaactatttcttcttgctagcacgagctgctggctttctcttttattacatttaaaatggatccatcttcgctacagtagaaagcagattttttaaacattacttcagatgttttctttagactggtgttaacataaagcaaatgtctcttgaaactctgaaccaatctgttaagataaacaggcttcacttacgatattcctatactgaaatcacgggcttgtggtctgcaacttcttaaagactcaattcatacttgctaaaatgtctacttaggaaacacacacacacacatacacaccaagatagctttgccatggaaaccacaaagacacatctggttcagcacgtaccacaaataatgcccatcttcttagggcagatcctatgtatacacaaggaaagcccagaaaattaaacgatatcaatacttcaagcataaaacatacttcataattccttttttccattgtatttcaggatgtgtaagtcttaatcattgttacttgttatatttgcatatgcttgtttttgtcctgaatgggatttcagacttgggtgtcacggataaaaagagaaaataaagggaaagaagaaggcacattaaagtttcagataacaactctggattctgcatataaatctgaggcagtctggtttctagaagaagacaccctgacattatttaagaatctcaggctgggcgcagtggctcacacctgtaatcctagcactttgggaggctgaggtgggcggatcacctgaggtcaggagtccgagaccagcctggccaacatagcaaaaccccatctctactcaaaatacacaaattagtccggcgtggtggcacatgccgatagtcccagctactcagaaggctgaggcaggagaattgcttgatcctgggaggtggaggttgcagtgagccgagattgcaccactgtactccagcctaggcaacagagcaagattctgtcgcaaaataaaataaaataaaataaaataaaaagttatcaagcctgctataagtgaaagtcttgtactacagaaaaatataggtgaggtcaggaggccccatggaagggaatggggtctctctgggagggggaggcaagaacaggaagtcctactaagttcttgattagtcatggctaatcaagaacattccagatctggaggtccaggttttgttagtaggtactttgaaattgtcagaagtttcatatgataaaggctttatcttctttgctgggctataaattccatgaagacagggacaatttctaattcgtttatcattatattcctagcattgagcacaatgcttggaacatggtagatgcttaataaatactggatgagcaaatgaagaggaggcctaatagatagtctatatttgtgtgatactttggatctgatcatccttcagctgggatcacaggtgtgaagcatatgactgttccaagcgataaagttataaccacatgcactcttcgatttatttttggaaactatgattttgatccactgcttcttcaatctaggaggtcatggtttatgaagactgatgttccagacaccaaagtcttaaatataaaaaacactcagcatatttctatatttacctattctgtatgactgaagtgaggccttccacactgagaggttcatgagcaatagttgtacctctaaactccaaactttagctaacttcgacctctatgaaatcctacttccatatctattctaatagccctaagctatttgtgtagctgtttatttgaccaagaaatacacaggtcctactttgggcaacagctatggtatacactgcagagacgcaatgaggtatagaattcagagattcatttccatatgaaagagtagctaccggctccaggtgttgactactaagcaaaaattgtttgtttactgccacctgaaattttccattttttaaaaaactataaaaagtagctgccaacattttcatcatttatgccatttacccacaactcgaattcctatttagtatttatcctctactctaaatagagaggtagttttctgataaattctacattccatgaaaaaaaacaaaagctgtcatggctaattttagagaccaacagaaacagtagaaaaaggaaacactttcagatgtagatcagcttcttcctgatgaagctacaaagggccaaacagtaaatattttttgttttctaggccatccagtctctgttgcaactactcactctgccactgtagcattaaagcggccacagataataagtaaagaaatgggtgttgctgtgtttctataaaactttatttacaaaaacatgcacagggcaggaactaacctgcaagcagtagcttgccaacccctggactagataaacaaaatgctcttacctgttggaaataacgacagattcacttactttgctcttttggccatttcatttccatcccatctggggctgtacggataatttttttgggcctgggagtaaagctgtccactgttggtaaagtgataaacggactgaaatgtgagagttggctggtctcgagggaaaaacagaggcaggtcaactgcaaagacagaagaaagaaaaagaaagttagagcataaacacatcttaagatttttttttttgactaaatccgaatgttaggtacgaaactctatttgaaccacaaatactgcttgcagtttggatgaaaggtgtggtgtatagaraggcaccaagaaatacaaagtgacttctccatcttcgaggagtttataatctagaggcaaatcacacgtgggtgaaaatgtcaccaatagaaggcatgatgtgtaggtgctgtaagaatgctttgaaatggtcacagaagcttagggaaggatgcttgggtgcctgcaaccatctgacattcctctctagcacttcccgggatcaatattccatagcagagttctctttctatctgttttaagtgtctattataacataaactcttcaagggttgggcaatgtattccacatctataatttgatggaggcagtgggacagaggctgtttttcaagaatgcatttggagaagcggtaagagtgcaggtgataatctttctactttataggatatggcaaccagactaccaggaaaaatgaagttatcactctacttccaatcaagcagtgaattttgatactcagcagtttcagttttttccatatgcattaccacatatatttatatctcctaaatcagtgggagttccttaatggaacgcataaggtactactctgagcactaaatatgtttgctgtgatagtacaggctaattccaatccttgctgttaacatgtgttatatgctttatctttcattttggggttctttaactcaatttttaaaagtaaactgacttgttattagttgaggcaaatcatcattaaaaacacagactgtttcaataacacattcttaaaggtatataacgtatatgtgtatgaatgttatccacttctaggacaaagaataggaacagcataaaaataataagaaaaacaagtatagaattttctagatttacagggtatctttatacacgttatctgatttgttacttagaactccatgacagagacattatcttcaacatttgcatttaacaggtgagcaaaccagagactctaagaggtatattaacttgctcatgtcayagtcaggcaggggcaagactcaaatctagtcccatgattcaaacattcggctcctactatgccccacattgccttctcctactccagaggacactggcataacctgcttacgactcattcactatgtcacaatttaggaagctaaagttgtcattatgaagtatgtataaggttcgtctttttagctacatgaggaagatatatttaaaaatacataccagataattaggccaggcacagtggctcacacctgtaatcccagcactctgggaggcggaggtgggtggattacctgaggtcaggagttcaagaccagcctggccaacatggtgaaacctcatctctactaaaaatacaaaaattagcaaggcgtggtggcaagcacctataatcccagctacccgggagtctgaggcagaagaatcgcttgaatccgggaggcggatgctgcagtgagctgtgatcgcgccactgcactccagcctgggcaacagagtgagactccgtcttaaaaataaataaataaataaaaatacatgctagataattatacatctatcactattctagtctggggtgacattcaacttggactaggtactctcagcactcaatatgatttcttgaaggaaaacttaggtccgcagcagacttttaaggagaagccaaaaaactcccgagaatcaaaaaaccatccagttgggagggcctcttagactcggagtgcacttgactctgatgatgactgactcagtgctgcagggggtttctacagatgaatcacacgacagtcagagaaaagggcacgattttgaatgtccactctttagtcacatttttcaagtaccacaatagggcagtctgaatacatgtctgttggtgccaaagcagagagttcatagtatagaggaacaatacgaaagactgattaaaatcaataattcaattcagaaatcgcttttgagtccctgcatattgcaaagcatgatctgtaacgttttcagtcactctgcacaaatattgctttctaaaattaactttgtatcttttctcattactacttccatttcttctgattaatatttatttatttatttatttttgagacagggtctcgctctgtcgcccaggctggatggagtgcaatggcacgatctcagctcactgcaacctctgcctcctgggttcaggcaattctcgtgcctcagtctcccaagtagccgggattacaggcgcctgccaccacgttcggctaattttttatatttttagtagagatcaaatttcaccatgttggtcaggctggtcttgaactcctgacctcagatgatccacccaccttggcctcccaaagtgctgggattacaggcgtgaaccaccgcgcctcttctgattaattttttaaaaaggcctattcgtggctgggcgcggtggctcactcctgtaatcccagtactttgggaggctgaggcaggcagattacctgaggtgaggagttcgagaccagcccggccaacatggtgaaaccccgtctctactaaaaatacaaaaaattagctgggcatagtggtgcgtacctgtaatcccagctactcagaaggctgagacaggagaatctcttgaactctggagagagatgttgcagtgagccgagacagcgccactggactccggcttgagcaacaagagaaaaactccgtctcaaaaaaaaaagcctattcacatatactttgacttcagttgttttatactatgtacacttttgcaaatataaaacaaggttgagagtaacctccaaagcaatcattaccagcagaaaagtaccatgagagcttccctacaagaaagcaacaattttaaacagtagaactcaattgcaataatttataaatttaaagcaaatacagtcatcactcagtatccaaagcaatgcagataataccacaggctatgtgattttcaagctactggctttttcgggttttggaatgccttctattttcgttcttattattttgttttgtagaaaatgagttgctggtattaatattttaatatgctaaaaaatgattttttcccacctattttggaaccatcttctttgactccctaaatgcccagttagcatcagaaataattcaaaatatgaaggaaatgtatctacctgggcaagtgagttgttctgatttttaaaaaacagcagcaaggtaatgttgatatcyaccacagtccccaaaaagcattgattacattattatttctccatggagatttgtctaacaaagtgtaattgaagccaatattaaaatttgaatactttctcagtgcacacagtaaatgtattattaggggagcaggaacagtcagagtacttcagagataaaactggcaattcacatatgagaaaataaaattttaaaaatacagtatcttgctcaacttaactaagctgtatcctgtctatatcagtcaatggtcaataaaatgatggcttattttaaaatgttctatgcataagaatgagttaataactaaaatatttatgagaaatacttcacatttttctgacaagaatgatttgaatggtacaacttagtcaagattaaaaaaattaaaacttgctttccttatccccaaatgtttctgtcacttaacttttgcctataggttaactcatgattttctgatgcatagtaaaataattactttaggacttccaacagctaacttgctctgaaggaaccgcccagattccaaggatttggggctcatagtttcagctatatcaaaattgaacactttaaccatttgctttctttcctttttttttttttttgagatggagtctcactgtgtcgcccaggctggagggcagtggtgcgatctcggctcactgcaacctccacctcccaggttcaagtggttctcttgcctcagcctcccaagtagctaggattacagacgcctgccgtcatgcccagctaattttttgtatttttagtagagatggggtttcaccatgttggtcaggctggtcttgaactcctgaccttgtgacttgcccgcctcagcctcccaaagtgctgggattacaggcatgagccaccatgcctggccagccatttgctttcttagaacctactgggtcaggtttgattcttagagcagaatcatctcatttgattcagttacttagtgtcagtattattttgacaactgcttcctatttccttcttcccatatacagagactaaatcttggttggctcttcatccacagaggggatggtctgcacctgtttagtagaatttcagtaaccatttctttcttctctttttttaaatttttaattttttatttttagagatgagggtcttgccatgttgtccaggctggtctcaaactgctggcctcaggtgatcctccctctttggcctaccaaagtgttggtattacaggcatgagccactacactcggtctcaataactatttctgaagcattcttcaagaacttgctgaaacaagtcacaccaaatgcttcttaattctgcacaaaccaggcagttcacaggatgcattcacaaggctctgaagccctgggggaagggaggaagaattaagctctgcaccggttgcctcactctggacagtcactgcagtgatgggttccgcgggttgcagtcccagagcttgtggtgctctccagacaacagccaaccatgcagctttgggggaaagccgaatgcactgataaactatgctgcctctctgtgaactctggtgaggttcaagtagtggctgcatttctacyttcccaagcaaacatgcttatctgcccctaaatgctcatcttttcactagaagacaactctagtaaggtggtatctcaattcataagactttctagaaatttctcacttctccaaacacctcaacaatggaaaaatgaatagccaaaagaaatgccataccatgcatgtgattcccaggatagcctatcagacactcaacatttcaggcatagttcaacaagtttgattatatgatttctccagaaaaaaaaagtatctaattatggcaaaatgaggacaaggaacattaaaggcaagtagtcacaattcgcagtctagcacagaggaagaatagaataaatacaagcagggttaggagagctgaaagaatcccagtctggccattcagtgtagtaacaaaaagctccatacatcccagctgtcacttaagctatcaccatatagtaagtgatattcactcccaatcttggcagtggtggcggacagctgtggttgcgtacctaacagccattctccatccttctttcttatgggcagaaccttcttctcaccccagagtctgacagtgctggatatcactcagccttcaataaaccaagacatggaaatgtgactcagtcctgccaatagcccctgaagggaagtgggctatgggtcttttgagaaatattttcctctctgattaaacacacgtgtaaggagaagcccccatctcattcttgccttagagctgatcatgtgaggtcttgaggcttggagttgaggccccatcttgtgaccatgagggaaagtcagcctgtcatcattgtgtggctggattcatcatccctgaactacccagctctggatttcttgttatgtgagacaatctttactattaaacctcttataatagggtcttctgatacgtgcagtcaaaggcatctaaggaaacgttattttctgaagcttctgttcaagaaggcaagataactgtataatctatgtacatataattgtataatctatttcagaaatatttccaccaagcatggttaagaaagcattcaaggcatataaacaggaaaattttagttgtctggaaagttcagttttgcgggacagttcgatccttgaaaatgccaaacaaatgaggggttaaccataattgcttccctgggagtcacatcatcaaatattttcaccattattcacaagttggccattatttcatttcttcaaaccttccaaactatatatttctgcgctttcccccatatcttgggtcggcagggaagatactcatagatgcgctttgtggtggttatggttatattcccatttccagtcctctcaggatgctccagttcctccaagcctcgttaggaaacgttttaaccccttgttgaattgctgtaaagtcactctccagtgaggattccatttgaggctgattgttcctgagagcaatctgtatacttttcattcccaggctatccccacaatgtgggaagactgccatatatttaccgagcaaccacgatcttactacctacacactaaacctttgagacatgtggattccaaccactggaaaattaacactacatatccaaaatactcacctacaagaaatataaaagtaacattttccaattcagaagtatctatttaaggtatctccatttattatcactacctttcttttaagtgacaagaaagactaaatattaaccagattttgttacatgtgttctacttttcactggtttaagctggttatgatatgatcatgtaaacaaattatctttgtttattttttttttttggagacggagtttcactcttgttgcccaggctggagtgcagtggtgtgatctcggctcaccgcaacctccacctcccagattcaagtgattctcctgcctcagcctcccgagtagctaggattacaggcatccaccaccacgcctggctaattttttgtattttaagtagagactgggtttcaccatgttgcccaggctggtctcgaactcctgacctcaggtgatccatccacctcggcctcccaaagtgctgggattatagatgtgaaccactatgcccggcttatctttgaagtttcaatattattaaactgaagcttgaagtttcttggatttttccacatatgctaaaaaatcctattatggaaagagacagcatggtatgcccttgaggtcagataaagtgagttcaaatattggctacaccattaattagtgatgatatcataggcaaaatatttctcctctttgaatcctgattttctcatctgtaaaatgaggataataatttctatctcatagtgtttgttgaaagaactaaataaaaaccaaacaggtactcagtatgtgttcatttcttttccctaccacccttctttaagtggtttttttcttccatctaactttatacactgttctgtatatgtgaaatttctgataactgtagcatatgtttcaggttcttaaattttaactattttgatgaaaatctttctaaacttcatgtctcagtaaatatgatatactgaaaataaattagccttttttggatgacagagaacacattaacaagttatacacgatggcccaagtgttaaggaagatttagcttttactatttcacaaatgcctcctacctaagagcctgcattccctaaacctcatttctgaaaatgcacctcaagtgattttaattcgcctccccaggtaggaatcactgcagagaaccatgaagtccttaagcgcaggggctgtgaattagttattttagtatttctagcacttagtacagcgcatgacacatgagaaacactcagtaaaggctcatataaagcacatgcaaattaaaacctcaatgaacttccacttcatgcccatttgattgacaaacattttaaaactggaaaatacccaagtgttgtcaggctgtggaacattgggaattcccattccctgatgatgatgatgatgatataaattgctaaaaccttgtacagtaaaagtaaaggtgtatgtactccacgacacagcaattccactcttaagaaactaccacatgtgtgtaaaaagatcgcaggagaaggcctaaagtagccccacttgtgataacaaaaactggaaacatcttaaatgtctatcaacaggagaccggataaatacattgtgcctattctttcacaggaataccttacagcagtttaaatgaatgagctagggctacatgtgtcaacctagatgaatctcaaggaccaaatgttcagtgaaaaaagcaagctgcagatgaacactgttcagtatatacttacaaggatcaaaaacgtgcacacattacatactatttaggaatgtctatgtaattaaagtataaaaacatgcataggaaagatatacaccaaattaagggtagtggttacctctgtgggtggggaaaagggaatgagtaaaggatgggggtgcattttggaggggcactcagggggcttcaactgaattgacagtgtgctattttcctttgctctcctttcctttctcctttcctttctgctattcctttctcctttcctttcctttctttttttcttttttgagacagagtctctctgtcacacggggtggagtgtggtagcgtgatctcggctcactgcaacctccgccttccagcttcaagctattctcctgcctcaaactcccaagtagctgggactacaggtgtgtgccaccatgcccagctaatttttgtattttttttgtagagatggggtttcaccatgttggccaggctggtcttgaacttctgacctcaggtgatctgcccgccttggcctcccaagtgttgggattacaggcatgagcctctgtgcccggcctgacaatgtgctatttctttttaaaaaaactcagaagcaattacagcaaattatgaagatttgattaaggtgggtacatgggtatttgttttcatagtctttatacacatgtgtatgccttaaatatttataattttaaaaagtttaaaaaagtaagacattaatattcacagacgcagaaatcagtatgattccatttatattaagttcaaaaatagaaaaaataaatgatatatttttatggatatatactaggtggtaaagctattgagaaaatcaagagggcagttaacataaaattcagggtagtggttccttctgggagagacacccacaggacgtctatgatactggcactattctatttcttaagttgagtagtgtttatgaatctttaaagtgtgtggatatgttttacataatcgtgtgtgtgtgtgtgtgcgcgtgtgtataaacagataaacattactttgaaaatgggggcatttgttaaaaaaactaagagggtcaggaaaactgaatagtcttcagaaaaaaaaaaaaaacaacaacccacagtgggtagagtgccaggaagaatgagggtgtccatgcccttgagctcatggtctggaaaaggagacctggcaaggtcaagaagcaacttcagttgagcatgctaagacaatggcagaggcacacacgcggtgtcacgcagggagaagggcagccgcctgaggttaccgctctgcagaagagatggactttgagttggttctagatggttacaagttgaatcagaattggagacaggaatatctcatagaaaggaaaagattcaataacccatttgatatttgtaaacataattctccacttttaattttgctcctttggtatctcatattcgatgtagaaaagccataatctatcccagcattttgggaggctgargtgggtggatcacctgaggtcaggagtttgagaccagcctgacgaacatggtaaaaccccgtctgtactaaaaatacaaaaattagcctggcttggtggtgggtgcctgaaatcctagctactcgggaggctgaggcacgagaattgcttgaaccggggagggggaggttgcaatgaggtgagatcacgccattgcactccagccttggtgacagagcaagactgtctcaaaaaaaaaaaaaaaagaaaagaaaagccacaacctgtcctatattaccaatgtttcccactactctcctgccctttgtatctgtgaagagaaataggtgacacaaagatgaaggaagcagacgctggtgtcaggaagctcacaggccaagtccttctccctgtctggagggcgccccttgcttttctgggtttatctggttttactctcatcaaagttcagatgatcagaaatacctcttttctagaactctgcatgcttccaacctgtgctcccaagcagggctcactcagggtgagttctcatgaggacaaaagcataccagtggctgaggctgggatgaaggggtccccaaagtaggaacccctcctgtcccaagtgcttctctgtccctctgcttcatccactccctcatccatcacacactgagtgagcagattctctgttccaggctgcctgctggaactgagggtccacatttcctggagaggggccgggtgtgaactctgcacctcctgcctgctatgccatctgggttctgtgccctctggatataccacctacttggatcctggcccctttgctgctctgacattctcatttcctcgggcctggctctgtgttcattcccttcaacctgctattgcttccaactctgtgatgcagtccaagccccgccttcttccaggaagccttccttgcatgctccattgctcagtgatttctccagcctccatgtccatataatccacttctcagggggattgttgacaatttcagtgtacttatctttatgttagatccctacatgtttgccactgggttagacacacggtaggtagtggatgcatatttagtgactaactggcattgattagtgaggaaatggggactgcactagacatgtacaaagaaacatgcttttatgagatgcagaaagaaattgagcaagagagaacaccataaatagcatttagtactgttttaacttctatttttaaaagaattgagtcacaataaataaactcctggcctgggaggattaaaaaagaaatctggttaaattaaggaagagtttgattaaaagaatccttaaataaattacaatatattcaaatgcaaaatccttagcatttaaaaattgggcaaagtctttaaaaagtcataagcttttaatttcaaagaattcatagacaatgtaccaaatgtaaatgattagaagaaaaaggacaaatgaggtgtctgtggttaaagtaaagggtcagtttaaattcctgtcttgaaaaattagaatgaagcagttagatacaaatttgggaatattgtgactaccccaatgcgaagtatgactaatgtggctttaggaagaaaaaaaaaagttcctcaaatgaatctaacttttttccctaaaggatctagttatgacctttacattctagagaaaacaacatgtatccaaactgacaaacattccctgagcacataccatggccggctctagggaaacccagctgagtaaggccaactcctccccacagtgtcagcatgccctcaactcactgttctcaggaaaggagacgaggacgaaggttataacagaggtgtcaaccaccatgcagtatgggtgcaaagatactccatcgaagggcttctaggaggcttattagatgagactgctttgagcagggccttgaaaaacaactaggatttggataggcagtggcagtgggaggactatgactgggaagggagggagagaagcaagagaatccaggcagagggaaaagtattaagcagtcaccgtagaggcccagcgagggaatgcgggggatctgggtagacggaatacaggctggaggacagaagctggagcagagaggctctggataaagattgcaaactgtggagtgctctgaacacatagtgaaggactgtgaacgtctttctatgagcattacccttgaacatttctagggaaaaaagctcacaccactcattccagtgtggcagacactttcctataatgcccccagcatggtacaatcctctagaatggagaatgctttggaaagtatgtacaaatcaaaaataaggccaggcgcggtggctcacgcctgtaatcccaacactttgggaggccgagatgggtggatcacgaggtcaggagttcgagaccaccctggccaacatggtgaaaccctgtttctaataaaaatacaaaaattagctgggcgtggtggtgcctgcctgtaatcccagctactcaggacgctgaggcaggagaattgcttgaacccaggaggtagaggttgcagtgagccgagattgtaccactgcactccagcctgggtgacagaatgagactctgtctcaaaaaaaaaaaaaaaaaagttattattcgttagtagaagggggtgactatttacttctcagtataggaaccaattcctctctacaaaacatctcttaagacttatcagccggtgtggtggctcatgcctgtaatcctagcactttgggagcctaggcgggaggatcgcttgagcccaggagtttgagataagcctgggcaacatagcaagatcccgtttccattaaaaaaaaaaaagacttatttgcacatctcttatgttcaagggagatgctgagtggaaggcttgataatggacttactatgtgaaaaatccagagagtcaggcctgaagtttgggattggatgtaaggctgacacaggacacagtttaaatcaaatatctggcagaaggattacatgtttcctcataagacttggttagaagcactggtcaccatgtcattcccccatgcagaaaccttcattaacctatttttatttctacattatcctttccaagcagtttccatgctggacttataccgtgcagggatattacaattataggacaatgtctgacccactagaatgtgtggaatggggatattttccccagaaatgttaaaaaatcagccactcagtctgcaagatgggtggggaacagcttatctgggtgaagccgagtgttgagtgaggaaggcatgtgtactcgaggtgggcaagctttggcaggtgaactgacctctgtgctcctcttttcccattcccaagactggaaaaaactttaagctcagggttggaaatgaagcaggtaaagcacgccatacagtcttgcacatagaaaagtgctcaataaatacaggctgcaacctaaagaactaaggatgggagggatggcatactgggaagaaaacggtgtttggaatttgacagatctgggcttgattcctcctttgccagttgctacctgacctcaggcaactgactatactctctaagtctaggttttctcatctttaaaatgggataatacctaccttgcaaggctcctggatggtttacatggtataatgaatatatgtgcagaatacttggcacatagcaggtcttcataaatgatacctattattactcacttttctcttagaagcaattaaaacagacaaacaaacctgagtctatataatttcttttcctagcctgatttccagctgagaaaatacaaaccaagctttcaaaacaactttcaaaacaagttgaaaactaagctttcaacttagttttgtccatctatttatttgaggtaaattcagagtcctttggaactcttcatttttaattctacaatcttcttccagcaaataaaaaatcatagctctagagaatctacggtcaaatggggtcctgcagccaaaccggaccacagatcagaaaaagatctgaacagagaggaagcctgatgaaacctcggtcagacagtttttcctttgtgctttgatcatgcaatattctctccattctcataggtgctttctttaagataaaggctctttctttttttgctaaccaatttatttgtgagtgtttttttttttttaaagacccacaatataatcaatctttgtatatttaggattacctctttggcctgtgaattgtccagctttttgttttgttttcttgctactgttttctgactagctccttggtcattacttcttctatgagcatgggtgggacaggcagcaggggaatggaaattaatgttcctctttgatagcaattctgattagaaatttcatttgagataaaggtatgattgctgcctaaaatactgtttttaaattgtcatattattctgaaatttaactaactcaaagagaataaactgtgcaaacataaggtgatcatgttgaggcaagcccttgacttgagtgagttgcctgacttgtacatccaaatttaaaggaataagatacttttcaatcaaaggtattgaatcattgttaatccgaagaaaagcatgcatattcacagtcagtaaaccatttctgacagctgtgctttccagataactggggtttgtttttgaaagctctaaaacttttatttttcattgtttttgataaaaatctctataaaatggaccttacatttactgctcccctatccctttctaaatgactcaaagtcaaatttaagaatatcaatactgatagtgggccatacaattgtgacaccaaggcctaatcagacacgccagtccctaagctaagtgtggcctatatctgtagtttcctggttccctccacacctacctcctgggcccaggctattaggttactcttcttgtactcttacaaggttagtgtatctatgtaccacagaccttctctgggtagttaaactgcaagggacttgaaacaaactaacaagtaaacaaacaaacaaaacacagaatgttccaagggacttgggaaccagccaccaagtttactagaaggcgagagccaggcctgagggtgaaatacagagaagtggtgaccctcttgagttacttcctctggctatcttttgacaagtgtacttacagggtgtactgtagctaggtgagacatttacttaaaaatctctgagtcttgtcataacagaggatatacttgctaaagcacagttcaaaaaggagcccaagaaatcaactctccgttttacaaatgagattacgctatagagtggtgaactgcctcaactgcttcagcagccacagagagaagcccagggtcttgattccaagcccagtgaggtacatacacactacaaggccactgtatttaacagtacatctccctgcaggaacacagtaactgccactacaatagctgtacgactttgggttactgattcatctgtgcttgaaagatctcttactacagataatagttaggcatggggttttttgttttgttttcattccttttttttttttttttttttttgggacggagtctcgctctgctgcctgggctggaatgtagtggtgtgatcttggctcactgcaacctctgcctcctgggttcagtgattctcctgcctcagcctcccgagtagctgacattacaggtgcccaccaccatgcccagctaattttttgtatttttagtagagatggggtttcaccatgttggcgaggctggtcttgaactcctgacctcgtgattcgcccacctcggcctcccaaaatactgggattacaggcatgagccaccgtgcccggctataaatactttcttaatgctaagaaaaaggaggaaaatcagcatttattgaatacctacaatgtgctggatactttctgccatatgattccccctcgcccctttctactaggagtaagcctggctttgggcaagccagagaacttgaagctgtgaggagatggggccaggattcgaccctgcctgctgtgtctggagcccatgctgtatctacaagtgctataaatgtgatttactgcttgtttctgacattgtggaaagagcttctgcttgggcattttggctgatctaccatttcagccaggggttgctataggcaagcacatctctggctgttgatcaagaaagcacaaaagtctgagagattgataaacacagtcgttttggaccagaggaggagtatgatgtctgtctttcagaccaagttaagctcaagggcatgatgagctcagacttttaagaatttttatttttgatgtttccatgtccttgttttcttccttttggttgggaaaacatcttacggttatatctacggggttttaatggcatctgacactgttgctcacttctgttcttctcccatggtttccacaacactgtattgatctgctacttttcttccttttaaattttttactgcctctttttctccatctgcttaacatgccctcactcccaaagctcagctgagggacctgttaagcctgaaggcttggcacttcagcacttccttttcagaaagtctcatctgtcagtaacctttgaagccttcaaaatctccatatccttccctgactgctcacctctgctccagtctgataatttcagaggcctggaggatgtcctcatataaactttacaggtcaaatgtgtattgtctcatttgtgtcttcaagatgggcataccatcccattcacagacaagaacgctgaaactcaggaacacaaagtagcttgtttagaattagttaagtgacagagctggccttgaattcaagccttcagatgttaaatccagtggctctgatgccactagaatgttctggtactaactggagaagaattatactacacgtccgaaataaaagttacaacctgctccccattcaccatcagattgggtctaatattctgccaaatgcaaaacctttgagtcactttgagtactcttcattctgctgcttccatctctggaaaggctcccattctgaagaggacaggacaatatcctgctgggaggagactggtggggctcgggggggtcacatttacttccgccatggataaacagaatgggaatgtatattttttaaagtattgacctatttcatacagcaaaatatacttttggttaatcctaaataccaatcacatcacaccaattcagtaagctttgtctacctccaagaattgtccttctatctgtcctacasgtggaggccagtttaattaccttaattgtgccccttgtcctcctccatagggaccagcccaggtctcctggataaaaatacaatccttgaatgccggtgggggcagcccaggggaggcctaggtagcctttccttctaaggtgtggtatagcccatcaagctcaggttaaaagactagggaytgaataaagaagttgaagttcatatacacagagcatttaaggacagatgaaaaaaatcagattggaaataaaagagaaaggaaagttccaaagggctttaaaataaagtaccttaaccctggccacactgcagcagagcctgatgtggactcaacagctaaccccttctcattcagcctgcctgctactctcacaataaaacagctgctctcactgcccccccgccttactcatgacccctcaccaacactctgtgatggaaatctctttgtttctggaggccaaatggctcattctagattaattattattggttccatggaaaaacaggtttggttcattacacgttcaacttgctaagtcaccgcttgaccttagctcagaaaaaccttagctcatagaagagaaatctgcaaagtagtgcctgagtaggcaccagcacggatcaggaggagggatgtgtgaaccccaggtctagaggaatattttactaaggagtgtcatatttttatatgcacacacatctgtatctaactatatctgtgtatgtgtgtatgtatttggtttaaagagcagagcagtttaagacttgtacaaaaagagagttgtttgtctgaaactcaaagaaggtgaccatgagtattcttgaccatgggactctagaccactgagagttagagcaacttttagcatgttaaagaatgacctgtgggatttttaaatacttaaaaatcagttatgaggctgggctcagtggctcacacctgtaatcccagcactttgggaggctaaagcaggattgcttgagcccagggaatttgagactagcctgggcaacatggcaagatcccatctctacaaaaaataaaaaaaaatgtgctgagtgtggtggcctgtgcctgtagtcccagctgcttgagaggctgagatgggaggactgcttgagcccaggaggtcaaggctgcagtgagctgtgttcaaaccattgcattctagcctgggcaacagatcaagactccgtctcaaaaaaaaaaaaaattagttatgatttgatatgagactaggaccaaatgcgttcttrtaagtcaaataagaaaaggtatgtgagtttttacatttacttaaaaagcctctgccgggcgtggtggctcatgcctgtaatcccagcactttgggagaggccaaggcaggcagatcacctgaggtcaggagcttcggatcagcctaaccaacatggagaaaccccatctctactaaaaatacaaaattagccaggcgtggtggcgcatgcctgtaaatcccagctactcgggaggctgaggcaggagaatcgcttgaatccaggaggcagaggtagcggtgagctgagatcatgccattgcactccagcctgggtaacaagagtgaaactccatctcaaaaaaaaaaaaaaaaaaaaaagcctttgagctgccctgtctgcactaacccttatggtaaggggtaaggagtttgaatacagaagttggggatttcgagatgaagcaaaaatgaactctgcctcagagggctcatcatttgggaaagtcagtaaacaaaataatcccaatatagtatgagaaatgctaaaacaggaggctgcacgaaaggctgctgggatttggaggaaggactgactggctcctactcaggctttattttgtttcatactgtgccatttttatttaggagataatcaaagtggagataacaaaaagcagctcacaagatggatggccctgctttgctgatgtgcatcactgctgaactgcctggaggtttccggctgacgaaacctcaggtccaagggtaactctaggcttcacctcccaagccgcctattcacctggtggtggcagagaaagcaaaaggcaaactcctcagtggctccaaggggccactcaggcagcagaacctctttgctcagaggaagccgaactccataccaaggaattccaacctctcttccaccggctccttctcatcatgctgaaggttctctcatcctgtaaagcagcctcttgactatcatccctactagctattgcccatttactcttcttttaattccccaaattctcaaaagaggacgggctcaccttcactgtgaatgaattctgtggcccattcacatctggcttccgcctactctaaggcatgagtgtttctttttctacaccatcaatgggcaccatcattactgaagcaaatgcttttcatgctcctctcccttgtcacctgcacctccccagatccggtcctctgctgccttcgtggtgccctctctcctggttctcatctcacccctctgctgctgattggtctccatcaggaatcttcagcccatcgccagctgctggcctttcccagatctgttttcagtcccctcatatcacagattcatcctgtgggaattctaccagctctgtggcttctactgccaccactttagtctcacaattttggctacttactgaatatctccatctgcttatcacataaacacctcaaactcaatatattcaaactcactcactttcctccagattctggtactcttaaaatttccactctttccttagctaccctagctaggagttatacagtaatctgcaattcctccctctccctcacctccaaaatctgagtgttcaccaagtccttttgattctactctgaagtatttctagaatctctcctttcctcttcctccctattcccactgtttcagtacctcatattatctttcctgaaccagtttcccaagtggtttatcaaaccccagcttcttccacttgaattcatcctcccctctgccattggacttacagtataatagagaaaatgccacatccctgttcaaaatactcccaaagctttccatcagtaataggatatattttgaacggtgtatataaaagggtctttataactaggtgcatttctttcctgtctcatctccacattatttccttaactcacttatcctaaaaatcagattttatgaattattcccaatatttggaatggattgcatcagcccacgaatacactgttctctctgccttggacatcctttcctctttatctacctaccagatttctaattgcacttccaagactgagctctaggacatatgtgtaaaacccttctgagggggtttctacacatgtattatggcattttccacgcagtgtttgcatgcctgtctcccttacccgagtacaaactccttagtgtagctatccatttctgtgaccacatggcttaacctagacgttggtccatagtagatactcaaatgtttgctgagttgacttgaaggtacacaaggcttttctccttaacaataggaccagactttaacctctgcatgcccgaacgctcttggtaatagtgctacagacatagcaggtgaggaacaaaacagtcagctggttacggaggcaaccgtgaagcaccagaagtggttaaaagcagctgtgaaagggcaggcatggggcggggtactcttgcttttcattatacatctttgtgaagtatttgcttttgcaaccatgtccatgtttctttggcaaatataataaacaaaatcctttgttggttatgaataatctattgatgtgtctgcaaactacaagggaccactttccatatatttaaaaggacagattatgggccgggaacagtggctcacgtctgtaatcccagcactttgggaggatgaggctggaggatcacttgaggtcaggagtttgagaccagcctggccaacatggtgaaacctgtctgcactaaaaatacaaaaattagctaggtgtggtggcgggcacctgtagtcccagctactcgggaagctgaggcaggagaatcgcttgaacccaggaggcagaggttgcagtgagccgaggtcgccccactgcactccagcctgggcgatggagccagactctgtctaaaaataaatgaataaatggacaggttacgttctgaggcttaactccaaacaggctatgtcatcagtgtgtgtcagtgacgagggagatagccaagcatgaggctgcacggggagggtcactaggccagcagagccctgcgcctcagaacaaagcaatggccctgcacagagaacatgggctcactctgccgtctgctaatgtgtaaagataatgctcatcatctgtatgtatgttttgtgcagggtttactaaaaatatgagaatactgtaggaaaacatgattttattccttctaacccctaacatacgtaaagagtgaaggagatgaagcctttgcaagctatttctgccagcttatgaaaactagaattttaatattttaggcagaagattttcatatatacgaacacatatatgtacatgtatttggttaaaggaagtgggccttagtgctggggcatccaagtgtagaaagggtgaggctgagatttctattgaggacaatttagtacttgggttgtgagccaaacacgaagaaggtgggcactgtgatgtgtaccagcaggctcaatgggcacgttacccagcgtggatcacaggtcgattctttcaaaggccagagatgaagataaatcagtctttgctaaaaacatcccacggctgcgcgttacaaaggcatattttgcttcagtatgtaatttcctcactacttaactataaaagtgtatcagaattgaattctagggctttttctaaatgagagctgagtcacaggtatctcggtgctgtgtctgcagactaaagtggatgactcacatctgtaaaattctgagagaaagtaccaaccgaccccttgcttagtcatcttttgcatggatgctgggttcatgagctctgtaaactataatgagcgatctagccttttaccatctctttattcttttctaaacagtacaaattacatctctaaaaataacttcatctacgcaagtgagtcacttcaacctaacaagcttccacaagttactcagctaaattgtactatttactgkgaaggtaaaaatcttgttgtcatattagtcccatttttttctttctttyttttttttttttttgagataaaaatttggtagacttggaaaagggaggaggtttcagcaaatgttttaaaaaacatatgatttactcctaacctctcacatgggcaggggttgtgatggggctggaggaaggaattctttgaaaactatttctaacagcgcatgaaaatcagaattttaatatttcaggctgtagcttaagcaaagactctgcaattttctttgtgtgagcccatgcgtaagctgtcctctctgcgggatgtttattggctgttggaagagatatatatcaataattctatttgctttaaaatcctgatctgtgaaattatgacatttttgacgagagacccagccacgctaataaatgcatatgtattaaatactaatctttgctcttccaggagctgatcactcaccacrccctgaattctctagacacacaactaagctttggtactccacccgtttactgtgtagctttccaaccccgaggcctgcctgctggtctttagcttgcctttcctggcctggcattgtcagctctcagcagccccaccccaggcctatcccagttaggcaataggtacaatggaggcaagagcaggtgacctgcatgaggcttataccttcacaacctgggcagcaatactgaaatatcaaagcactgttaatccacactctagcctcagtcaaagtggactagaaggatttctcattcatgtttggccaggaatgaaattactaataccaacaggcctagaaagtttccactgctgtttcagcttctcctttaagacatcagatccgttggcttcatccaaatggccacgtgaacaacctttccctgtgcatgggggtgctttagaagaggaaaatgaaatcactggtccatctgaaaattccccaggaaatggactgcaaagcctacttcctgactccaacgaaggcagaggctgagtcatctaatccctcccgactagtattcacttgacttgcaccaagtaggtcagctggagtcgtctgaattctgctctctgtcctcgtaagcagccaccccctgcagtggagctactggagcatgctgggtctggtctcttctgcgaggtcttcactcagcctcagcccacaaagttgatgttacataacctctcctaagtttctcttttctcatttgcaaaatgggaagagtcacaccatttacctctcagggctgtgacgatgaaaagggacactgtacatgcaagtgctacacagacttcaaggtgctctgaccactcagctctcccatttcagcaagtggttactgagctcttgtctagtgcctaacaccgggccaggcgctgtgcataacaaagagttaaaacatggtttagaagcctgggcaacatggcaaaaccctgtctctactaaaaacacaaaaaattagctgggcatggtgggtgcacctgtagtcccagctactggcatagggggttgaggtgggaggattgcctgagtctaggaggttaaggctgcagtgagccaagatcgcaccactgcattctggtcctgacaacagaatgagattctgtctcaaaaaacaaaacaaaacatggtttagatttagtcctggacctcagtaagcaaattaagcagaataatgaagcaaatacatatgacaattaaggaaccattcaagataacagatctcataattacgttatttggatcaagtgttattcaggtgggagtgctcggttagacagtgaagctgaagacagcttttaagaaatggtgcaagaaagatgaggaggtcaaggagaaaaagcaagaagggtcaacaaagaggccaaggctgagtgggagagaaagctggatggggaaggtgagcctgtctactggggaaggccgccagataaaggtggtgtcttgaaatgattaatgtggtggcaaggcccaagagccacagacaaaccagctggccagtgagctagtcctggaggtgacaggttataagcaagggtgaaggcacgggagtggcaaacacaggaatgagtaacaccttgcatttctatagcacatgacgccttcccctttgctttcatgtgatttaatcctcacaaacctccatgagctaggcagggtaagtgtcaatctcatttcacagacgaggaagctgaatctcggagccactgcgtggtgaggctgagaagttaacccagtttcctgactaagatgggtgctcctttgactgcctgtgtagcctccacacttgctgggtatcagatttacccatgaagctgttttattttttattttttttggagacagtcttgctctgttgcccaggctggagtgcagtggtataatctcggctcactgcaacctctgcctcccaggttcaagcaattctcgtacctcatcctcccaagaagctgggactacaagtccatgccactacatgcagctaatttttgtatttttagtagacacggggtttcactatgttggccaggctggtctcgaactcctgacctcaagtgatcctcccacctcggcctcccaaagtgctgggattagaggcgtgagccactgggcctggcctgaagctattttattaaaaccacacaagttcagcaaccaatcctccctaacccctttcagattgaacagtggaacagggagaggagagaagagaagaaaggcaggaggtgctcagtcctcagaatctgccaaggctctcaggggttctgacgtagtcagggcatgaaccactgcacccactgcactgtacaatgtggtacctaagtggttaagaaggagaaaagagacgggcaaatgagacatcattccaagggctgaagcctcagttcatagaaactggtctgccattaaaagctggatggagcagaaaatgttcggtccgtggaattgggtaagaactgtgccctaaacagggacgtcgtatcagctccatgtgcctgtgctagctcttatttttacccttcacagccagagtaagaaagttccacggcattccagaagactggctgcaagcagtgtggccatggatgacttcctgcacttgccctcctccagtgagacagatcccagcctctccatttcccaaacctgtatccctccacatgtcgtcccagccacgtcagtccccagttcaatggcctctctgtcaagccttccccagctccctcacgcagagggaggtgctcccttctgattcccacagaaccctcggaagtccctatcccactgtgggctttcttggtctcagaaacttccctgccaggcaatgagcagcttgacagcagggaccatcttgcattatcctgtacctctgggatgggacaggctcaataactgttggtttacgtggagccccgctgagtcttcagtcaaactgaaaaagttctgtccaattcttgactttctgctatgctcccaccactctttggagcaaaagtgagcttcacagaagtctgaagtcaccttcatttgactgttctgaattacaccaaggtctgaatccttgagttgagccagttcgcgttcctcttatcttgcagcctttgcctaagcaacaggctgtcccttttgttatgtggggttccatcactactccactttcctcctcaaagctacaagttttaaaggattttgcctaaaggatcattttcccatgacatgtccaaattattacacccagcaaccacatttctaaacctaaaacaaaaaacttgatatttaatttagtttttacaactttttcatggataagtgtttgatttctatttgtcctttgaattgaagttctgaacatattatggtcacagaccttcattgttgctttttgaacagtaagctggtctaaatcccagaaggaatcttttgtctcctcttcatcattcccagcctccaaagtggaatcttaaaaccacctcctcttggatgctttcccaaaagaattctcccaattctctaccagccaacataactctccttcccctccccttccaaaatgtatttgtatctaccacatctctccacacatgccaactgaaagttaatgctcttgaaggtaggaaccacctctacattccaccatgtgcctagaactgacggagtaatcatctgggataattaaacattactgattggtataaatgtcatgagctgagggtaattaccaagcttgagcataaatgcatacataaaatgaaactgaaacttgagaacttgttttaaatgtacaattttgaaactgataagcagagtctttctgtattgtaccatattgttaacctgcctggttggccctttcccttttaagtaatgactccataaaggatggatttggggtgatacatgccttctatatttatccaaaatccttttcaaaatcatgagactgcctctggtttaatatgtcaatggaatattcactgtaaagggcatggatatttaagagggttgtttcctttacaatgtgtggacagagctctcaaaatttctttctttgaaaaagaaaactagaaattatttgaagactgtgacagagtcatgtcactggaattggaagcacagctgtccctgtgagggcccaggccacgaggagaggaaatcatgttggttcactgactggctggggaatccttgaaggaacaaatccagggtgcagcaggaagttgcctgggtgggaggtagtggctcttgtccagcctgaggcctaatcaaatcaaacacactcgaccaccttgcatttacaaaaatctcctctatttgggatgctgggtgaaaatcctaagaccttacacctgtgtgcttctgaagacgtccatatatgtgaagcagctgcctccttttatctcaaacactgccaaacaccttagacatcccactgagagctagctatgtgcttatggacagctatcttccaaactgggaagaaccaaataagacacgctatagccttttgtttctccaaggctctggaacatattctgtacacattaactcggtgtgcctgcatctcatgtagacctgcctcctgaatcccagggaagagggcaagatcatatcagtataaggatcaagaaacactagcattacatcactgtgtgagtaagataaagcaaggcagaagagaaagagctgcatttgaatttggacatttgagaactkgtttaaatttggttctgcatttaccacctgtgggatcttaggcaagtcactaaacctctctgctatagaacggcaatcatgacttttatgttgcagtgtttcataaataacaactattagtgtgatctggattcagggctgaggctcttctgtagaaacagcagaagatagcaacagactgaaggaatagtcatgccatctgggtgaacagcaggtcgactcttggttcaggaaagacgaaggtggtatgtggttcaggtacagtcaaatacacgaccaatagcagcagcagccataactctctccaaaacataaagaccacacagagtgtgcacataggtgccagacaccactacttaaagagcttgttcctaggcctgctcctttttaaagagataatttaattttaagtttcatgaggggccaggcaaagtggctcatgcctgtaatcccagcactttgggaggctgtggcaggatgaatgcttgaagccaggagtttgagaccagtctgggcaacaaagcaaaaccctgtctctacaaaaaataaaaaatcagctaggtgtgctgggacgtgcctgtaaccacagctactcaggagactgaggcaggaggatggcttgagtctaggagtttgaggcagcagtgagctatgattgcaccactatactccaacctgtgtcaaagagcaagaccctgtctcttaaaaaaaaaatttcatgagggagggaccatatcttattcaagtacctgatacagtgtttggcccaacaggtgttcaataaaataatttctaataaaattataataataggcttaaccctgtttctcagcatagagtaaaggaaatagaacacaggctataaataatgtcaagacaatatgccttccagcattttcctaatatgtatagttggccaagtactactaagtactatcagtcaaatactattagagctcctgatgtcattgtcaatgtaaaaaaaaaaaaatgacaagaaaaaatccaaaatatctcaagattatttctattgaatagcctcagtttgtttctaatctttccacagcccatgttcacatctgtggcctcccttttatgggctctggagctgtaaatctgaaagaagacagataaggtagaaaccttgttaaacaaaatcctcatcaaaatgacaaacattcaaacaggagtggcctgcctttatctccagttaccacccagtttggatggagtctgtttcccttttacaaaaggtttgctgtatgagaagggaacattttacccaagagaccgaaagtcactcccaactaggtatttcccaaaggagttgtactgtatgttccagagtgcagctgctgagctaactatctgggttgcaataaaatgtcttgatttttatccatggttggacagattgagttttctgataaccccagtccatttccctagaaatgcaggtatgtatccacatgctgactcattccgggtgcagagagcacagagtctctacagagggtggagactgcaaaggcgaatacttccaagatggagaggagaagggggaagggagagagcaagaaaaaacaacctagaggagtgttctggattgactatttacagacagtttgccagcaacagataagggatggatcagggctggcaaccattactggggtggtttctttgggtcttttaagataaaagagatttgatatgtttattaagtaatgtggttaccctggaagctgggcatgtacttctcgtgataactgtatagcaattacttctgttggttacaagcctcagcttttgtttgctgaaatgttagatttggttatatctttgtaggtatgagatacttttaaagggatagtgtttagtaaatttagatatgtaaaacttgcctttcattggcaaggatcacaataacagctttgtaggatttctccgcagacaaataatctctacagtggacctcaagacttcatactaggattctgaagatgattgagtcaatggatgagtgtaacgaacttttggaaacttcaaggcaattaaaggaaactgcaggaggaccagaaaagatcaagaccagggcacgagggctgatccaaacaacgggggccggcatttgtgatcttgggtagagccaccccagtgtgggtcaactccacagcattaggaaaaccagtttatcagaattaccttctcaagcaatagatctgttccttgtcacattcttagaactaataaagacttatctttattactactaattataatgttttggttcattcttttaaaaattatgcaatatgtgacacataccaaagaatacttgtaatacacacttaaggtctgaaacacagcagaaaaacagaacatgactgaatctatgctccctctcagaacaaagacatgagccacaagctgaagcgaccttgccatccctctctctccattgtctccctgcctctctctccagagataatcactgtcctaaaatgcctgtttatcactccttcatttttgtttgttgttttttagagactgagtcttgataggctagactcaatttctaggctcaacgtatcctcttgtctcagcctccccaagtagctgggactataggcatgtgccactgcggccaggacaccttcacttttttagaaacatggctttaatgcagatttctatatccctaataaataaatggacagattgtctggttttgcttgtttttgagctctttatataaaaattctatcgtgtgtctcctggaacttgcttttttcagtcaatattagggttctaagatttcgtctttattgtgtatagatacagtttgtcattttcacagttgtataataatgtaaatttgacactatttatccattcctctgtcagtgaacatttgggtttttgggtttcttctagtttcaactacaactagagatactgccatgattattcttgaacatgtgctcatcaacaatttttcctttttctcctaggcatacccaaacaaatttcccagccttcctgcagtgaggtggagccaaatgactaaattctgtgtgttggagagataaatgccacttctgggcctgacccctatggcccctgccatgctggcctgaagaagagggtgcagtggaggatgctgaggccatagggaatggtggagccattagacagagaagctggtcccagaacttctgcaagaagcagagtcctcctttcatccataatgaccaccactgaattgacagcacaggaaataaaacgttactgtgttagccacagagactgggggttgcttgttataggtgttagactttcctgataaaaccaccatttcaaaatacattaaaaktgtgtgtgtgtgtgtgtgtgtgtgtgtatgtgtgtgtgtgtctagtcagtgtaaatgaagcaacagctgggcctgggggtgggctctgcctcctgcatttatgggggagtgagggacttgtggagataaaagcaccaggagggatcctcctagtggagttgttctgcctcttgattgtgtcaatgtcagtatcctatcctggttgttgatattgtactacagttgttcaagatgataccactgggagaaagtgggtgaagggtacataggatctttgtattctttctttctttctttccttcttttttggagacagagtttcactcttgtcacccaggctggagtgcagtggcacaatctaggctcactgcaacctccgcctcccaggttcaagcaattctcctgccttagcctcccacgtagctgggattacaggtgcctgtcaccacacccagctaatttttgtatttttagtagaaatgggctttcaccatgttgatcaggctggtctcgaattcctgatctcagctgatccacacgccttggcctcccaaaatgctgggattacaggcgtgagccactgcacccagccttttgtactatttcttacacctacatgtgaatccacaattatcccaaaataaaaagttttaacaaccatgaaagacttatatggtaaatatggagaagtattaacaaaactatggaaggcagttcctcctttgtttttggaaaacagaaataaagtggcatcaggtacagaggacagtccttagacccaggcgtgtgacaatgccaaccttttacccttggwttccttaccttaaaaacaaggacaatacctgtcctaccaacttcatggggcttggggaagatcaaattaaataagatgataaatgggaaagtactttgaaatactataagatcttatcactaacaatgaagagacatttctaataacactttgggaatgacagaggatactatcaatccacttacatttatgaatgaagaagagctgcaaagctgcaggtgctgagcctttgaattaactcagtgaccaagatggaggggaggttaagaactgcacatccatggcaataaaatatcaaaagcacttgctgcaggtgcagataaggtatgtaatatgctacttttcaagtcagaaagaagaaaggtggctgggtacggtggctcatgcttgtaatcccaacactttgggaggtccaggcaagcagataatctgaggtcaggtgtttaaggccagcctggccaacatggcgaaacctcgtctctactaaaaatacaaaaaacttagccgagcgtggtggtgtgtgcctgtaatcccagttacttgggaggctgaggcatgagaatcacttgaatccaggaggtggaggttgcagtgggccaagatagtgccattgctctccagcctgggcaacatagtgagtccccatctcaaaaaaaaaaagaagaaaactaagaatatgtacttatatttattttatttacataaagaaactctgaaaggcctaattaaaaaaactaacacaagtgacgagaagaacaagccagactgggaacaggtggggatgggactttgcctattgtgtatttaaaaaattaggtgaatatattgcagattcaaacaataaaattaaaaaattgttaaaggtacattcttagagagagtccctatgttttgtatgtggggtggggaggggcaactactttttgtttttctcaaaggcttagttccaagagtagggaagttagctgagtgttatcactagagtgtacgtgtgtcgtgtgtgtgtgtgcacatatgtgcatgcatgtgtatgaataggactgtacatgctggagaattctggtcaagccctacctctttcccatcccccaaagctggcaatacccaggagtcatggagaggggactactggagcagctacccgcttttcagttttctgacccttaggccattttgtttaagaacaccaattgatttaattgtgtcctatttatttatttattttgagacagagtctcgctctgtcacctaggctggagtgcaatggcctgatctcagctcactacaacctccacctcccgtgttcaagtgattctcctgcctcagctgcctgagtagctgggattacaggcgtgcgccaccatgcccagctaatttttgtagagacggggttttgccatgttggccaggctggtcttgaactcctgacctcaggtgatcctccgcctcggcctcccaaagtgctgggattacagacatgagccaccgcgcccggcctaattgtgtcttatatagggagactgaggctgatctaacacactttatagggcaaaacaagaccagaattagaagccacagtccttactcccactccttccctgtgcccactggtcagtacacccttgggtcaaatgtggattgaaaaactaatgctatctctgagtagcaaagttaagtctgggttgtttcaaatgactttctagttgttaaaacaatcaaacttgaaaagctgaaatcaagaagcaattctttcagattgtgttggttttctgaagcccccatgacctctggaataatgaaaacaatgaatgawgttggggtaaactgtctttgaacgttagcatgtaaagtctttgtgtttactctctgtggagtccactgagtctgcaatcttgggctgttcacctcccagaaaaatgggtcttttgaagtattttgtccccttggttagaggccaactcagcatgttttcatcttcttgtaaatacagtgttcaagcaccatcccatccaaatgggctctaccttctcattgactggttgtggtggaacagtatgaactgacggttttggcccactccattcttccaacataaaacaaagactatgccatttggagatgcttttgttgcgaccacaattcatttctgaggtctcaatcaaacaaaagctcaaggataaactttgcaaattctttttaatttgcctgacataggagacagtttataatacagatgaggtttccaagcatatagccaaataaaaaatgagaaatattagcttagccaaagagttttttttcttttttcaatacagggaatctgtgtatataagactgtgagttcctctagaaaaggaatgtcccattcagtcctatatctttagtatccagtatggtatctggcataaagaacatgcttacattcagctcttacctgggagtataaaaaaggcaaaccccatctctacaaatgttaagtcctataaactagataagattccatgtttaacctgaaagcctagctggaaagactagtatggaactaaacttgtatctttattggaaaacaaagctgaaacragacaatggtttagagcaaaaattgawgggtggttggcatttaaaaatttgaatgtaattgctagttctctggcctcaatcacactgacggattccttttggcaattatcttcactaggcttgcctgtatgcaaagtttctcattactggcaggtactgtggtttccctggagacgggggaattgttaatccaccttttcaacactgggagagttcaaaagactcatagtacaaagagaaagttccacagttgggagcatcagaggtaacactggggagccccgtagcacctcatttgcagaaagtaactagaaattaggatccctacccaccacgtgctctgaggttggaattctgaccatagacatgtgtagggtctggtagatgttacagaagagacagtacagttgtactgtgctccccaactcctttcaaatcatggcacttacccagaaaatggtactattttatggcactcgaggaaaatgggtaaggctggcagaggtcactcactgtgggctgcggctcccccaaggactgaagaggtcagtagcctatctgtaacctatccctaacccatcagtgtgccccagcacatggattgggaagctttagtaaactgctaggaacaagagatctggaatcagatggtcttggttcaaatgctctgtccttcagctactagctatgggacttctggcaagttacactatctggaggtgctttttgtaaaatggggataataagtagcccaacctcacagggctgttgagagaattatatggaattattgtaaagtatttagcacagtactttgcatatagtgaatactcaataaattatattatttatgcataacaatggtattattattaataataataatcccctcccctctcctcctctccttcctttcttttcttcttttttttttttttttgagacagtgtcttgctgttacctcaaataagtggaatcataccatattttttctttcgagagataaattgcttcacctttcatctactggaaggcaagggttcaagtttagccacaagtcattctcagtttagaagttactgcccaaagcctctttcagtacatcctaggtcgggccatctcaggaatttggatcacctctttgggaggaaaagtgtatcaacaaggtttcgagttccaagccacttcctgtccagtgtgacatgtgactggacaaaagagttcagccaggccaaagagttcagcatcatctggactggggacaaccagcagtttgcaggttggaatggactctaggttaagctggtgagagcctccaccacacctttgttctatgtgaatgttctctcatttattctttaactggatgtccacaggctcctaaaactcattatatccctaacggagctcaacatctccaactctgttcctcctaaagtaaaccttgcctaagatgatggcatcatcagctacctagatgcctaaaaaagaaacytgggaatcatcctatttcttctctgtccctcatcttctacttgggatcaatcacagtttttccagttctacttccaatatgtttcttaaacatttttcttcccctctatccctactatgactcctctagttcaggtctaatcttttgcctggactgtctttttaggtccctggtctccatcccaaatcatcttttacataatacctgaaaagtgtattcttataaaagcaaatatatgccacttttctactgagcactcttcaataactccttgctatccttaggataaagtcacatttgtcagcctcctaggcaacgttatatctgtgttctgccctctgactgcctctttagcttaatctcttactacttcttgggatcctctaaacatttaggagactggaaaccactttcagttcctcacctccactctaagatttcttccctctgtgcctttgtttacaccaggctctcagcttggaatgatcttatggccctcctcccttactgtgttgggtgacgcttcactgtattctcgtaacatctggtgtatgcctagaaatgcactttaagtaatatttctttgttattttcatatgttcattttccccactagattgtgagctatttcagacaaggtatcattcattctggtatccctgagtcttgacagtaccggaaccaaagcaggtcctcaaatacatgatgaccgaagggataaatcaatatataaatgaataaagtattgcataggtcaggtctggaggccactggaagggagggaagggaaggggaggggaggggaggggaaaggaggagaggggaggggagagaaaggaagggaagaaggaaggaaggacaaaactcacactggaaaggaaaaagtaaaactgtcatctgcagatgacatgatcatatacataaaaattctaagtaattggccgggcgcggtggctcacgcctgtaatcccagcactttgggaggccaaggtgggcagatcataagatcaggagatcgacaccatcctggctaacagggtgaaatgaaacactgtctctactaaaaatacaaaaaaaaaattaaccgggtgtggtggcgggcgcctgtagtcccagctactcgggaggctgaggcaggagaatgccatgaacccgggaggtggagcttgcagtaagccaagatcctcgtgccactgcactccagcctgggcgacagagcaagactccgcctcaaaaaaaaaaaaaaaattctaagtaatttactaaaggtcaatacacaaaatcaattatatttctatatattaacaattagcaatttgaaaatgaaaatttttagtctgggtgcagtggctcatgcccgtaatcccagcactttaagagactgaggtgggtggatcacttgaggtcaggagtttgagaccagtctgaccattatggtgaaaccctgtctctactaaaaatacaaaaattggctgggtatggtggtgtgtgcctgtaataccaggtatttgggaggctgaggcaggagaatcgcttgaatctaggaggtggaggttgaagtgagccaagattgtgccactgcactccagcctgggtaatagagtgagacgtcatctcaaaaaaaaaaaaaaaaaagaaagaaaatgaaaaattttgaaaacttcattcacgatagcttaaaaatatacttagaaattaatttaacaaaagatgtgcaagacttgtatattgaaaactacaaaacattgctatgggaaatgaaagattgaaataaatgaaaacatataccatgttcatgaaagggaaaatgcaattatttccaagatggcaattctcctcaaattgaggtacagtagattcaatgcaatcccaatcatgctttttgtgaagaaactgacaagctgattctagaacgcacagggaaaggcaaaggatgtaaaagactaaatgattttgaatacagaaatacaaagttggctggatgcgctgcctcacgcctgtaattccagcactttgggaggccgaggtgggtggatcacctgaggttaggagttcaagactagcctggctaacacggcaaaaccctgtctctactaaaaatacaaaaattagccgggcgtggtggtaggcacctgtaatcccagctactcaggaggctaacgcaggagaatcacctgaacccgggaggcagaggttgcagtgaaccaagattgtgccactgcactccaacctggatgatagagcaagactccatgtcaaaaaaaaaaaaaaaaaaaagaaaagaaatacaaagttaaaaaacttatactacacgatttcaagacctacttaaagggaaagcacagacacacagatcaatggaacagagtaagaattcagaaggctgggtgtggtggctcacgcctgtaatctcagcactttgggaggccgaggcgggtggatcatgaggtaaggagattgagatcatcctggcaatggtgaaaccccgtctctactaaaaatacaaaaattagccaggcatggtggcatgtgcctgtaatcccagctacttgagaggctgaggcagaggaattacttgaatacgggaggaagaggttgcagtgagccgagatcgtgccactgcactccagcctgggcgacaaaagcgagactccatctcaaaaaaaaaaaaagaattcagaagtagatttacacttatatggtcaactgacttttgagaaaggtgctaaggtaatttaatggggaaagactagacttttcaacaaactggatattagtacagaaaaaaaaaaccatgtcccttaccttataccatacacaaaattaacttgaagtggaacacagacctacattttagagctaaaactagaaactttctaaaagaaaacatttttaaaattatttgtgaactcggttaggcaagaattttttaagcaggacataaaaagcatggctcataaaatttaaaaatgataaaattgacttcatcagaattaaaattttttgctctatgaaagacacaattaaatattctcaaccaatatttgcagaacacggaactgacaaagggtttgtatcccaatgtataaaaaactcaactcaaaagtaagaacataacagcccaattaaaaacaagaaaaactgcctgggcagcatagcaagacctcatctctacaaaacataataaactagccggctaggtgcggtagcttacctgtgatcccagcactttgggaggccgaggtgggtggattatgaggtcaggagatggagaccatcctggccaacatggtgaaactctgtctctaccaaaaatacaaaaattagctgggtgtggtggcgtgtgcctgtagtcccagctacttgggaggctgaggcaggcgaattgcttgaacctgggaggtggagattgctgtgagcccagatcgcaccactacactccagcctggcaacagagcaagactcagtctgaaaaaaaaaaaaaaaaaaaaaaaaaaaaaaaaggccaggtgcagtggctgaagcctgtaatcctagcactttgggaggccaaggtgggtggatcatgaggacaagagatcgagaccatcctggccaacatggtgaaaccctgtctctaccaaaaatacaaaaattagctgggggtggtggcgtgtgcctgtagtcccagctactcgggaggctgaggcaggagaactgcttgaacctgggagatggaggttgcagtgagccgagatcgcaccactgcactccagcctgggtgacagagtgagactccatctcaaaaagaaaaaaaaattagccaggcatggcggtgcatgcttgcagtccctgctgctcaggaggctgaagtgggaggaacacttgagcstgggaggtagaggctgcaatgagcctgatggcgccactgcactacagcctgggtgacagagcaacatcctgtctcaaaaaaaaaraaaaaagaaaagaaaaaagaaaaagacttaagcagatgcttcacaaattaacttacccgaatggcagataagcataggaaaagatgtttaacatcactagtcattagggaattgcaaattgaagccacaataaggtactattatatatcctataatggctaaacttaaaaagaatgacaatatcaagagttggaaagaatggggaaaaattaaactctcacacactgtcagtgaaaatgtaaaaagtgacagtcatttggaaaatagtatggcagtacattactgagttaaaatacgtgcaccataggacccagcatttccacttctacgtttttacccaagagaattaaaaacatacgtccatacaaagacttgcacttgaattacgttcaagaagaactattctttctttcctttcctttttatttatttattatttatttttgagacacagtctcgctctgctgcccaggctggagtgcagtggtgcgatctcagctcacagcaacctccacctcctgggttcaagcgtttctcctgcctcagcctcccaagtaggtgggattacaagtgcctgctgccatgccagactaatttttgtatttttagtagagatggggtttcaccatgttggctaggctggtctcgaattcctgacctcaagtgatctgcccgcatcagcctcccaaagtgctgggattgcaggcgtgagccaccacgcccggcttcttttctttcttttttctttttactctgtaacccaggctggagtgcagaggtatgaacatggcttactgcagccctgacctcctgagctcaaccaatcctcccacttcagccttctgagtagctgagactacaggtgcatgtcaccacactgggctaatttttaaatttttttgtagagaaagggtcttgcaatgttgctcaggctggtcttgaactcctggcctcaagtaatcctcccacctcagcttcccaaagcactgggattacaggcctgagccaccgagtctggcctagcattattcttaataactaaaacttggaaacaaataaatgttcagcatctggtaaatgcataaacaatggaatgaaaaaatgaaatactactcagcaataaataagaacaaaacattgacacacacaacaccatggatggatctcaaaaacgttatgctaagtaaaagaaatcgaaaacaaaacagaatcaactagagaaacagaaagtggtcggtggctacctggggctggaagtcaggggaggagaccaactgcaaaggcttacaaggacactttttaacataatagaaaatgttgtttgtcttgatggtggggctagatctatgcctgtatgtggttgccaaaatttaagtgttcacttaaaatggtgaattttactatatgtaaattatacctcaaaaaagatgggaaaatgtactctatgaactcatgaaagctgaatctgtgcagttgctgagtatacaatatgcaaatggaaaagtcattatacctcaaatcagggcattattttctgttattttccttatgctaaacatcaggccagtactgagatgccaacagtacaatactggacatgtattgctgtaaagtacttacctgtccaggccgggcgtggtgtctcatgcctgtaatcccagcactttgggaggccgaggtgggtggatcacctgaggtcaggatttcgagaccagcctgaccaacatggtgaaaccccatctytaccaaaaatacaaaaattagccaggtgtgttgctgtgtgcctgtaatcccagctatttgggaggctgaggcaggagaatcgcttgagcccaggagacagaggctgcagtgagctgagatcgtgccattgcactccagcctgggtgacagagcgagactccatctcaaaaaaaaaaaaaaaaaaagaagtgagccatccaaacatatgaaaaatacttaattgaattttaaggaatttcgtttctagtcctattcttccactaatatcatgcatgaccttgggccaggtactcagccaatacctcagtaaatgataagagttttcagagattctcaatctgaggtccatgcatctctcctcattgcccctgaaagcgtccttggattcagggcatctgggaatttggatgggaaaatgtgtatctttacgcattttctttacataaatgtgtatctttgtttttacaacctttaactgaaatttagcatttccttctattatgaatataggcaacaatctgcagtggctttagcagtaataactttggtactaatagaaatcacaggtatttttatatcaaattgtaagtgttgcccatatctcaaaatattatttacatttatcactatttcaaaattatggtggttattagatatgctactggatattactatttaatgtgttaacaaagaagctatgtatctgctaaagaaatgatatatctgattatagatacatctctatatcataactttttaaagatttgataacaggttccacataatcagtttcctttttagcacagtatattttattttacgcaaaatacactgttctacagaatggatccacggaattcaccaaaggaatctttggcacaaaaaaaaacacctgttaaaaacttctgagctaggccaggcgtggtggcacacacctgtaatctcagcactttgggaggctatggtgggcggatcacttcagctcagaaatttaagaccagcctggggaacatggtgaaactctgtctccacaaaaaatacaaaaattagctgagtgtggtggtgtacacctgtaatgccagctactctggaggctgaggtgggaggattacttgggcctgggaggctgaggctacagtgagccaagatcacaccactacactccagcctgggtgagcgagtgagaccatgtctcaaaaatataaaaacaaacaaacaaacaaaaacttctaagttagatggcctctaactgttcattctagtgctaagaattctattaaaaactagcattaagactggatggcagctgggtgctgtggcttatgcctgtaatcccagcactttggcaggccaaggtgggtggatcacttgaggtcaggagttcaagaccagcttggccagcatggtgaaacccccatctctgctaaaaatacaaaaattagccgggcatgacggtgcatgtctgtaatcccagctacttgggaggctgagtcaggagaatcgcttgaacctggaaggctgaagttgcagtgagctgagattgcaccactgcactccagcctgggcaacaaagygagactccatcttaaaaaaaagacggaatggctcagattctaaatgaaataactaaaaacactttttctcctattttctaaagaaaggctttcaagattcacggattcttacttgttcggatcctgatttgaacaaagcaagtgctaaaaaaaacccacgtttgagacaaatggggaaatctgaacacaaactgggtattaggtgatattaattaattagatgtcataatactatcgtcaatatatctttttaaaaaatccttatctgggctgggtgcagtggctcatgcctgcaatcccaggactttgggaagctgaggtgggaggttcactagaggccagaagtttgagacaagcctgggcaacatagtgagactctgtctttatggaaaaattttwaaaaaattagctggcatggtggtgtgtgtctatagtcccagctactctggaggctgaggtgggagggtcccttgagtccaggagtttgaggctgcaatgagctagatgatcactctactgcacgttggcctggtctacagagcaagaccctgtctcaaaaaaaaaaaaaaaaaaaaattgaaaaaaaatccttatctgttagagatacatagtgaggtatttataggtaaaacaacatttcccttgcatcaaaatattcaggaaattaaaaaggaggcaggatagaagaaacaaggtattcaaactgcgatatgggtgatagcggttcactatatttttctttctactttcacgtttgcttgaaatttctacaataatttttttttttttaattaacaggttctcaggacagatccaacccacagaaatgtctggatttattcagttaaaaaaaacaacaatgggctgggcatgggcrtggcggctcatgcctgtaatcccagcactttgggagatcgaggcgggaggatcacctgaggtcaggagttcgagaccagcctggccaacatagtcaaacacygtatctacaaaaaatacaaaaattatttggtcatggtggcacatgcctgtagtcccagatacttgggaggctgrggcaggagaattgcttgaacctgggcagcagggctggaatgagccgagatcaacaatgaagaggatagaaaggagtgtgcagtttgccacagttcctactcctccaaccgtcttagaacctgggctactcccacatctaaatcacctctttctcaggaggcatttgaccttgtaggttaacatgaactttgtatgacaaaccattataactgaccacattcactatgtctaaacaggttaaatcacgtttttggtaatcagtagctctttcattccttaataagctgcttagttttgttctttcaatggccaaaaatgaatccctaccttgagccagtagtttgtgccacaggacaggggattataagtgaacaacctgtcacctccactgaggaacaactccagcttaatgccccgttgtcttcagaacagtaatgtctctgctgagacatccactccattcctgagagatgagatagtctccatatctctctgacctgtgcatggctgcagacactgaccctctgctcttgttcttggggcttacagggtttccgtgaagctctaaaggcttttgaaatttatcacacatacctggggatactgtcaaacaattatctgaaacagyagagtaatgtagtttagcacatgggatctagagtctattcctggatttaaacactagctctgtcatttaatcttgctgtgccagttttgttatttgtaaaatgggttattctggtaattaacctcagaaagatgttctgcagattaaataacataacatatgcaaagtactgagaacagtgtctagagcatggtatacactccatactttttttttttttttgagacaaagtcttgctctgtcacacaggcctgagtacagtggtgccatcttggctcactgcaacctccacttcctgggttcaagcaattctcatgcctcaacctcctgagtagctgggattacaggcgcatgccaccacacctggctaattttcttttttttttagtagaggcagggtttcaccatgttggccaagtcttgaactcctgacctcaggtgatccatccgctttggccacccaaagtgctaggattacgggcatgagccaccgcactcagccttcactccatacctgtgaactgttattgctattattttcaacaacagcagaagctctgcaccaaaacataataatgcccatgcttcaccaatgtcaacagtactttaatattaattctaagaaaaggttatactgaactacatcaataacataagagttactctgtaaacagcttcctttctttcactgggtaagatgacttcttgagttacagttgttaatttgacagcatgtcaaaaatcactgagaagtcaaaattgctaatttttcaagacctttctttgatcagaaacacttgctttggcaattacttaatccaataattacaactgaaaagattcatacaacatatataagagggtacaggggaaaaattcattgcatgattgtgcaagtgatttacaaccttcttccttaaaagaaatcctttaaggtcactaaaaaggggtcatgtaattctaaggtattataatgaagacaatattcccagtgaagattaatccagtaagttctcaaactagtgtcagaaattacaaaacaggctttctggaagtaaactctaaagatgaaacagaagtttcaatttgagtcaaaatagtgacagtggttgctgaaggactggagctctctgaactgtaaaccgggcgaagggtgtgcttgtgtgtataatcaaaagatgaaaaccactttgcctagtagagctaaccactttcaaggaagtctcagtataaaaattaaccaaaatgtaaaagtatctaaaggactcagtagttcccataattaaagcaaaaaggcatttagtaaattttcttttatctttttccatattcttttatcattcggaacaatattagagaactgactggtttgatattttgttgataattaattttcattcctgttgctttgatagtttttttgctttttttttttttgagatggagtttcactcctcttgcccagggtggagtgcaacggcacgttctcggctcactgcaacctccacctcccaggttcaagcgattctcctatctcagcctctcccaagaagctgagattacaggtgccaccacacttggctaatttttgtatttttagtagagacagggtttcaccatgtttcggctgatctcgaactcctgacctcaggtgatctacccaccttggcctccccaagtgctgggattacgggcatgagccactgcacctagcctgatagttattaatactagaaatgataaaattaaactaagaatctttatgtctgatatgaggtaaacatggtaattctaaaataatattacactttctatagatttggcttgaaacaaattctaacacatagcattgtggttcttaattttaattattttactgattccgatttgcttttcaagtatattcctttatataaagatgtgatctgtatccaaaaaagtaagcaggttttgagcaacatcacagttttggttttaccgatttatgtagtagccatcttgtttgttgagtgctaaatattctacgacgaaacactgtttctatagcgggcagatgaaagtctacctygcttagctcaggaactgagtggctgctactacgacagctttgtgttttagtggtgaggtgacagtgcgacatcaatgcaaataatttccttggttatacyaggaattggagagcctgacaaaatcagagctcggcagaagcatttgtagcaataaacagaagcttctgatttttacttaaaatttcaaaagctgtcctgatttctaatttattggccttgattacaggcctataaggaaagaattatttaaatgactaccagaattagtctgaagttgttgatttcctctggcttaaaaaaaaaaagtcttaccagaaactgtgttctctgaaaaacaaaataattgctttccttttacttaatgtcaactgaaaaccaatgaatgaacaaatgaacaaacagatagttaaagacaaatacagaaagaataatactaagacatctgtgtgaacattagtcatttaaaataaagaaaaacatcagagtaagaaccttatcattcattagactgaataaacactgccaccccagccccaatcctacagctctgaaatggaggaacacagcaatcaaagtcttgcaaagatacactggaaataatgtgcagggcaaaatccaaagataactttttttctcttttaaaaacataagactgtggctgggcgtggtggctcacgcctgtaatcctagcactttgggaagccatggmgggtagatcacgaggtcaggagatcaagaccatcctggctaacacggcaaaaccctgtctctactaaaaacacaaaaaattagccgggagtggtggcacatgcctgtaatcctagctactcaggaggctgaggcaggagaattgcttgaacctgggaggcggaggttgctgtgagctgagatcgtgccactgcactccagcctgggcgacagagcgagaccccgtctcaaaaacaaaacaaacaaacaaamaaaaaaaaaaagaaaaaaatatatatgattgtttatagtaatgacagaaaaagctatattgttgtgtttatattataacatatatacatgtaatatatatgacaattaatagaacaaataagcgggaggacaaggagcaatgttgctatattttaccagaatgaaggtattattaatcttaaggcaattatgttaaagatgcatattgtaatctctagaataaaccgctaagaaagtaattcaatattagatagctaaaaaaaaaaaaaaaaaaaaaagttcaacaaatgcccttccccttactcactgtgctccagccacgcctgcttcagcagagctctttgctgcctcagggctcagggcttttgcacagggactgccttccctggaattgccttccttggctgtctgaatcactgctaaggtctcagcggaaatgtcaccctctataggaggtcttccctatagaagcatagggaagacctcacagcatctcctcacagcatcttcctcatcttcctcacagcatctccttcttattctctattcatagccttttactttgttccatcacgctatttgtcaccttttgaatgtatatatttgttaagtttatgtctttattgtctgtttttctcattagacttcattaagaaagamaagaagctgggtgtggtggctcatgcctgtaatcccaacactttgggaggctgaggcaggtggatcccttgagcccgaggtgttttgagaccagcctgggaaacagcaaaacctcgtccctacataaaattagctgggcgtcatggcgcttatgtatagttccagctacttgggaggctaaggtgggaggatcacctgagcccaggaagttgaggctacagtgagccatgattgcaccactgcactccagtctggagagagagaaagaagacctcccccagaccaagacatataacatatgagcctctctcatataactgtgtcttgcataaagtagacaagtcataaaatatttgttttaaaaatgcataccattgtacttcaccttgacctaatcttttttctcatcaactagacaagaagttggcaaacttctgtgaagggtcaaatattttaggtcttgcaaaccatatactgtctctgctgcatattcttctgcttctttctgttttctaagaatccttttaaaatataaaagctacccttagggcagggtgcagtggctcacacctataatcccagcactttgggaggcctaggcgggtagattgcttgaggccaggagttcaagatcagcctgggtaacgtggtgaaacccggtctctactaaaaatacaaaaattagccgggcatggtggcacatgcctgtagtcccagctactcgggaggctgaggcagaagaaacgcttgaactcaaggtggcggaggctgcagtgagccaagatcacactaccgcattccagcctgggcaacagagtgagacgctgtttccaaaaaaaaaaaaaaaaacaagcaaacaaacaaacaaaaagctatacttagctcaagggccctataaaaacaggctgacacgggatttggcccacaggctgtagttttctaatttctgtgctatgttactgtaagtatcttaaggtcaactctgagttatatacttatatcccctaatacctcgcatagtactgagcatgcagtaggttcttagtaaactcagaactcagttaagttggaggtagaggaaaacaagagaaaaaagtggtcagatttggtctaacaggaattttaccagggagaaaaggcctacagtccaggctgaatgactcaaagggtcatttaccaaagatttataggtaatggaaaaagacagcttgtcatacagtcacaaatctcaatactcaattgtctccccttctaagcagcaactctgctcctgtagacagctgcctccttgtgtgtctacttacagtgcagttgactgggacccacaaaaaaagcatgtagcttttccccagaggattttttttgttctgttacttcgccttgctatctggttctcttgccacgctgcattctgaaaagctactagtggaccaggcgcggtggctcacgcctgtaatcccagcactttgggaagctgaggcaggtggatcacctgaggtcgggagtttgagaccagcctgaccaacacggagaaactccgtttctactaaaattacaaaattagccaggcatggtggcgcatgcctgtaatcccagctactcgagaggctgaggcaggagaattgcttgaacctgggaggcagaggttgcagtgagccgagatcccgtcattccactccaacctgggcaacaagagcaaaactccgtctcaaaaaaaaaaaaaaaaaaaaaaaaaagaaaataaacaaaagctactagcttaaaggtaacatctacctccagaggtaagcataatttggcaaatatggaattgcctatacaactgctatgaataattcttagatgatggccaggaaagtttcctaaaaatagtttctggatgggagcaagtttctgatcctgctacagttccaagatttgagacatgctgaaaatgaatgatgtaaggaaggaataagtggatggaaatgctccatggccacaatcatggccacagtccccactcctggaactgccagaatgccaggatgttgcagtacctcctgagagatcccagaatctgtgcaatgcttttccttaaggcaatctgctttttcaaagtctggcaaagtctgaggtcagagctgtctgtctcaagaagagtgcctctttcctctagcatccaaaatgcacataattattgccaggagctatcctatcaatagcaattatcctgggcccgaggagaatagggaggaaggggagaacagagatgctatttcatgtcctgctaggtcttcaacctccatgaagtagtagaggcagccacaggggaatggctctatttccaggcacttccttcctccttttcacctcttgagatctcagaataattcactgcaatgttctttgttaagtctctgccacctcatattcccctccccatcttcatggaagggagaaaaaggaacaagtggtcccttgggcattgtaaccaagccagcagatgcttccaaaggaaggtaagtgtcagatgcttaactgcatgactaagtaaaacacattatctaaccaagcttcactccgaggtagcaagtcctatattttagataagaaaaaaggaaatgggtgaaaataatttatttaaagacaggctgtgagttagtgagggagcaggaaacagcatcaaagtcctttggttcacaggcagggtcttatctgccagaagagccaacagtgtggcagtgatgctaagagacagggaccaaacagccgggggagtacaggaataagagctccaggaaacactggaaaaagtcaattaaacaactcccaaggtcccgggtagctgttctaatgagtacctgggggttctatgtttctgaagaaggtaattcaaaatgaaatgaaaagatgactttgggactcaattctgcatgtctgatttggaaaagctaagatagaaaggcagagaaggagctgtaagaaatactgaacacatggtaccaaggagaaaatattctgtggggaataaaccttcaaaagcaacagcaatagctacattactgaatgtactgacaaacgagttggcaggagctgagaggtgaatgttcttttatctctgaccatcattgcaagtgacaatttcttcttgctagcaaccaccagaatagtcatctttgagttgcatgtggaaaacataggttataattgagcaatgccatgaaatatatttttccccttattctgatatgatctgacatcaacagaaagtagaaccatggctaggagactaaagattcaggaaaaaagacaggctattatgtcacttggagatgaaggaactggttgaagcattcatcttagtgtttgcaattgtcctgctgtgatggagttgtccacagccactcaggaggcacgaggccgtcaccaccatcatttgaggtaaggcccaggtccctcttgagctgggttaggataatcacaccagacaaccttcccaagtcacaagagatatgaataaattaaggaagcaatcaagatctgccgttgggtcatcaggttacagaaagaatcactgggaccaaggtcgtaaggtaaagtgaatacagcaaataggaagtgagatttcacaaaggaattaagccacagaatgccaaaccaaagcaaggatatataaggtcagaatcaaaagtggtggctgcagtaccagtgttaggctcagattagtagggccatcgaagacactgagcaaagaggagattgccaggaggccttgattgtggggcttcctccttacctggccccacactgtaggttatgatggtgacaaggtgcctgacaccttgaaaagtggtgattgttgggcaacacctcaaggcagagaggcccatctccttaaaactgtggcctgcgctcgatcatctctatatgaattttaccatgataaggttttacttagacgttttcttctttctgccactatggatgtttttttggtttctgcccttactatctattggtgtgtaatcagatagaaaaatgaacttaagaactattttaaccaaagcaaatcataacgaagaaggtaaatctgctgcagaagaaaaatcccttaaagtcagtatctttacactgtctgatgccttggctaaatacagccaaagttattcctcctgcagtagtttattaaggcatagggtaagttctaaaagccatgggtttgagtgaagtcaattcaaacccactgcttttctctaactcaagctgggaaagttggctcctttgccttggcctgaagactgaacattgtacgtaccaaattactgcagaatgaaggtctcagttgacttgcaacttgaacctgactccatgggtcactggttcttacataatcaggaaataaaaagactctaaattatctatcaagagaaagctgggtcgatgtttacagactgatggattaatatgtgacaaccaccattaggtatgcctactacgcagaagaacatgaagaaatgatgttggggatacattaaaacattaccccatctttaagttatgtattacattttatcaaagttgtagacttttcattgaataaggatgataaccaaatgatcacagcaggtatgtttccaataataccaaaagtcttgaggcctgatactggaaagataattagaaacagaatctgtttagggtaaggtttctctagcttggcaatactgagattttgcattcaataattttttttgtgtgtgtgtgaggggctgtcatgtgcattgtaggatgtttagctgcatcactgacctctacccattagatgccagtagcaaatccccaccccctcagtcataacaatcaaaaatgtctccaggcattgccaaacgtcccctgaggtgcaaaattgctccagtggttgagaaccaccggcctagagatattttctccttaatatcccacaataaatatatatatacgctacagtaaaaggaaccgagacaggacagaaaaggttctagtactgattattacatgtggtttaggacatttaaaaatgtatgctgacatgctgacagcaaaagtatactcactgtgtacaagaaaacaaaaatctttccacatcagcagcagagtgagttttgtaaagccttctgcatcatattccacgacacctctaagtaataaaaacatacacacacaaacaaaaaaaaccctcataaaattaaggtataaaagcaataaaaccaagtaaagaatatattcgtgaagtcagggttattgactttgagatgggtttaaggcaagtgaggattaatgcaggaagggcctggggtttggaatgacagtatctaggtttaagtcacagctttgccattgactatctactatgacctcaggcaaatcacttaacctttgcagcctcagtttccttacctgcaaaacaagtataaaaatatttgcaaaattcattacagggttgtgaaaaacaadrtaaatcataaaatactatacaaatgtgagttattacattaattatgagtagaaggacatattaagaaatcaagtcagcaatgacactacaatgccaaatgtcagcatactacctgtacagtgattgttaagtctgactttcactgggcactacatagtaatatgcaatgacagtattactaaatttagtattatatattacttttcttcttgagctgggttagggcaatcacaccagacaactgtgtcccctttcactgtgttcccctgtccttcccactgggcttaaggcaaagtagcaacactagatgggtggatgctgggttcaggaagggagatgcatatttcatgtgtcaaaagaaaacatcccctgacctctgaatgggccaaggcgcaattctgtagcctcaactcatccatttccctcaagagctgagcgcctggaggatgtcgccataatgtgacaatactaaccacactaaggacagatataattttctttctcatccatacaaggaggactctgatgtccttagagatgccttatccctgaccaaaccaggccaatcagaccactgatattgatgcccgcccagtttaagttggaaggaacagttataccccttataaaggtaaaagaactaagatactgaagggtaagtgatctgctaaaaaatggttggtatatcattcagatcttaagtcgacaattctttagtttatatttctatgaatttatttattttttttttgagacagagtctcaccctattgcccaagctggagtgcagtggtgcgatcttggctcactgcaacctctgcctcctaggttcaggcaattctcctgcctcagccttccgaatagctgggattacaggcacctgccactatgcccggctaatttttttttaatttttaaatttttttgagatggagtctagctctgttgcccaggctagagtatagtggcatgatctcggttcactgcaacctccgcctcccgggttcaagagattctcctgcctcagcctcccaagtagctgggattacaggcacccgccaccacgcccagctaatttttgtatttttagtagagacggggtttcactgtgttggtcaggctggtctcgaactcctgacctcatgatccgcccgcctcggcctcccaaagtgctgggattacaagtgtgagccactgtgcctggcctctctatgaatttataattagcccaataatgttatagtgctgatatcaatacttttcagatcctgcatcccacaggcaaagacaagtatatagtcctttttagtatactactgtactacatgcataataaaatgtacacaaaaaagtacattaaaaaagtgagacttgaaagcaaatgtcaatgtaattttcatatatttcttatacttcaatagagtgagctgtgtaacttctggggtgtgtgtactacattttggaggccactgtgctagcttcttcatgtttaattatatatactaaagataatcttacttaaaaataagaagatcaatggtattatttattaaccactatttgtatcaaaagtactttctcaaaatgttcacaaagctgaaaaaaatcttaagtattaaagactcatgtgagaggcagtcatactgtttggttattgacacttctatttcggagaaatgaaaaattccattatgggaatgagaaaaatgtcttaaaattggtttgaggagtcagaaattttcttataattgtgccatggtttgaaaattatatcccagagggtgacaaatcattttcttggtttcatcttctctccctattcctaatttccttatttaaaattttaattttgtattactagatatatttatatatttataagccttctgtggaataaggtgggctatcatcagacctctaaaatccttagtgcctcgttaacgacaatgggtagaatgttctatcttctaaagatcgtgaggaaaatgcattccctgtctcactgagcaaagcctgagaagaagcttgatcaggcctctgacttacttaaggaaacagggctgcagggcagcacagccacaggcagccagaaggaaagggcaaaggcacagggatggagcagccagaggcgcccatggtgtcacaggcttccctctcccctatcggtgcttgctttcaactcctaacctcaagtgcgagccaccgcttttgcatcgaatgctggatttcctgcccggatctgtgtggcactgttggcagtggagtcctagcaggagacctgagtgctggggaaatggggttcctgccctggctccacttcttctaggggcgcgacttccattgggttactgaacttaccgcaatttcagagcttcttcaacaaaatgtgccggtgatgcctgcctggttcaccccatggctactgtgagggcatggaggtgaaaagtgctatgcaaattgtagagagttctacaaaaagtgaccgttaccaccattactactgttgagttcagggctgtccaggctgctgctctagggaagatatttgattctactatttgccaaagagtaccgaaaaaaaaaaaaaaaaaagggatcctgggagctttggtatgaacagcataccaaaaaggatcaaagtggcattaaaaaggtatcatgtggggctgggtgtggtggctcacgcctgtaatcccagcactttgggaggccaaggtgggcggatcacaaggtcaggagtttgagaccagcctggacaacatggtgaaaccccgtctctactaaaaatacaaaaatttgctgggtgtggtggcccatgcctataatcccagctactcaggagactgaggcaggagaatcgcttgaactcgggaagtggaggttgcagtgagccaagatcatgtcattacactccagcctgggtgacagagcgagactgtctcaaaaaaaaaaaaggtatcatgtgtaagaactaagtgctattttcttaatcaagcccccatgttgaggtcatcagcaagcgagggcatcaccggtatatcgttcaaacagggcagaacttacgtgccaaagtgactgagaaaagcagcaatatactctcttcttttgtgatacccttgaatcacgtactgcacctggaatagaaacccaaagctgagaagtagagtgggaatcttttaaatgctttattataagaaatttcaaagattcagagaagcagaaagaatagtaaagtgaacaccggtattcccactacctacattcaacaactgtgactattgtgcctacttgcttcctccagccatccatctatctatcaacctatcaatcaacacttcaaaggaaatgagagacatcatgacagttcactcttaaatatttcagtatgcatctctaaaaaataaaactttcttctacataaccacaataccattattgtacccaacaaatttagcaattggtctctgaattcatctagtaccctgtccattttcaaaatttcctaattgtccccwaaatgtttatttttattttttaattcaaaagaattaaaataaatggtttttttttgttttttttttttttgagacagagtctcgctcttgttgcccaggctggagtgcaatggcgcgatcttagctcactgcaacctccacctcctgggttcaagtgattctcctccctcagcctcccaagtagctgggattataggagtccgccactatgccctgctaatttttgtatttttagtagagacgaggtttcaccatgttgggcaggctggtctcgaactcctgacttcagatgatcagcctgcctcagcctcccaaagtcctaggattacaggtgtgagccactgagcctggcccaaaatgttttttaaaaaacaatgtatgattaaggatcagccatttgtttttaatgccttttaagtttctaaatctataataaatagtgcctccttgagtgtgtgtatgtgtgtgtgcctgcatgcacatatatgacactaatttttcaaataaattgggctatgtccagatgtggaatctcactcatataatcccagtattttgggagtctgargcaggaggattacttcaggccaggaattcaagaccagcctcagcaacacagccagacctcatctctacaaaaaataaaagaaatattagctgggtatggtgatatgcacctatagccctagctactcgggagcctgaggcaggaggaatgcttgagcccaggagttcaaggctgcattgagcttagaaggcatcactgcaccccagcctgggcgacctcatctctttaaaagagcaagatcttatctcttaaaaaaaaaaaaagaaaaaagaaaacaaattgtgctagtagtcttgtagaacgtctcaattctgttttctttctttttcctttactctctgtatttccaataaattagaaattagagctaaagggtgattaggtccaggttgaacatttttggcaagaaaacttcctagatgatactgggcctgatcacttggctaaggtgacaacagccagacccctccaatggaagggaatgctccctctgccacagtgaatagtctatggacataccctctgaagcagcggaaaacctagtttcccatcaacctttcacctaatggttttagtatttactggagatccttgtctgaatcaatgatttcattagggactgcaaaatgatgatttttgaatcccatcattccttttgcatacatcagctgacatactctgtaaagagctttctctcatcaaatggggttatttggttatcttgagctcctattaaaaaaggcagaataatacttctctcattttaaaattctgatattcagaataaggagtattacaataggagattttattttgctttgcctttttatatttcctcattatcacccaatgacagtttctataaaaaaattgcaaactcattaagctaggcatctgaaagttagtcatttacccaccagcttctaacacgaaaacacattccttataatgttctcatgatggctggaagaaacagtgggaaggagagacccccaaaattgtttatattggctatagccacactgagtttccatggctaacaaaagctcaagataaagtgcttgaaataaccttgacacaattggtactgatagccatgttgaaccctttaaatgtaaaacaattctatttatataataggggtttatgtcaatttataaaaacagtgcttactttgcaggcttaatgcgggatcagaaatgttattttgagaaaagaaaaacagatgataagtttgcttaagtggctttgtttaaaaaggggatgaaaacagttctgtatacttgattttaaaaacagaaaaccattttaacagaaacccacaacaaaactggctataaagatagattccaatataattatggaaattcatttgaagagattgtttctaaaagcagcccatactgtcctcatttgtagcaaacagaagaacatcaatttcaaaagacaagtaaaattaatgaaaggaaaccagataagaaaaattgactgattcttatatttctgggaaaacggtgttataatttttttttgaggaaaatgtatgactagaaattaatctcaattggagagctttaaaaaggcttttcttctccgttctagaagaccaaatttgcatgtttctctataattctgggacacagatttgaaggcagtgcaaagccccagaatgtaaataagaattctgtcctccgatcagttttgcaggagggcagaggctggggagatttggtctgatgagaagcaacccctgcatgagggttaaagcctggaatctgtgccaggcccacagacggtggagttgctagattttagtttctctgacatttgaaaaataatactgaagctcttgaaatattattgtacttttaaactattttctatatagaagtgagctatcttttgagtgaaagagacaaacaaaagatctatttttccaagccaatgtgaacaagtcaacaggagcaaagaaattgcactctggcaactaaacaaactgagtcacagtccatgtgggagaagaaagagagtcagcattgtttgtgcatcagtatcactagttttcagctaaatatactagctggacattaacaagtatattcttacactttttggaaatatctaacaataaccgttagactcagctacttgctaatgaaatggctcattgatgtagctaagagaagctttagatcatctgactgagtataagaccagctgactggctgggcgcggtggctcacgcctgtaatccyagcactttgggaggctgaggtaggcagatcatctgaagtcaggagtttgagactagcctggccaacatggtgaaccctcatctctactaaaaatataaaaattagccaggcctggtggygggtgtctgtaatcccagctactcaggaggctgaggcaggagaatcgcttgaacccgggaggaggttgcggtcagccgagatcgcgccactacattccagcccaggcgacagagtgagactctgtctcaaaaaaaataaaaataaaaagaccagctgacttgggaatcttacccctaggcacaggactctggtgaactgctcccagatatgacgggaagaatcaaaggctgactattaaaaagtaaggtacagaaacrcagagagggatgaaggtagttttaaacaattacgcggataccaactactgccaaacacatgcacacacgtgtgcatgcactggataattgggaagcaatggggttccaaagttttaaagtttaagaaggtgcaagatctggcaaaaactgggtaaaggaaattcaagaaagacgtgacttaaatcccagacataaagttaagagatgaagataagactggaaaaggaggtcagaatccttagaaaaggaagaaggagggcaaagaaatggggagagaaacagattaactgtaattcacagtaggaagggcaggtgtcagatggaggctgaaactgagcagtcggtccgagaaggatggagcatgcacgatgattttgggtacgtggtggactggaggaagaaatctcataagagggatgagttggggacttgcttttaccttgttggtgagcaggtggcatacttgaggaacgtaatcaatgagacatcctcctcctggaaaagctgggatatgaagagctgaggagcctccaagtgcactgaaaggacaagagtacaatggacacttctcttagggctcaagcaacttaagaagtgacacccccaagcagacttggcttctctcatcaaagtctggccaccaactgcctaggttaatgatgatgggtatatgggcttcactttatgattacatttctgtattttaattcatttaaataaattagcatgtttgcattatacatcattgataacacacaacagtacaaattagaaaattttgattggcatgggtaaatgtcttaccaacattaatgggctgtaagtattactgaaacatayttttatactcttcattatgcccaattctttgctgggcacagataagttattcattaaacattgaaactgaactaaaatgaattgctgcaacactctagttctacagsttatcggccattatcttgtatttcaaaaggtatacaagaagctgcagtcaataatcactgatccaagcactaagacacaatgttgattctgaaataatttccacaactttcagaaattccttctttcaggccaggcatggtggctcacgcctgtaatcccagcactttgggaggccaaggcaggaggatcacttgaggtcaggagtttgagaccagcctggctaacatgatgaaaccctgtctctactaaaaatacaaagattagctgggtgtgtggtggtgggcacctgtaatcccagctactcaggaggctgaggcatgagaattgcttgaacctgggaggcggagattgcagtgagccaagatcacaccactgcactccagcacgggcgatacagtgagactcggtctcaaaaaaaaaagaaaaaagaaaaaaagaaaaaaaaaaagaaattctttttttcagtttaaatgaaccagcacacaattattaaaagaaattgttcagaactttaaggcgtacatttcatttatcacccttcatcttgacttcatcttctttcctatgctcactttccttttgccttagtttgtttttcttaatttcattttaatgcatatacttctataagccccctaaaccctctctgtaatatgatgggatatttttaaaaatccctaaaatcccttaatgttgtgattacttcttaatgttgtgattatttatttataatgttggattattatccaagaccctgcagttacaaggttgtaagtggaagaaaaaggtgtgacaataactgcctagaaaatcatttctaaagagttcagggcagccggctgcagtggctcatgactataatcccagcactttgggaggctgaggttggcaaatcacttgagtctaggagttcaagaccagcttgggcaacataggaagacttcgtctctacaaaaaaaaaaattaaacaattagccaggcatggtggtgcacacctgtagccttagctactcaggaaactgaggtgggagatcacctgaacttggaggcagaggttgcagtgagccgagatcgtgcctctgtaccctagcctgggcgacagagtgagaccctgtctcaaaacaaacaaacaaacaaacaaacaaaaaaagagtttagggcactttgactcagtctagggtttgtgatacagggagtatgtatgtgaatgtgcatatatatgtataaaacactactaaaaggactccaaacccatcctgtctccctattgactacaggtttctgaaattaattttcctggtaaaaataaattttgtggggctgggcgtggtggctcacacctgtaatcccagcactttgggaggctgaggggggcggatcacaaggtcaagagatcgagaccattctggccaacatggtgaaaccctgtctctactaaaaatagaaaaattagctgggcgtggtggcatgcgcctgtaatcccagctacttgggaggctgaggcaggaaaattgcttgcacccaaggaggtagaggttgcagtgagcagagatcgtgccactgcactccagcccgggcgataaaagtgagactccatctcaaaataaataaataaataaattttgtgtttgctcatgcaaataaaaagtctaaatgaacaaaatctcgagtgacacaaggaagtcaatgtggagtggaaatattcagtattgactttttctactcagatgttacctaaaagcacaactctgacagctgagaaaattataagacagtgtttgactaagtatgacattaatgaatcatctgcattctgcaactgcacagaatcagcaaggccatcatttccttttgctacgcttagagtaggcattggattagatttagcctaaactctaaagatggctaggaaaattcctgtgacttcctataaacaagaggaaggctttttgtctcctctttgtgtatgcacaaataacacagaaggcacacatctaaccagaaggttctaatgatttcataaggatagaaagctgattaagaaaaaaataatccacagtgcaagaaaaataaatacaatatttatgtcctgtaggtacaggttgaatatctgtataacatacagaatggcaagatccaagctactcatcgctcacttagagaaacaatccttggcataataaaattctgaaaaagaaaataagctggatgcttccctggagttgacagtaataggctttgacttatataaaatattacaagagaagtctttaatcagtcattaaattatatacatggaaggaaaacagtctgagtaatcctttaaacttgaaaccctctccctctctctgcttggattgtgtcattccgaaatacagccgttagacaaaaattacctgtaatgatggagaaaagcagaggtgtgaagagatccaaaggccaggtgttctgctgccaggcccatgtttccgcaccctgcttcggtcactaccaagaactaacacatgttgctaggtgctttatcacattatctaattaaatgctctccatagttcaaagaggtgggaagtatcgctgtaattttacatgtgaaaaaaacgaggctcagagaacagaaaatactgcctaggttcacacaactagacataggtaaaaccaagatctgaacacaggtttgcctgtcaccggagttcaggctgtttctgctgaaatatgttacctccctgagaggagggggattttaatcatggaagactacagggatgggaagaaacagtaggtctggctatcagggagccaggccagcatcccaaatgatgaggggctcctagaggcttcagaccgtcaccaaagtagacactgtgatgtacggctcatctccgtttacaatttcccacacagcagcaagcaggaactcctcttaattttgttcatacctcagtactctcccaccccaaccaccaaacaatcagattcatttgatctcaaatgtgatggaccagacactctggcaggtctgattctgaatgacttggttggctgtctggggtgagcctcaacaggtgcaaagcactttaggcactacgaaagatagttttaactgagagtttattttttaaaggacgtcatttcaccctttatttaacccagtagtttcttagcttgtaagcgtccaaaatctacatccagtgtcacacactgataagtgctgctgattcatgtataaatatcagcctcatgggtaaatatttaacaagcttgctatagcctgaatgctgccctgatcatgctgaataaactaagtaaagtgccatgaaataaaagagtcattatgttttcagagggtgcaagatggtggtaaggccttgtgatctctaattctttaatattcatgaatcaaaaaatattgggctgagcatgtacaacaggaaactcaccctgtgcagagattccagggctcactcaagacattcccgggactgcagggctggctgaagagaaggcagggcctgactaacccactaagtggctggggaagaattatgaggagatgaaagggaccacttggcactgatacttctgatccccagagtggtgcggggaggaagcgggtgagaaggaaatccgtgtggcaagggctcaggcttaacctgggaggagaaaagggtgatagggctgttctgatgagaaggtaccttctctctcttcatggaataaaataaaacatgaaattagttgatcattcttagaactgaaacttaatctgtggatataaattagaaggatgaggccagagttttaaaatcttttccagtggtaggggtaattaaatagatgaaaatgaaaccagaaaagcatttccaggtcagtcttgttggctctaaaactcaaatgtaagaactgtctatactgaatgtattaatactagtcttttccatgcaaatgaaactaatagagccctttgtgaacttcggtctgtctgcaaattatcacatctctcatgcagtcatgagccacatgcaacatttcagttaatgatggaccccatatatgacagtggtcccataagattacaataccgtatgtttactgtccttttcctatgtttagatatgtttagacacacaaatacttaccattgtgttacaattgcctgtagtattcagtatagtaacatgctgtgtatgtttgtagcctagaagcaataagctcaccagatagcctaggcgtgtagtaggctctactatctacctaggtttgggttggtacattctatgatgtttgcacaacgacaatactgcttaatgacacatttctcagaacgtgtcctggccattaagcaatgcatgactgtattgaagacttaacttggctgcaacgtgacggcataaaggaattgtttttattttgacttagaaaaatgcagggagtcagcctgtctgaaagcttggcttgggacaatggggttttgattctgacccattatgaaacagcaactccccttcctcccacgtggggttttaccttactggtcaagtaaaatgagcaaaacataatttagactggagaaaatcagaagggctagtgattcgcaatcataattcttgcttctatcaagttttctttctttggttctactcaactttctcaccagttcagtgggatagcaccactctcaaagacacctgaccaggcacagtggcttgggcctgtaatcctagcrctttgggaggctgaggcaggatgactgctccgggccaggagtttgagaccagcctgggcaacatagcgagatcccatctctaaaaaaattaaaaattagccaggcatgatcgtatgtgcctatagtcccagctactcaggagcctgaggcaagaggatcagttgaggccaggagttggaggttacaatgtgccatgcttataccactgcactctagcctgggtgactgattgggactctgtctctttaaaaaaaaaaaaaaaaaaaaaaaaaaaaaagacatctctctcaaagcattagaatggttagagtaccaattagagttacattaacacaaaaatagcaccaagcactccaagagagactttactctaaaagtcttctctgtccaagggtcatgacaaggcgttgtcagagacatttgggtcagccttagcatcctgcttttgcccctgaattgggttctgagggagaggaagttgacctggctgcctcctccacagtatgattcaggagccgttggaagttgaagcatggaaaggggaacatccaggatgtagaaacaagcagcctgcagactccaagctaagagaaatcctaaagcaatgtgtgctgccttcaatccaattcaacaaacactaactgtatgcctaactatgtctaaggacttgagtttcccattctgaacacacgactagggtaccaacgataagtccttccaaagtagaggaatgccagggacctcaagaatctggggcactctgtaatactagattatgtttcctggtggcctgccagcagagccattaccatgaaacaactcactgttatttattgagctcccacttttgccagacactctactgggcattttgtgatctctaaacctcacaacaaccctgccgtgtagacctaattagccccatttacagatgagaaaactgacattctaagagtctaagtatcttatccaagataacccagcaagtaagttgtagaggtgggcttaaacccaggtctttctggttccaaagtctatgtcctttttcattaggaattctttcacagaaagatgaagtagaatttttaaaagtctaatccctaccaatatactgaaatagtagaataagtgattaaaatcgtcttcaaagcttttatacataaaattaatcaccttgtcatctcactttttatcatcttaaagataccatatgtcacaacaaagtaacctggtgggactaaaaaaaaatcattcatagttctgaaaacccagaagaacataaatattaaattaaggagaggctccagttttgttttcttactttcttcttcttttttttttttttcctgagacagggtcttgctctgttgtctgtgtggtggcgtgatcacggctcactgcagcctcaacttcccaggctcaggtgatcctcccagctcagcctcctgagtagctggaaccacagatgtgcaccaacatgcctggctaatttttttttttttttgtatttttagtagggaaggagtttcaccatgttgtccaggctggtctcgaactcctaggctcaagtgatctgctgccttggcctcccaaagtgctgggtttacaggcgtgagccatcacgcccggacttgttctgttttctagctaaatcttttttttctagcaaagcattttctagacctgttgttagctctcaactcattttatagattcaactttgagccatctcaagagtgtcagtccttcagttaaacaaaatcagggtgtaattcaatatggagaaaatttaagtgagtacaataggacaagaaaataaaaggagatcagaaagacgagttaagtacaccagtggaagaaaatctgggtattcacatggaatcagaggctcatggaagcatcaattcagacctggctgtattacatttgtgactaatctaatatttctactaaacacactttatagctgtaagkamggactctgtgagagtactgtattccactttttgtttctcacttttaaagggacatataaaaatggaaatgttgagacaatgacaactatgattaagcactcagaaaacattcctccttggagcaaagtctaaaaaagttgaaatggctaagttaaataactttaaaaatacaccattattaaatggagtaattaaaaatatgggccgggtgcagtggctcatgcctgtaatcccagcactttgggaggccaaggcaggtggaccacttgagatcaggagtttgagaccagcctggtcaacatggtgaaaccccgtctctactaaaaatacaaaaactagccaggtgtgtggtggtgcacacctgtagttccagctacttgggaggctgaggcagaagaatcacttgaacctgggaggcagaggttgcagtgagatgagattgtgccactgtactccagcttgggtgacagagcaagactctgtctcaaaaaaaaaaaagaaaaaaagaaggcatactactatatggataattttgatcagctgttctctgatgaggcacagtataaatgagaagagtttaaaaggcattaagaggaatttagttggtaaatgaattctccacagaacagagtagtgaataataactccatttactaagcactaatgcatcatgtcctgtattaagtgcttttcctctatgatatcatctattcttcatatcaacctatgagagaagtgttatcccatcttacagatgagagcacgggaacttcagagaagctatagaacctctctaaggtcatataggtggtaaatgacaaagaggcatcgaactccaggtttctctcacttaaatctaccccactcttaggtctctggttatcacttttgtgacttctatgtccttatctgcatacttgacatctggttccacatgtgacttgggtgttttagtagatgcctgggctggccaagtccttgagggtgtttccaggaatatttattaaacttattttggtacctgaactgaagtgattagttcagggccagaggacttgatggacactttccagtagaaagaaggtggaatgcaagcaaagaactttacatttaaaaaatatgaaagatgagactattgtaattgcaaacagagtatgtctaatggcatgaaccctaaccaagtctttgttcagaaatgtgttttgtaagtttgttaacatctcaaacaagcctttaagagggcagtaatcttaacagatgtccaccatcaggattttcttagcatgtggaaaagtattttaagtaagccccccaaaacaataacagacttagcagatgttgttctactaagagttggtatgaactacttgtaatgatgcccagtcactcaagacacgaaaagggtaaggggaagaaaagttttttttttctcttgttgcatcttgattccaggcctactacctgctgttgattgcattacagtttctttaagaagtgaaactattttcaaaagccagaggtcaggagtgagtgaatttactatgagtttgttataaaactccaatgaatggctttactgctcttaaataggtacagatcacttttcctatgaattacctttaaaatattttccctggaaaaaaaaacagtgcatacaatagttatcctagactaacctacaaacatttttctaactccttctttctcactgcacacatgttttaatgatggtccaagaaagatgtagagaacaagaaaaaagccttctgcctttccaggacacagaagggtatctacctgatttctattacctggtatttactaaaagttcaggcacataaatagcactaggtaacttcacgtgcacatcactggtctctgtgttcaagaagtcaatctgtaggtagctaaagcttgacctccacatgaaaatgaaaagataccagaagatgagattagcacaggtttccaaagtgctccttgcttgagtttttacaacacctttacaaaacaggtagcaagtgtcaacatactcattgtagagagaagaaagaaacctgaggcttgagatggatgatttgtccaagctggaaacagtgaaactggaattgtaatctttctctgtacctggagttttcatatttgcttaagaataatctggagggggtgggagggcttgttaaaaactcagatacccagatcccaccccaaagaaggcaatttactaggtttattcagcaggtcggaggtgagacctgggaatgtgcatgctaacctgttccttagtggatgcaggtggtcctcacaccacagtttgaaaaaatactgctctagacctcatgcaatgatgcacggccagggctggaatgggaaggggtgtggtcaatgcaaatgtgcctcccatccccgtggcatgggatcactgactacttgaaaggcactgtggacaacaggaaggtaaggaaaacacaggtctgctcttaaggcctagtatgggagataagacatttattgaaactaccagaaaaaaggtggtttctgccagatgtacacatgggtaaaatgagtgtggttatattcaggtaaacagaaggcaaggcaaggaagcagtcaaatcaaaactgaggctggaagtaacgaggacacagacactacttaacaaggcagggcaatggatccgaggccaggttctcaatgtggacagcagaccatgcgtcctgcaccacaccgagcagctttttgcccattgagaaaggcatatttcatatttcaggctgcccagggtgcctactggtgaggggtatctacctagagaggaagcaagaacagggatagatcctgatgcgatgccaatggtgaactgcaaaggaaagaaaacgtgaggttaaaaaaataaaaagttctgtttagttgtaaagtgagagatgttctggagattaaaaaaaaaaatctgggctttgagattgaatctcagccaggttcactgctgaaatttctcctttaaactaacaaattctaaatgttatctgtctggctcaggcctttcttgaactcagaacttgtaactcaacctgctcacaagcaaccctgcccccaaaacctactcccatatccacctcatctcagaaaatggcagcttctatctcttggttcccagaccaaaaacctctgtcattgctgactcctttctctcacaccccatagtcaattggcctggttggcctaagaggcgcccactgagagcagggctcagaacctactgaacttctcactggggctaaaacctccctggataagctggggcaatttcacctcagggcactggcccagttctcctgctgttctctctgcctggaactcttcccagccatttgcggggcgggcttcttcacctgcttcaggtcttactcaaatgtcagcttctgagtgaggcttcctgaaccatctatttaagataagccccttccatctctggtacttggtcttctgtgttgtcgttttctccgtggcataagacattctacacgtattcactcatcatctccccccatgactcctcactagaatataatctcctccagaatgaggatctgcctctgttttgttcacttttataacctcattattcttagcaagaataatgccaagcatattagacacttaaaaaatatttgtagtattaaagtccaatgaatataaaaaagagatggaagtcaaatttctaaatgaacattaaaagccaataaatgtatatatctttatggaaatagtsattatggaaaagaagagtttaacggtcttggaaagggattggcaaactttttcagtaaaaggccaggtagtaaatattgtcatctttgcatccataatgcctgtattgcagctacttagctctcctgctgaagtgcaaaggcagccgcagataatatgtaaatgaatgagcacggctgtgttccaacaacattttgtttatggatactaaaattcaagtttcatgtaatttttacgagtcatgaaacattattatttaaatatttttctaaccatttaaaaaatgtaaaagtcattcttagctgtgggctggatttggccaggaggttttagtttgctgactcttgatctaggattatagaaatatttgacagttctacagatgctgaaagtacgaaaagtatccaggaagaaatataggcaaaccccacccccctagaataggttattagcaaaaatgaaaagaggccctttggtcaaacttcttagaagctatattccatcagcaggtaaaccacaggaattagcttttttcaggcaagggtgaggtgagcattaggcaactcgtggactgtgggagttctcacaaccatactagattgtaactgtgcaagagggagctatttatatgattttgaacgaagcttgaggcatattctggtgctttttaacttctatgttaggtgaaaaagctgcytacaaaagccttcctcccacccaaaatactagctgttagttggtgactgatcctcagaaatattaacatgaatcatatatgctcttttcacagtgcaaaaagagataattttaacactcagaaaatgtcataaaccacacaatagagaagctatccagccttcaaattgtaaataaataaaatcctgttcctgcatggaagcctcttcctcctttcgattctgatgcttcctcctctggattctgatgcctgcagggctggctggtgttaaccgtgttcagtctgatgctgaaggcagcctttgctctccatccttcctccctggcgcccacccttgttagcccgactgtctttgggaacccatagcactcagccttgccctttctctagctgctgctcttctcacctacagacagcttgtggctgccctgtctctactgcgatcagcccgggttggcctaagcagcaccagytgagagcagggctcagcctttatccaggcttcaggaaagaacccctgagttaattttcttcttcctacttggagaaacaggtatttttgtctttgatccctaagctctgttttctttctcttgttactaaacagttcactccctatccactctcctttttttgcaacttcatcatttttccacattgcaccgtttggcacaggagaaggaaagaaccacatcaaataaaggaatgcaaccacaaaagctgccttgagaaacagggccccagatttttttttttttttttttttttgtcaatttaccgtttttggacttgttctcccataatcaaatcctccctatcgtgctaacaatgtggtggtgtgtcaaaacattggaattctgcttcaatcagcaacccagagcttaataggaaaatgaagcaacaaaatgttgctcttactgttaaccttaggctaggcctgtccttaggatggggactgtttgcttctttatggtaaatgggccaaacgttcagttttgtgagagcttgcattgtcagcagaggcccacagcagtgtcttgagcaccattcaggcacgcttctaaagctcaagtaccgcaaactgaagtacgaagcatcccacaatttagtaagccagagaagagttaagactaaatttgtttgcaaaaattttaaagacacattcattttactggcagcaagtcaggggtctggctctatgacactcatgtctgcagttatcacaaaagggcttgcgtgaaattaaagtggttgttttgtttcttgtttttaaattaaaaatgtgtgcaatatgtaaaccatttagggacaacaataaggtgccacaattccaaaccaaaacatttgcaagtcaccactctatgtcctcagggagtatgtgatatagttaatgtttctaatattcatcatcaatgaaaacatcagttacaggtagagaatttctgatttagcaattttttaatcttttgtgattaactgggtaaattaaactgtttgaaggtaagtatttttgttgttttggtttggttcacatggagtcatgtgccactttggttaatgtgggaaatagcctcttcttcaacatcatctgttgcatatacaagcagtgagtagaagtgtatctgtccctgaacaccaaagtagtgtgacctcccttcagagatttctcttggggagagaggaaggggtgggaggagacataccttttctcccacccttgttcyagcatagcatattggaatctcagggtggagaaatgtgttatttgaaaagaaggaaaaaagctcatagctggttctgatatggactaaaaggacagactacctgactgccccacccctgagaaatgctgtttcaaccatacagaaggaatcttctatcctcagaagttaaagacctcagttaataggtaaagttgctgctcttctaattttggcaacattcagcctggccccagttctaccttgaagagccgagttattggtgtcattccagttgcccattgatcttcctgtcccctctggagacctctactctcactcccaccacagctgcccaataagcagagagtacgatcaagtcaaggcggtgaacaatgaagggaagaagggcagagccagtttaaggggctgtaggcaggtgcttgcttgtaaggaccctctctcctccccattctgctgatgcagctcaggtgccaagcccgggtgcctggccctggtgccagctactgccccaggaaatgtccacaaaggtgagcatggggagcaggacacagacactggatgggggcactgtccccctctgcagtgtgctccccaaaccagctggaaagcaggaggaaccattttctggagcagactgggaagagggaattgaggaggctataagtgtggttagtgttttaacaaaaataagatatattcagtagattgctatcatttcaaaaacatttgatcttactaaatatcctgtttacttaataacagggaagtgggagttcagttctgttaatatccatctgtgcaaaactaggaatctatttctaaataacataatttatttacctgcatcttttacttttaaaaaatatccactaatttaaatactatttttagccaattctctaaaatagaygattcaaaacagccacaatagtaacaagggcccacacttccccagacagagtgcggggcgggcctgcggggaagcagggccagggtgcctcatggtccaggctgcctagaactcaggggaacctgtactgaggcgcctgataactccagaagatggatgtgtttgctttctttaaaccagtgacacaagacacaacagaaagggaaagatttagtcaggaagagaaggggttctgggaactgtagacaaggacaatgccaatttaattggccaaatataattgaggttggcctaataacttttttggaaaccactttcttggttgcttgagaatttggattgctactgttttcttaaggcttcaaaaccaaaacactaaacatgtactaatagagcagtattaatagcacaaagrggaatgcaaacatgacttatgagaaaagttgtatggctggcccatagctattatctcctgcccctgcagcatgtgaaggtatcaatactgcatccatggcatcaatgggccgaaagtagtttcgctcagactcacgtggaatcacatgttgaatattcatagcttcacttctggaagctatgactgttttaccctgtatggcaaatgggacttcggtgagatgtgataaaggttaaggaccccgacatgaggagattatcttgaattctctggttgggctctccatcaatctaggcctcttggtgtaaggattcagttcaagacactcttaactctcaggattcctagtactctccaaaaataacacttccacagaaccctgtgtaggcatttagagtcttagaggagagggcagggaagggttcacaacttctgggccatccggcaagtgctgagcatgagaatatgtaaggtccaccacagagcttccggccattcgatggggccccaggctcacatcagcacctccctttcccaacaagaccaagactgcttctcaatacagtctggggctaactcaggacaacttgcttttctggatgtttcctcatttcattaggaaccaacttgggatcagggtcactctggagcaaggcgagcccttaagttcgctcccatcacattctgaaactgttaagctgcaggcatgctcattgcctgaacaacaaacacaccaacccaactctagacttgaaacagagattgggcatattctgagtgacttctgcctcctaggcaggcgaaggactgaagacaaacactggagagaataaatgacaagttcatatgagtagaaccaaatcacaaatgtaaacgacaaatttcaatcaacaacaggggagctgaacacattatagcaaagtcttccagtggagtaccatacagccaccaggaagatagcagccttcaggttctgagggccacttaaaaaatacattcattatttccattcagacaaatggccatgatatattggataggaaaaatgcaagctgcagaatagtatgtaatatgtcatacatttttttgtggctaaattaaagcaacaacaacaacaacaactaaataaataaataccccaaactgatttaatagggcaacactgcaaacatactaaatcgacgtacttcgtgtttctcagtaaatcatgtttcccccctgcactttcactgaggctaagacttgaggcccactgtcccaaggaagagggtggcaccacccaagtcagagaaatgccagcacagggaagaagaaggatgtggcaccggatgagcacatccctcagacaggaatggaaagaaacaaaagcagaaaggggagaagtttagagggaaaagggactgcctggtgtcccagaggttttccttgggtctcagtggagagagagagagagagagaggaaaaaagggaaagagagagagaagcagcggtggtgaaaggagagacacctaggttaactgagggaaatccaagtgaggagttttttacttcacttcccacttgggaatcgacgagatcatcttgcagaggaagggagtattacagtaagacacatgatcacgttgcattttgtatagttgttcttttttttgacagggtcttcctctgtcacccagaccagagtgcagtggcaccatcacagctcactgcagccttgacctctggggctcaagtgatcctcctacctcagcgtcctaagtagctgggactacaagcatcacacctggctaatttttgtattttttgttgaagcaaggtcttcctatgttgcccaggctggtctcaaactcctgggattaagcagactgcctgccttggcctcccaaagtactgtgattacaggtgtgacccaccacacccagttgtatccttgttttatttatttttttttggttggtattggaaagctataactgacacatattacttttgtaatacgagagacagagatagagacagacatagagatggrgagagagagagagaggcactaaggtatataagaacacagtttgattgtgaagttgagcttttttaattcccaaagactatggaactctatgttattgatctaaaatctactactatttagaagaacatcaatagcagctaacacataatgaacattttccatgagccaggcattatattaagagcttcttttatttatctttatttaacccttacaaaagccctgtaaggttgatatattgtacaaatagcagtaaggcttgggaggttaagtaactgactcaaaagaactcatccagtaaatgacggacacaggactgaaccaggccatccgatttctgaacccacacattccrctgctgcgctacacactgcctcccaccacagaccagctgggcttcgacaatcagttcgttttgctggtgtgtataacatcaaaagatccaatcttaccacacaaacttgtttggtacaaaatgaagaagaaatagtgactagctagtgaaagcacgtcgtcagaaacaggcccaggtgctgagacaagtgagggacaaaattcaggaaacagcagcactgagccacaactcatccagtatcattttttctcaccggccctgatttttctcaccaaagtccctgcagccagcagcagcacagcttcattttgcagcagggacacttgagcattaaaccctacgtgcttgcttggctccgcagcggctcaagcaaccttcaagcactatttttgaggctctgttacgacaacatcatctcttcagcccccactcttgattacaagcctatttcttttaactaaacataaagcaatttctcactgaagcttctttgcttgtaatcctctacccggttttttttttttctgattaaacagaaagaagtaagctcctagcacaagccttgaacacaggtaggcatttgtggtaggcagaatgatggctccccaaagctgccaaaccctcatttctggaagctatgaactttttaccctacatggctaaagggactttggtgagatgtaataaaggttaaggaccccgacatgaggagattatcatgaattatctggttgggctctcaatccatctagacacacgagtccttaaaagtagaagaggaaaacagaggagtgagtcagagaaatatgatgacagaagaagaggcaggaaaaacttgaagcatgagagggactggacttgccattgctggcttgaaggaggaagggggctatgagccaaataaggacagcagcctctagaagctcaactgacctccgcaaaggaccagatctcagttctgtgactgcaagggactgaactctctgaacaacctgaaagagtaaggaaacagattctccactagagtctccagaaaggaatgcggcccactggcaccttgactgtagccgcaggagctctgcactggacttctgttctacagaagtgtaagataatcaattggcatgggtttaagctgctaaatttgtggtaatttgttacagcaacagtagaaatctaatatagcattcaaaatacaactgttttttgatggaaacatgatgaaatgaggctttgtttatgcagcaaaataatgacagtaatggtgtgtgtcccattgaataaaacagaatcaataaatcccctctgaaacacatatgttaatggataaataaataaatgaggaaagctcttctttacagtagaaagccaactaataaacgtagtaagaaagatgcagctgaagaatcatcaatggctgtcaaaactagtgggtgaaagtctgaggaagacatttacatagtctcaacacatcactccacggagttcttattaaagagaaaactagtaacattagagtgcagaaaccacagagacaccacttaaccaggtgatcaaagtcaacatcaccaatcccgggacaaactgacatcatgtgacttttgatatgttatactcaggacagacacatcatgtcacacatataaatccgattatgaggaagcatcaaatgaacccaaattaaggaacaagatgactgatatgtactcttcaaaaatgtcaaggtcaagaaagataaagattaagaaactgttccggatttaaaaaataaagagatataacagctaaagacaatgtgtgatctggcttggatcctggtccagggtaaaaaatagctaacagggttattagtgaaacaactgacacaattagaatatggactgtggattagataatagtactgtgtcaatgatacactgcctgatttgataactgcactgtggttatataagagaatgtccatgttcttaggaaatacattctgaaacatttaggggtgaagtacaatgtggccccaatttactctcaaatagtttaggaaaaaaatgagcagatacaaaaatgtaagtacatagagaataaatacataaggcaaatggggcaaaatgtaaacaattagggaatctgtgtaaaaggaataagacagttccttgttctrttcttgcaactttttctcttttaagtttaaatatcaacataaaaagttacacaaaaatccctgtaaactaccctttaaatttttatgtttatattagatccactgttatatgatacagagaattttaagaaagaaaatatgagttcaatgagtttagttttctcgaacactgtaactggctaggtgatttttttcaattaatgctgttaatatgtgataatgccttgcacacagtaggcaagcaataaatacctatagactgaacatcaagcaatttacttctagtaggaaagtcagcatcccaagtaaaagcatggagatatatggcatgatatgacataaaaactttaaaaaaattaagctgaagtgtgaatgaaccagaaaaatgaggtggttaagcacccttgctctgaaattggactggcaatgtagagttgaaattcagtttcatcacttagtatactgcccctggggcaagttgtttaaaacatccctaagcctcagtttgcttatctatgaaatggggataataattaggttcgcagggctactgtgaaaattaaagaatcactctccaagtggtcccttccttacagttcaactggatgctcagaaatgctcttgttgaacaaactgacccatacagtacttttgagtatagattgttcctcacacataaaatgcctctgagcattatttctgcccagccatatccactgtcttccaaagcacttaaatcagtgccaatttatgaaacttttcttgaccattatgatattcaatcactctatgactcattcattcaacaaatattaacagatatgacagtaaacaagacactgccatatcctactctcatagaaagtatatgctaataagagacaatgcaataataatataagaaagaaacagaaatatcataatgtcaaagagcaygacaatggaygagggcagacggcaggtggcaactttagggcaatcggggaaagcctctctgtggaaataaatttaaactgagactcaaatgataaagtggagccaaacatgtaaagaggtggagaaatgaccttctggcagagcgaatgtgaagtacaaaagccctgaggyggaaatgaggctgaagtgtttgaaacacagaaaggggccagtgtggccaaagtggtgggtatcggggaggtgggagaagaaagagtcaaatgtccaggaaaaggccagattatgaaggagagggtaagttactggggttttattctacatccacgatagggttttataactgtttctttcttcttatggtgaatatttcatgggcttctctgagctctctacacagtaggtgcttaataaatacttgtgagtgcataaggtagaaaataagctaggagggaaatggagccaacactctgtacgatattggatgttggcttctgtcactaacacgtacacatgctccatcaacctgaacttcagatcaataggtctgttatactgcatgaaaacagagttgtcatggcaactctaattagatggttttcattccaaggaagatgaactaaatactgcaattacaggctggtttggttctctaaaatacctgcaaaaattgcaatcctctaccagttggaacatttagtacaagaagtacccaatttaccaacaaaaggagtcactagagttggcttatttgttaggagtttacagaatgcattttcctctagaaataatattgtaaaggaggctaggttcttaggacaacacatgaaaacttcttaaaaattcataaagtggcagaaatactgtacatttgcactgagaaaataatagaaataagttcttttaaaatatggcaattaaacaaaaattaagtcaaagcttttaacttatcatgatgctgttatttgaagaaaataaagtttaattagaagaaaattaagagagaagtggaaaatttagtgaagattctattaaataattctgggcaccatcaaggcttttagaggttaatgtcattgatttcaaaattagcattactttggattcaggtgcctctgagagagcttagtcaagatcatggtccttttggctcagaaacaggagagtaaaacatgagtggggctaccctgaggttcctcaaggaaatggaaaacattaaagggaaagctggcttaaaatacagttacagggtaactatgaaaacctgaaaaagtaaaatgagggagaaaggaaaggaggaactcccatgagagcagaaagaagcagaggggcagaaactggttcacctatgacagcttgattattacctaaaaaacagggagtgagaaagacagagggaaatgggtaggagagagaaagagaaaataaatgacaaagggaaggagtggaagggtaaaaaccaaagactgatggtcttggatggatgcaagataaaaaagttttcattcatttattcaaacaacgagatgtttgaaaattaaatagcacattcttctaaaatgaattatgtacttcatataaccctgtgtcatcccaaatgcccagcagaatgctttgaatgtaagagagtttaataaattgttaaacatatcagtgctgcatcaacaacagctaacacatattaaatgcccataagtatgaagcctcttacatacattatctcatttaatcttgacaacattagatggttcttagccctattttaaagttgaggaaactgaggcttagacaagttaaagagtttgcttaaggtcccacataactagtaaatgataaaggccacattagaacaaagtctggttccaaagtgcacactcctaatcccttgctctctacctacctcaataaatattactatgaaaggagaaaaactacaaaatccagaaccttacatgaatctatatattggattaaattgtacaaagctacacacaaacacacacgcagaagtaaatgcagtgaaaaagatggtgaaaactgactaaggtctagtctagttagcagtatataataaattctgcttgacattcattgatgtagaattaacaataatatgaattcatatcccaaattgctttctctggaatctttctccttttatcatatttaagcatggcaatatggggcctgcaaggagtgcttggggagggcaacagtcacaggaaaaatttcacttgccaaattgcataagcattatcagaagaagcatttcacaaaatccaacacaatttgtgattaaaaaaaaaaaacttcagcaaactaggaatagagaggaacttacccaagctgataaagaacatcaacaaaaatcttacagcaaacataatacttaatgacaaaaactaaatgtttccccacctaggattgggaacaaggcaagaattgtctgctgtcaccactcttattcaaaatggtattggaagtcctagccaatgcaatgaagcaagaaaaaaggcatacgtatatcagaaaggaaaaaataaaacggcccttatttgtgtaagacatgattgtctacaaagaaaattccaaggaatctataaaaacactcacagaactattctcatgaacacaaggtcaacaagattgttggacacaaaatcaacacacaaaagttaatcgtattactatataccagcaatgaacacatggaaatcaaaattaaaaatgtaatatcatttttatttgctctcaaaaaataaaaagaaatacctaaatataatgcaaatacaaagaggcagcacaagagacttcttttgtggtgatagaacagttctgtatcatgattgtggtggtgtttacatgaatctatatatcagattaaattgcactaagctacacacacacacacatatacatacacacatgtgaatgcaggttaaaaagatgatgaaaactgactaaggtctagtctagttagcagtaacatgccaatgtcaatttcctgattctgattattgcacggcagccatataaaatatcaccaatgagggagccagatgaaggatgcataagactctgcaccatttctgctaacttcctgcctttatttcaaaataaaaagtgctgttttttttttttttaaagcaagttaaagttctagtaatggatcttctccatttctagagtacttttaaaaaacatagaaaaccaagtaaatttcatctcctggtttccttttacagataaaaaaagtggctttttatatccaagcaatcaatgatagaaccaagcatgagttccagtaaaggaagaaagaaacaacaataataaaaacttagagtgcttacattagacatataaataaaccaaaaatgtattttaattctgatgttccatatctattactattttttaatcctataatatacatcttaagttcaattttttaaaaagaaatgggatataagcatattttaataaagtaaagcaaaatttaaataattagtagaagttaattaggtctgatctggcaagaaattaattatattccttattaatattatatactcccccttttctcaatataatacagcattcccacccttggtctcactaaatgctctatgttactcatatattaagttaytgaaattccattacttctaacaatttgcatgtatgtctcaaaaaggtaggcaaacgcctctatttcttatgcaaactaccgctgtagatcaagaaagctcctatatagtatccactgagttcttggtagcttctttastgttcagtttcttaccagatccccaaatagacatctccatataaaagcttaataattttttaattttttttttttttgagacagggtctcgttctgtcacccaggtggagtccagtagcatgatctgggctcacagcaacctccatgtcctgggctcaagtgatcctcatacctcagcgtcctgaatagctgggaccacaggtgcgtgccaccacacccagctaatatttgtattttttgtttgtagagacagggtctcactatgttgcccaggctggtctcaaactcctggctgggctcaaatgatccacccaccttggcctcccaaagtgctgggattacaggtgtgagccactgtacccagccataaaagattaataattgcctagcaccttttggtaagcctcttgggctgtagctcaaattaaaagatctaagaattacaatcctcagtaagattttatgatttcaggaacacagttctaatacttctcattttaacagcattgtcaataacattgttaagtgtcacctgatactggacaatgttttctagaataaaaatctctactattttacattaaaaattgaactactatcatttgcccaaaaatgagggggtcgggagcaggagataaggaaggattagtttcaaggataaaaagaatatatacttatcaagtgactctggcctaaaaaactacttttaatgttgatgctaaagataaactagaaatattatatttttagaatacacgctcatattatctgataaatgtaggaaaaaaattccaaaggatataagaaacttaaaatgtaattatctgggacttggtctgatgagggagagggtaaaagagagacttcactacatctcttttataattactaaggtttgaaccatgagagtgtattatggatgaaaaaacctaaattaaaaaacaagtgtgcagttcctctagaacaaaagaattgctaggaaaacaaagcatagcccaatgaacctagaacctagaacagtgcctggtgcataggaggcactcaaatgctgaataaatgaatggctgaaatgaaatttgtaaaatgtttatatttccttaaaaaatggccaaaataatttgcaaatatctcaagctattccaactaacaggaaatacagaggatagaataagttaaataccaccatgagaaagtaggcaggaacttctagaatataggacattctgctggacaactgatttggttttgtcaacaagtcaattttacagggaagaaaaacagcaagagggtgaggactgttctagattaagagacttatgggaaaaaaaaatctaatgctatagactatttgaatcctgatttgaacaaaccaaccactataaaaagacacttgagacaaatgaggaaatctaaatgtagactgagttaaatggcagtaaagaattactggtaattttgttatatataatatcagtattgtgatacaaaatttttctatatttttttaagacatatgggaatcttttaagtgaaatgacaatgtctgtgattggatttaatataatattataggaccccttccaaagaaaaagaaaggaagaaagaaaagaaggcagagtccgggcacaatggctcatgcctgtaatcccagcactttgggaggccaagatgagtggatcacctgaggtcaggagtccaagaccagcctggtgaacatggtgaaaccctgtctctactaaaaatacaaaaaattagctgggcgtggtggcagatgcctgyaatcccagctactcgggaggctgaggcaggagaattgcttgaacccaggaggtggaagttgcagtgcgccragatcacgccactgtactccagcctgggcaacaagagcgaaactctttctcaaaaaaaaaaaaaaaaaagataataaggaaggaactatacatggataagtatgaccaaatgttattaaatactaagaatgactatctgsggtccattatactatgttctcttgttctatgtatgcttgaaaactctcaatcaaaaaattatttttaagtcccaactaactcaacatgaagacagcagttgatctcttggagtctagagttttcaaaaccwaactgacagctctcttttttgggaaccaatgcgaaatcaggatgacagatgaaattctgtgtcccctctgtttttggcaactatttgctcagggaatacaaactcattttaatgatccaagaaaagtatatgatacacttaaagaaccaaatcatatagattacattctgaaatcagatttcaaatatttgaattgtctttaccactggcctttacttgcataaggaattaagagttaacactgggatgaaataactttatttttctgttccaaaatttctgttaagtgttctcctcaaatgtttaaaatgttttgtttagaagaaatataatcatttcaagaaatctgccctgaggaagcactcttacccactattcttttggagattcatttttaagggactggccaaaagtatttcatgacagctttgctactgtacttcagtttcatggaacacctaatccaggaccttccattggcactatttggatgagggaggcttgtttgccctcgcttttcctttctcctgcattttataatgctttctctctgaaggggaaaaacagaaaatgattcttttttcattgaaaaccaaaatccctggagcacatgcttttggcatctttctcttgagttgtgaaggtgaaatactatctcctggtaccacctttgccaaatgaaagactctaaggccttctttaatacttagctcaaccatcaccatacctcgatgaaaactctacaccctagcctttcaggaagttacaagcactctcttctattcttctggtacaccacattcaaaacttgcagtagtgtagcataatttagcacttcatatgttgttttccctccctagattgtgagcagctcacggcacaaacgtgtctttcctatttattctccaagttataggaccaggctccatcccaggcacataataggtactgaataccttataaattaataaaaggcaggaaagcagggaggagaaccagggaggacaggccttcccttgcaggctgttctttttcaagaggccaagtattgaaaggatgaaaagatttaagggaagccacagtgccagtgagccatatataagcctaaggacttctacattcaaggaaggaagtgcaaaaagaatggagagttcctcttttacacacaatgggaatggaatcacaggttaacaattagaacagttaagagtatgtgagtaaggtacctaattatatctagacctttgctttcttttagrtttctctctatattaattatttaaaatattaatatctaaccttagagtttaagattattttactaaataattttatttccaaaaaggaaaatctccctcccaggtaaaacatgtctatatctcaatccctaggattgaattctatagcttgatcaacaaaatcactgtctcctaatggcaggaaactaactgcaggccaaatatctaagaaaaaacatacagtcttcagccctgaggaatacagaactctcaatggctggacgagtgtctgacacatgggtgtccagtgaatgcatgttgaatggatgagtaacatgacaacaaaaccatacacttagagcatatacgtcacagtctactgatctggcaggcctcccctcctccctctcagttggcaatgcttataattcagtgtccagaaatataaaaattattactgttccttatcaaggtaaccctttttcctcaggccacaccttccacagggaatctgaagatcaggctaaagtccaaagtctctattatcgtcaaagttcccacctccaatttgtaagaygacaatcctagcagattgctaataggtaatcataaccttctccacccagtgcagctactatagaaaacatgacctcagaggtaaaccaaataatcatcattcccactccaccccactctaaggaagaatcaggggactgagagagatgttgacttccgctatggacacatactcctagcttgcccacctttagaccctttagtaaagggtctctaagctgtggaaatgaggaatgacagcaactgtgaataagtgagctggccatgaatatcaaaagttgtattgttgcaaataatttgctagggaccctcagacctaatttagcctcactgtacatttcaggcaactgaggcccagccacattcagacttgcctgagaacaccaagcctgaaggcagagttgggactagaacaacttgcccatgcttccaatttccaaggagaaagggcaccaaggaacaaagaagaaagacgggtgaatcctacaattgttcaccagggactggggcatttagatacatgtcataggttaccatttcatctccccacctggcaactccagagcccctgctcacctaggaagatttgtgaaatcctatgtatgtactcagaggccacaactgttagcaagctagaactgttcaggaacttacatgattatctgaaaaatatgagaaaagggygagcactcatgcagatgtgcaagagaaaggaaagaaaagaaaggaaagaaagaaagaggaagggagggagggagggaaaggggaaatgaaggagraaaggagggaaggaagaaaggaaaaaaacaaattgtaggaaaggtacaataaaggaagaatttgcctagaggcagtgcctcagggcaccccttctggaggtgggaaagactgggtcagcaggcagtcccatcaggctgggttctgattctaagttgtgcaaactagggttagaatctttctgcaaataaacaacaatacaaaatttaaaggtctcaaaaccactgtcctacagagcttacaaattaaactcaataatctagctttcttttttcttttatagcaatatccagttaggaaacatttcataaatataaacagcctgatacagacacaacatcttgagctgggatccctctgtcccactccaggtcactctgactgcagccaggctgtcctgcacctgcattaaccctagaaagcagtaccaggagctaacgacctgcctgaaagtatcttcctaacactgctcagtgaaatctgctgcaggtgatcaaccccattctcaaaagtgtgtgcgcatgtgtacacacacacacacacacacacacacacacacagcctttaacaccctcctccctcacaatttttgatgaaatgcttaggaaatatgtattctctctttgtatgtatgtattctctctcttttttctatttgtgaaggaaagaaacaaaatgaaacaaaaataaaaacaacaaaaaaattgagggtcctaagttacagagaagcacaccagtaattaacagtgaactagacatacctgtattttaaaaaaagaagtgagattagatctgattaacaggctatccaatcaaacttaaaatcctttggaggtatccagaaataaccatcaaaatgttcacaaaaatatttattttaatcatattctctgatttagccttattttttttcccctcaagtaccgatgttcaaaatgtttatctgtgaaaatcaagttaaatattttttgagcacctgctatgacaaggtactggattgatgctattccttgctcaagttggatgctttatttttatttattttttgagacagggtcttgctgtcatccaggctggtgtgcagtggtgcaatcaagaatccctgggctcaggtgattttcccacctcagcctcccgagtagctgggactataggtgcacgccatcactcctagctaatgttgttgttgttgttgttgctgctgtttttcccagaagcatcatcctaggatttttttttttttttaaactagagacgaggtcttgctatgttgcccaggctggtcttgaactcctgagctcaagcaattctcccaccttggcctcccaaagtgctgggattacaggtgtgagccactgcacctggcctcaagtttgttgctttaaataatttttgtagttttatgtgacttctaatagagcagcagttttgttttctaagatatttcatccttaagtattcagggaagatactagtgtagtggttaagtcctcagacttggagtctgaacgactggcttcaattcctattctgtcacttggcaacatagtaacagtacctacctcacagggagactgtgatgattaaatgaaataatgcatgtaaataactgaatactgtgcttggcacacagccagcactcaaagaatgtcagatgctattctttccctctcctccttcataatagcagcagcaatagtagggggagtagttgttgtaatggtactaaacactggcaaggacttgtaagagtagtggcaaataatgttgtaagagtagtaaacactggcaaaatcacacagcgttcgtagttaggtaggactggggtcaaatcctagtgctgccatttaatcaaggctgctgcaggcatataaagaatctttgtgcaatttataaaagatgtcacccctggaagataggcgacaaacagatgccccttcctctggatagaggaatgtgccgaaggaaagacacaagacttggccagaagagcagctgggygagtggagcactggtggggtttcagcctccgctcaccacctcatcagtcagtaacatcatcaccaccatcaagaacccggaagaaaaactaagcctcagaaaaggtatggacaattgtagtcgatatttaattctccattcctgatcactctaatattccgaattctgtttgtctaatggagagtcttaggccacagctcggatcatggtacctcacccctttgcagaagtctcctggctctctatttcttgctgaattacacacaaattcctcaggctggcattcaggttcccaagggtacctatttatctttgagctttatttcytctgtggcaacttggcagctttgcaaataactgtcctatcctttcctacctttgctagaatataggtaccatgaaaacatagattcgtgtctatattgttcaaatacatattccaagcacccagaaaagtgattggtatatagtgggtgctcaacaaatactggaaaataaatgcatttgctcattgtaggcccctttacctggaaacccctccagccttgaagattttatccttctttcaacgtcagtcctacacgaaagccttcctaattcctacttgatttttccacggaaaaatttaaacaaatggaataatttgaacaaactaatttgaaaagcaagccagcaacagaatttttaatattttaaaagctgaagtattgataaaagccatttactcctctagaactagccaaattattctactgctctttaggagaaataaatttctactcatccattattgctgtaagtgagatatatataaatatcatagattgctaatgattatttaattaaaacaagcaaagttacttagcttcactccatactctacagaaggtttgggacctaattgagcttagacttaagaccatattaatttcataggaagagcttcactgaagctcaaatggtgggctctggtatcagacatacattgyaaggaacttgggcaagttaatctccctgtgctttcttcatctgtaaagtaggggtaataatagtacttaaattattttttattttatttttatttttgagacggagtcttgctctgtcgccaggctggagcgcagtggcacaatctcagctcactgtgacctctacctctcgggttcaagtgatccttctgcctcagcctcccgagtagctaggaccacaggcacgtgccatcatgcccagctaattttttttgtatttttagtagagacggggttttaccatgttggccaggatggtcttgatctctttacctcatgatccacccacctcagcctcccaaagtgctgggattacaggcgtgagccaccctgcctggccatacttacttactttattagttaggctaggttaggcaawgctgcagtaacaaatgcccctctttccctatatcaatgggagagtgtcttattacaacaataaatcatggaaagtcagctacgtgcatgaatgaccatctaggacagttgttttcaatgacccagtgatccaggttggccaaaaaaaaatagaaaagaatgacagcagaatctgattttaataagaaggttgttttttttttttaaccaaagttaaaaaaaaacttttttactgaaagtgacactgtcaactctgctcgtatatcactgacaagaattagttaacatgcaaggtccaggcccatacggggggctgcgaggtattgttttctatgtgtccagaatggaggaatatgaaatgggatttggtgaattcaaaatactacttctgtcataactacctgataaggttgatgcatagactgaatgagataataaatgtacatctcttagaacatacctgatacatagtaagcattcaataaaggttggctaaaactataagtcactactattatatggtaacacaagacatttatattcaaaaatttcccaccgagtgaaacttcaggctgagttagaatttaatgactgatttctctgcacttatctgggcatttgaaatgaccttgtcctaagtatgttgaaaaaaaaaaataggccaaagagccaggagggtccccacaaatgactctagccctggcacatactgtgggtaactgctgagtcccctgtgcttatacttctcccgaaggtttgcagaaaattcactctgcaacaatgcttgtttcagagatcagaacggttctagaattctctgaggtcttggcctaaacatcacattttcataccatctactgccagcctctagcttaatgcaaatacaaaattacatttttctctagaaaggtacaaaaatttaagtaggataaataataaggatttctgttcaaagacggacattacagacaaaatgaacagactggtaacttatagggaaaagataataacaaagactcaaataaaagattagtatcacaatatgtaagtaactccaacaaataagaaacaaatgtaaaaataggttaaaaaaatagaaggggaagcttaaatggataaaagcaaataaacaatgatcagcctaccagtaatcagagaaatacaaattaaagcaagatatcgtaatgattggcaaaaatgataaatttgggtaatacaaagtattggcaaggatgtaggaggacaagcattggcaagtgytgctggtgggattctaaactggcgcagcctttccggaagggcaatctggcagtgctctaaggaygttcaccctggcaagctaagacaactgcgctgcttattaccatgggaatggaaagaagagtgtggtggatgcctgctatggaaccccacatggcaatcaggttcaacaacctaaatgtaaaaggaaagctcttaaaagcataaagccaagtgaatataagaaacagaatgagaaccttagtatatcacctatgtaaatgaaaaacgtctcttatgtaaaggccacaaaacaacctactatatttttaagggcatataaataaataagaacattgttaatgggaatgggaagagtggagatggaagatgaaaaagtaaaaagatgaaaacaaaagcaaagccatgcaccgactggtggtgatgataatgtgctatcaactaaccagtatgatgaattcaactctctaacccaaggtgccagagacacccaccctcacacaagaaagtagaaaaccatttgcaggaattatttggtactcatccatgagggtcttccaaaaattcatgattgacatatgtagctaaatggaataaaataggctgtgggatgatggtgatctgaattgagttttctaactactagagaagatcgcaactgtttctcagcagtaaagtgagtccttttcttacagaattaattgataaatgctttgaaatgagaaacccagatcctaaaatacaaggccgaacatattcggagaggactaaaagaagtaaattaagtgaattcattataaaggtcaaggtacaacctgtcaccttagctcaacgtgacacttcattttggctttcttaattccagtacgtcttaattttggcacattcttaccctacacacaagagaggatgtgcccccataatgattcatcaataggaaagcattctttctgtgggggggtggaggacacaggtgaggttaaggtacaaaatccatgctggtgctctgccataattaactgcagtaaaacatgggaggaatattccccgtgattgaagcactcaaggcatatatccttgtggcaatgttttacaggctttttacattgtactacctgttgaagatgtttatttaagtctttgttttctctctttttaagtctaaagaaaggatgagagtcctgattatttgtattcataggttccatttctttttcatatttaaagatacactatggacaagttaaataatgccatttcctcccccagctgcatgtgctgaatgaacaaaagccccaactaaaatgktcccatcgcataaactagaacaacattactaagtccaacttgggtaagtccaatttacccagctgtttctgaagcaactagatgttggaattaaagcagatttttctattctttggggaacttcctactcaacattataggaaagtagtccttgataaagctattgagaaaaagtaacattttaaatgggaggaagagagagaagacagggaaggggcaggggcatgggagggaagcaggagggggaagctccagggaaggggggactcaatgggatgtgggaagagacaggaagggagagaggctgggttcaaagctgaggactactaatagagcaaggctaaaataatccaacattaggaacacagtcagtaccccggtcacgaattttattccattaagtagtgcttagccaaatctttctggcatcttctctaggatttattttcactctctgacccagtagtggttttccatctggtctcacactccttatcagagtagaggtgtgaattacatctagagattgttctgggatctctgagcactcccagttctaaaagcttttaacttcctctggcaaaggatgctcctgacctgcaattcccaattgttcccctggccaactgggccccgtggctcatcccatatgatttcccaaatgacagaacacccggttctgtatctgtactgtgacttcagtgatctttcaccattcggggcttcatctctatttcatggcctggcctctattaatcctcctgtgtcttgccagaggctttgtcttcattttgcaacctgttcctgctgatgcaccgcagtttcttgccagcgtctttataagtcttaagacttaagaaatctctggcaagaggctgtggaggattagttgaggctacgaagcggagatgagactcctgatagagccaaatgttaagagtttggccaaacttgttcttcatttttttctttcctttatattaaaaagccacctaaacacaacagaagagcttttaagcaaaattaacaatggtctcctggtgacaactaaggccacaaacaaaaggtttcttcttatgcaagcggaatattagggcaccatgtaacacctagactgggttcatatcctctttgactgtgcactgacttcctcaaaaatatcgtctctcttggcatcccacttgaagatccatatataaaaaaagaaatataaataaaaatgtgtgtgtaaggcagcaaacaaatgttgagattgggtccacattagccatatggtatttttgtataaaaacaatcattatgtgatattaggaccaaagaaaatgaaattcatattcatttccaaaatctgacagcttgtttatttctgctatcatgttgcatactggaatttctttccttatagtcaaatcctaaaaaaaataaaaaacaatttaataccacacaataatgtactactttttaaaaaatggaacacaggacacggatccttggttattaccaaaatttcctccccttgctctccccattaaaaaayccacagaggccgggcatggtggytcatgcctgtaaactgagcactttgggaggccgaggtgggaggatcacttgaggtcaggagtttgagaccagcctggccaacatggcaaaaccctgtctctcctaaaaatacaaaaaaattagccaggtgtggtggtgcgcacctgtagtcccagctatgcaggagggtgaggcaggagaatcgcctgaacccaggaggcagaggttgcagtgggccaagattgcatcactgcactccaacctgggcgacagagcaagactctgtctcaaaacaaacaaacaaacaaacaaacaaaaaaccccatagatacctggtaaactagtacatagcatagagcttttaataagaaaagacaaacattgtagtgttaagtctatttttgggaaggttaaggatgctatctattgcttgaatctgattggctgtttcagtcaagggagcaagagaaagttatttaaactattacttatagatgacaaagccgattaattgctccagcaaactcccaggctgcctactaatatgcactttacccctctggctaattgaatgtgtgcacagtatgattacaaatggataggtcctggtcttttcttctctctgaaatgatatactgcttttattaacagggagtgaagaagagagctaatatttatagatgacattatatttcattcacttctctaacaaattagcttttgtagccttccattagtagagggtaataagggacaaacatgtatggagagacacttggactcagtgagatggaaatggtgaatgatgatcagtgaaaaatgaatacaggagagtcagcaatgactaataaggggaaaggaattcagtgaagacatacaatgtcctgtcctggcttctccttcttttagtgttgttcactgtcaatcactgtcaacagcctagaagataggtagggttgttttggaaagttgattctaaaccagctacgtatgaagaaggtaaacaagaatgaaaatgtgtattatatttccctaaaaggcacatttcacacatttagtagaaaagatacaagtgctaactgtgattagcagttcactttcattaacacattcaaaatgaataggggtttcctaatatttattttataaaataacaggtgttaggaaccgtccagctccacacaatgccttggtgccaatcctagataaggatcacttgtttaggtcttagggtccaggatgtttcgttccatacctgtcaacaatggctcctaaattttggccagaaactaatcagtctgcaggtccttcaaacttccactgctgcccaccgctgccttcctagaacccaatctattggccctggaccaccacasaagttcgttttctgttcctcacttgccttactgccaactaaagggtcaacacgactcctgaactcttcttcagccttagcttaggacactagtgcctagtcaacctcatctccttaagctaatacctagtttcaatcatatcttccgggccctaattatagtctaaacaaaataataatcattcaaaaaatttgagtgcttagtatttgccaagcacaattctaggagtttggtggataagaatgaacaaagtcatttatgaatttttaaaatttcaaaacaaagactgtcatctgctagaaaaatccacagccactcaaacagcaaatgtaggctgggaacaggaagggctaggtggcacttacctgtgccagcctagccaagaatatgcacataaaacatgcaacttgttacaagcacgtaacgaaagagcaaaggatgtgtgtcggctaagatgtcaactcagcatgcaatgtcacacacgccaccttgcttctgggattacaccaactggcacagcacttctaaaatcaattgtttgccctcgatgctgacccagcaaagggattagcactgcattataaaaaggaatccaagaagtgcaaaaacaaggcacttaaagaaaggctgggatagaaccatggtaacaggtacacacattcaagccgacaaaccaaaaattctaataatcttaggtaaattaccatactcttcatccacattgcctggccttcctccctaaagttcagagtggacctgctttaggttttttayaggttttgtgaggacaggtgggggcaggggaggtgttgtcactagaacagattctaaatacaggtaaggcattaaaaagttctcctttttcctttcctttttattttcccctcccacttgtatcctgcaagtcaagaccaaagactgttgataccacagtgggtctctgcttacttaaagggctgaagtaacactgatattagtgaaaaatgttttggccaactatacgatctaatctctcaagggcaacacaggcccaggctcaggcttccctggtatttagtcactggagctaaaggcaagggggagaaggaaggacaggtactatggayacacagcaggaaggtacctcaggtaccaacaattgaagatgatgctaaagaacactctttggttgatggttttcaggccrttctgatcattgtaaatccaggctgcaaatttcctttaaagctgtcctggccaggcgcggtggctcacgcctgtaatcccagcactttgggaggccgaggtgggtggatcacaaggtcagcagattgagaccgtcctggctaatatggtgaaaccccgtctctactaaaaaaatacaaaaaattagccaggcattttttgcgggcacctgtaatctcagctactcgggaggctgaggcaggaaaatggcgtgaacccgggaggcggagcttgcagtgagcygagattgtaccactgcactccatccagcctgggtgacagagcgagactcagtctcaaaaaaaaaaaaagctgtcctgtggtagtgaattttcagcggagagctttttctcccttctaccccaaaccaagtcaacataagcatatttccttgcattctccctctgtagcacagattaccttctaatttatccttacatggaggctattgcaatttgggggtctcaatttcatatggacttacggggttcccgccttggacaaaaccttggatttagctcctgtctcctacacctaattaggttatcagaacttaagttaaaggacatggtggctaggtagatgtctgggttttctgaaagctgtctttagtgctgacctactcttctggatcttgcttaaacattatttctggcctctgaggttgtgttactttcagtttttattttatcttatttcatttccagatttttagctagagggttgctcaggaagagtcatacatactgggagaaacagaagttggaacatgtatttttttaaaagttctccaaatgattctgacatggaatggggctttgttactagtactctctactatggctgtaacagacacaattctttgattccttctaacaaaaacagcaatttatctatctcatcccttttacttcatttccatttctcatttaggtttaagggtaggacatctagatcattgtaaagaggaaatgttttaaatcaatctgccatgcccattttttagcaagtgtttttggtacttttaaaaggtagaaaacatcgttgagcacttgcaaagcacaaagtcctctgttttatgatttcataaacactgtttcttttataaacttagcaagttaaatactattagctgcacatttacaaataaaagaacaagctcagagaggctagagaaattggtcaggatatgtatcagccggcgctcaagcaaggctttaaaacaagagtcaatgtgactcaaaagaaagtctttctatacctgatgttgtttctcagaagaatgaaatagtctcctgccttacttttaagaggcagggtcttggccaggtgtggtggctcgtgcctgcaatcccagcacttcaggaggtgtaggttgggtggattatgtgagctcaggagtttgagaccagcctgggcatacacacatagcgagatcccatctctataaaaaataccaaaaaaattaactaggtgggtggcacacacctgtagtcccatctattcgggaggccaaggtgggaggatcccttaagccagggaggtggaggctgcagtgagctgagatcatgccactgcactccagcctgagtgacagagtaagaccctcctcaaaaaaaaaaaaaaaaaaaaaaaaaaaaaaaagacagggtctccctctgtcacccaggctggagtgtgatcatagctctataggcttgaatttctgggctccagcaatccttctacctcagcctcctgagtagctaggactacaggcacaagccatcatgccaagctaattaaaaacaattttttgtgtgtggagatagggtcttgctatgttgccaaggctggtctcaaactcctggcctcaagtgattcttctgtctcagcctcccaaagtgctgggcttacaggcattgagccatcatatctgacctacagcttaccttttcattgataaactggtgtgtcaattcaaagatgaagaaactgaggtgagaaaagaaaaatgagtcagtgacaagctcacagatacatgtcacgttaatggcagagtgagtactttaaccagagtccttggttccaaatgccatgcttaaccaaatcatatacacacagacacatacacacatatgttaatgcttttttgtaaaaaattcattttttttttatatggagtcttgctctgttgcccaggctggagtgcagtggcacaatctcagctcactgcaagctccgcctcccgggttcacaccattctcctacctcagcctcccgagtagctgggactacaggcacccgccaccatgcccagctaattttttgtatttttagtagagacggggtttcaccacgttagccaggatggtctcgatctcctgacctcgtgatccgcctgcctcggcctcccaaagtgctgggattacaggcgtaagccaccacgcccagccaaaaattcttaactttgagttcattgtacactgttgtaagaaacaaaatgctcaccatgtagagactgatgccagcttataattatggcagtgacagcataccatcttccaccttgctggcactattaacagtatccttgagatattgcatgggtgctgtgtttggtttgtttgaactaatattttatatgtgcattaggcttgctcaaaactacttttgaattaggtagacttgaattttcactattttatgagaaaattgtgctatgtccaacttggcactctcatttctgctgatggcctgtgtcaaatacacttactgtcctatgacagtcacttttataaagacaggctgtctatatccgaactgtatatatattacagctatgtatctacgataaaaatagacactgatattttgttcaacaacaattcactgctgtacctgaagaccctggccctcttgatagacttctccacccaaaaggatggaaaccattccctcagttgccacagtatgaatctgtgagtttgttacactgtcctcatgtcctttaaactttagaattctcatgtcatagagattttttttccagacagatatctgaatgtcaaaacaaaaagacaataaactatcttgacacctgggggaaattatgtaaagattttatgttattattatctataagagagcaagacatttgaaaagtatagtaagagatgytgtccaaagaaacttaaagctgtaaaataaaaaaataaaggaaagatcaacacaagcacaaataagcacaaattgcagacacattcttaatagtattcttgtggactgcagaagtcagcacaccttcccaagggtatattttttatcccccaatgccratgtagcactggggaaaatgaaaacagaaattaattatcttactgtgaaaaaaaaatcccattgcatttaagctcagagaggttcctctctattcaagtatttctggtcttcttgctagagcacaattttctctctggtatatgatccccatttaaaatgtctatgttggctgggcgtggtggctaacgcctgtaatcccagcactttgggaggcggaggcaggtggatcacgtgatgccaggaattcaagaccaggctggccaacatggcaaaaccctgtttctattaagactgcaaaaatttggcaagtaacagtggctcacacctgtaatctcagcactttgggaggccgagacaggcggatcacctgaggttaggagttcgagaccagcctggccaacatggcaaaccccatctctactaaaaatacaaaacttagccaggcatggtggtacgtgcctgtaattccagctaaatcacttgaacccaggaggcggaggttgcaatgagccgagatcgtgccaccgtactccagcctgggtacaagtggagcaagactccttctcaaaaaaaaaaaaaaaaaaaaagtctacgttgtaatcatacaacaaattgtgagggaaacactgaaaattacggtttcattagcctatttataagtaatagtcactgtttatttggagaggtttctgttttcttggcagaaaacaatgtaaacaaagtcagtttggttgccataagctaagttctatccaagaaaatcttgcctagaaagaggtcagcaaccttcttaatcttgaccaccaacacggcttcacaaggaactctgggagctgagagcaggaagccttaccacagacagtaaactggcaagtcagtcatgttgatttcctgcttaaaactataggcagggaaccagatggctccctgcagctctcaccgtggcttacaaggccccaacaccatctgtcctgggaaacttccccacttccctctcactgaccaggcttcacactctgactccagccacacgaagctctcctccatgcattctgcacgtgctgttccctttgactggaacactcccgcccgctctctgagtggctaacccttacttatcctcaagtgtccttcccctgacccccaaaatttggttacggggtcttcccaggtgctctcgagcccctcatgcttttcctctcatagcacctgtcaaactgcaccacagcctcccacagatatgtcagcttctcagaggcagtgactcatctgtcttcttccttgttttatttctattgcctacaggacctgacacttgccaggtacttagcaagcatctgttgactaaattaatggaataaaatgagaaagcaaaggagggaaaagaggaagagagaaaaaactgcttttgaaggatcatggccatagtgtgatcagttttagtgacatcatctgttacagaagttacatcgtgacgtaacttcttttccttcttataaattgaaaagattatatacctttggttttcttgagcaatggataagcattttgggatccagagcaggagaacaacagaaataacaactccttgtattttcatgccactttacagcttttaaagagcagtatgctcttgtatcaattctgaggcaagtgagataggtattattattactgtcattttacacatgaggaaactgaggctcagtgacacatgacttgccgaggtcacatgtttattaagcgtcagagccagagccctagaccaggccttcagatccctyggtgaaggcagagttgggcccacttagcacggtgcataaatccagcaccttgcctaccacctagggctcaagaatgtagaggttcaagagtgcagagatattagcctctatcttgaacaaactaaaatctaatcaatctaattttttaatgtgcccaatttattcctcataggtaccataaacagaactatttctttgtttcttttttgagacagagttttgctcatgtcgcccatgttggagtgcaatggcatgatctcggctcactgcaatctccacctcctgggttcaagcctcctgccccagcctcctgagtagctgggattacaggtgcgcaccaccacgcccagctactttttttgtatttttagtagagacagggtttaccatgttggccaggctggtctcgaactcctgacctcaggcgatccacccatctcggcctcccaaagtgctgggatttcaggtgtcagccaccgcacccagccaacagaactattttttaagagcaattttcatgaaacaaatgccatcttaagctataaaaaggagctataggccgggcgtggtggctcacacctgtaatcacagcactttgggaggcccaggtgggcggatcacgaggtcaggagatagagatcatcctggccaacatggtgaaaccccatctctactaaaattacaaaaaaattatctggccgtggtggcacgtgcctgtagtcccagctactcaggaggctgaggcaggagaatcacttgaacccgggaggcagaggttgcagtgagccaaagatcacgccattgcattccagcctgagtgacagagtgagactctgtttcaaaaaaaaaaaaaaaaaaaaaagagctataaacccagtcaaatgaataaagacccataaattgtgactgcattagcttctctatttttttttttattatactttaagttccagggtacatgtgcacaacgtgcaggttttttacgtatgtataaatgtgccatgttggtgtgcagcttctctattaaaggtaatatacaatctcctggctgggcgcagtggctcacgcctgtaatcccagcactttgggaggccgaggcaggcagatcacgaggtcaggagatcaagaccatcctggctaacatggtgaaaccccgtctctactaaaaatacaaaaaattagctgggcgtggtggcgggcgcctgtggtcccagctactcgggaggctgaggcaggagaatagcgtgaacccaggaggcggagcttgcagagagccgagatcgtgccactgcactccagcctgggtgacagagtgagactctgtctcaaaaaaaacacaaaaaaccaaaaaacaatctcctgcctacatcaatgggacactgagctcatgttgaaaacagctcttcgatttctgtcatcatgcaaatgaaaaatggccatgtaggcaatcagttcttttttcttttttttatagttttgagaaataattgatgtacaattgtacatttcaaattttaatgacttttgacacctgagaaaccacaataaggaaaatggacgtatatagcgtcttcctaagtttcctcttactcttgtaatctctcccttccacaactacactgctcctgtccccaggcaaccactgttctgctgtcattataatttgcattcactagaattttatataaatgtatacttataattatataaatagtacatcatgcagcatgtactcttctttgcctggcttctttcactcagcataactattttgagattcatccattttgttgtgcgtaccaatagtatactcatttttattgctgaggcgtattccattgtaatggatatcccactatttgtttatccattccctgttgatggacatttgggttgtttccacctcttggctattataaataaagctgttatgaacactcatcttcaagtctttgtgtagatgtatgctttcatttctcttgaccaagtacctgcagtagaatggctgggtcatctggcagttgtatgcttaactttgtaagaaactgaccaactgtttttcaaagtcaatgtatcattttatatttccataaaagttccagttctacatccttgccaatgcttgttttggtcaaacttttaaattttacccattctagtaggtgtatagtattaatctcattgtggctttaatttgcatttccccaatgactacgtatttgttcaaatcttttgcctaaattgtattaagctgtttgtcttcttattcctaagttgtaacagttctttgtatactctggataacagttctttgtcatatatatgttttgcaattttctcctctttgggtttgttggctggctgttttattttgtaaccgtgccttgaagagcaaatattttgattttggtgaagtgtaatgtactgatttttcttttatatttaatgttgttttatgtatcatacttaagaaatttttgctaagcccaaattcactaagattattttcctatgttctcttctaratgtttgtcatagtttgaatgtttgtgtctctcccaaaatcatatgttgaaatcctaaccctcaggtgatggtattaatggtattagtaagtagaacctttggaaggtgattagatcatgagggctctgccctcatgggattacagcaccgccccccccttgttttttgagacagagttttgccttgttgcccaggctggagtgcaatggcgccatctcggctctccataaactctgcctcccgagttcaagtgatcctcctgccttagcttcctgagtagctaagattacagacatgcaccaccacgcctagctaatttttgtatttttagtagagacagggtttctccatgttggtcaggctggtctcgaactcccaacctcaggtgatctgcctgccttgggctcccaaagtgctagaattacaggtgtgagccactgtacctggcctagagcccttttaaaagagactacagggagctagcctctcctgccatgtgagaagatggccatctatgaaagaagtgagtcctcatcagacactcaatctgccggtgcttgattttggacttcccagtctccaaaactgtaggaaataaagttctgttttttataagctactcaatctatagtattttgttataatagcctgaatgaactaagacaatacctataattttagctcttacatttaggtctataaattcattttgagttaatgctgtacatgctatggggtaaggattgaggctcaactttttggttatggctatccagttgttccagcatcatttgttgaaatgattatcctttctctattgaactacctgggcaactctgtcaaaaactgaatgtctatagatgtgtgggtctatttctggactcattatcaaattcagtttcatttatctatttttctctctttatgccaataccatattgctttgattattgtagctttatagtaagtattgaaatcaggtattgcaagtccttcctccaactttgctcttcttttcaaaagttgttttggctattctcggtccttggcatttatatatacattttagaatcggcttgtcaatccctaaaaaaaaaagtctgctgagatttttgactacttaatctgtagatctatagatcaatgattactctgggaagaattgacatcttaatactgagacttctggcccactgacaatatatttctctatttatttaggtcttctttaatttatcttttatactttttggtatatgggttttgtacatcatttctcaaatgtatamctgagtacttcatatttttgatgctattttaaatggtgtttaatggcctatcctctgttcaacaaatattttctgtgcaactaccatgtgccaggatccaaagattctagtccatgctgatgttttctcttttgctcttaccgcctataatacttaatcagtaccatttattctaattgcaccacaaaacttaaataattttttatatgctgctgtattctttaattctttcttgtacatgtcttatctacccaactaaattgcaagccctttgggaatgaaaactataatttatatttatttgtaaatccataatgcttagagtattgataagcaaacagaagagaaatcctttttttttttttgagagggagtctcactctgtcgccagactggagtgcagtgggacaattttgactcactgcaacctccaactgccaggttcaagtgattctcctgcctcagactcctgagtagctgggattacaggcacgcaccaccatccccagctaatttttgtatttttagtggagacggggtttcaccatgttggccaggctggtctcgaactcccgacctcaggtgatcctcccgccttggcctcccaaagtgttgggattacaggcgtgagccattgtgcccaggcagagaaatcctttttttaatgaaaggactcataaagttaagcaaataaaactttgaaactagtctgtgttcaatactaacttacaattaagcagataaaaacaatattaaatatgtgtttgctgtgttcaactgtagcttagggactaaggggcttcaaggagctgtggatttgcttccttgtcctttgggagctcatgaggaaggaaaacactgaagaaaccatcccccgtgtatctaggtggcagaacctaaacagccccgaggcctgttgttgggaaagcctaactccaaaatggctcatgtccattttccgtttcaatctctggcatgtgcaattttgacaaatatctgttagcatctgactgagcctgtttacgggatacaggcagctgtttacaagacataggccaaattttacccttcaatatccaagaattattttcagtgatttcaggtccattattgggttctgaccctatccccttctcagtatagtttaaaaatataaccaacttgttttcaagtccttaaaatgtagggttccctcccaaaccttccctccgcccaccccagagtaaatcagtttcaaatgtatttatcacaaagaatacaaggctgtttaaggaagyagtcaatagggctttttaagtggtgagccaattagagggttgggactttatgccaatgtgtaggtagaatggagaaggtgatacatgctcacaaatgatggcatgggagccttctagagcaaatgaackaggygggcattgtggtatggatcatgcagtggcacatacctcagaggctacctagtctacagattaaaatktcaaacttgagttcaaccccaaagaatacatatatatctactgcctgcgcccggggaaaaatacttgagtccttttaaatgacaaaagtaatagaaaagcatctttaaaaaataattccagtccaggtgcagtggctcacacctgtaatcccagcactttgggaggccgaggtgggcagatcgcctgaggtcaggagttccagaccagtctgaccaacatggtgaaactcagtctctactaaaaacaaaaaataaaccgggcgtggtggtgtgaccctgtaatcccagctacttgggcagctgaggcaggataatcgcttgaacccaggaggcagaggttgcagtgagtcaagatcgtaccactgcactccagtctgggccacaggagagagactccgtctcaaaaaaaaaaaaaaaaaaaaaaaaattccaaagttctgttttaggagaatggtaatgactatattgtgtatgtgagtgtgtttcaattcttttggtaaaagccagagggcattaccaagttttttaagatttcagatagatatataaattttacactgaaagactcaaagcacaaagaatcccatgaactgttcctgggactctgctttgtctttacagcactctggttgggggaactgtatgtggaaagagctatacaacttctcctgcactcactcaagtcacagttctgtggatataagaatccactcatgcaacaaatatgtgccaggcactgtgcaagccactatagtgctacccaaaccracatggctcctgccctcaagatgctctagtggccsttctctatgggtctctaggagcttaatagcttcacttctgccactttcataggcaagattcaggctgagttgcagaggtgctcatgagagatagaaaataggaatcaagactcacataccatagttgcagtagcatgcacaatcaaaaacctatgcccccattattaaaaatgttgaattccggctgggcgcggtggctcacgcctgcaatcccagtactttgggaggccgaggtggacagatcacgaggtcaggagattgagaccatcctagctaacacggtgaaaccccgtctctactaaaaatacaaaaaattagccgggcttgttggcgggtgcctgtagtcccagctactctggaggctgaggtaggagaatggcgtgaacctgggagacggagcttgcagtgagccgagatcatgccactgcactccagcctgggcgacagagcaagactctgtctcaaaaaaaaaaaaaaatgttgaattccttgtgatccatgatgttacaatagatagtacaggctaacaggatatactaccactcttcttcactactgtttcaattgccttgccttgcttcgcttcgcttctccattttctccttctttctttccttttcctttccctctctctcacatactctctctctttctcccctctctctgtctctctctgtctctgtctctgtgtcttttttgagacagggtctcgctttgttgcctgaactcctgggctcaagcaatgctcctgcctcagcctcccaaagtgctgggattataggggtgagccaccacacccagccttctttagaatgtacttctcatctttcttttgctctccatgtgggtgataccctctaaagtgtaacatcctctaaaatgttcccataaagacaaaaattcataccacatacttgtgaatttgctttgaaacaatccagtgaaggacatggggactgtgaagtgagtggggtacagggctaaccacagatagaagtgggatgatgggtatcgaaggttcattacactattctactttttacatatttttggtattacccataataactagaataaaataaatacattagaaaaaaatttaccacatcaacagtttgccctgaaaatatggtggttaagctaaggtcggaattaaccatgaatctgcaaacataacagaaatgcattactttgcattcatgagtcactgtgttttgaaataagccatgtcttcaactctgcttcattccttaacattcccacactaagtcctactttggtgctttacaagttgggtatccactagcttttaaagaaagaaatcagtgatcttacaggtaagatcaactctttcagcaggcattttaaactgccacattttaaaataacttttatgaaaaagatatatttaaaagagcacgattcctgggctcaagtgatccttagcctcccagtggtctttgtagatggcctgatggagtctcatggcacaagaagattaaacaatgtctctaattttcataaatttctgcaattcaaaaaaaaaagagcaaaaaaaataattcttcaaatacttgtgcaatgacagaaatgtggtgatccaggtaacttgctttagtttctaaatacttcatctcactctcttttaatgataattaagatctcatgcactgacgctggccaaggggattacttatacaaaaaaatgcatcgagataaaagtctcagtgaaaggaacagaacccaaggcctagtatattttcaatatgactcgagtttagtattgcaggaatccaagtcagctccaaaactgtgcccaaggatgtttctggcagacgtgcaatctggatcatccacgaagctatttaaaattacttgagatgttaccacgacagattttaaagatcaaaacacaggtgtgtatcagtgttgcacaattctgtggtaagggagaacatgagatcattccacctagaaacagacccaaacacaaacatccacctggagttcaggtgtacggctgtctgaaggcagatgaatttatctctggagttttgttctgctataaatatgctcagataagaaatggggttttaatatattaatgttactttaaattgggtgggtctttttagctgacaagcatcttatgtacctgcctttatgctatttttaacctcttgaaaggcttatttctcaatataaatgggttatagtcaccatagtttaaatagccttatttattctttgcagcttcagtaaacttgtgagagtaacataaaagtttcaggatagtcaaggcacaaatcttttccatttcattatgaaccaagaaaaaaattatcaagataaagtcttaagaaaataagtgacttaattaaagccatctcatgaagtagtatacgcactttacctaatgattcatttaacattaaatagttcctacataaactacctggggaaaggattataaatcatgctgctataaagacacatgcacatgtatgtttattgtggcactattcacaatagcaaagacttggaaccaatccaaatgtccatcaatgatagactggattaagaaaatatggcacatatacaccatggaatactacgcagccatagaaaaggatgagttcatgtcctttgtagggacatggatggaaaccatcattctcagcaaactatcgcaaggacaaaaaaccaaacactgcatgttcttactcgtaggtgggaactgaacaatgagaacacttggacacaggaaggggaacatcacataccggggcctgtcatggggtggggggagaggggagggatagcattaggagatatatctaatgtaaatgacaagttcatgggtgcagcacaccaacacagcacatgtatacatatgtaacaaacctacactttgtgcacatgtaccctagaacttaaagtatttaaaaaaaatacctggagagagagagacagagagagagagggagagagggagggggggagagagagagagagagagagagggagggagggagggagagagagagacacagagacagagacagaaagacagacatgcatctggaaaattgaacaataggaggcagtcctagttcttgatgccacaatggtcctggatctgtaaagttttcacggtaagccagagatttattttattttcaaaagaaggctaacaatagtcaaagtgttactgatccatgtgagcaagtgtgtacttatctcctatgcccaaatgcaaactttcattgttcaacaaactaggagttagttttgtgtgaatacaagcatgaagaaaagagttgtgtgtgtctctatgagcaaataacaacactctgactccctgatgctaggtctacccaaaggagacgaaaaacaactatggaaaggaaaagcacatacacaaacataaacaggacatgcatgttgtataccaccatttggttaacagatgctggtgtctgccctccgctctcacaaacgagtcaatgtacgtgtgtgtgtgtgtgtgtgtgtgtgtgtgtgtgtgtgtgtgtgtgtgtgtgatcttcatccaaaagtaacataaaattctgtgtggctggtttgacagtgtgtctgcaaaatctatgtaagaattctaatggagcaaacacctgctgagcctgtttggatgctgtctgaaccagtgatgggggagtctatgataaggtggctgagctggagaatgttgttttttgtaaagtaagcccaggcaccatcatctgtcccactgggcagctattgctcgcttacttcaggcctcactattatatgaccttcatttacattgagggaagaaatatgttttgtaaatttttttttggagatagagtcttgctctgttgcctaggctggagtgcaatggcacgatctcagctcactgcaacctctgcctcccaggttcaagcaattctcctgcctcagcctcccaagtagctgggattacaggcacccaccaccatgcccagctaatttttttgtatttttagtagagatggggtttcaccatgttggccaggctggtcttgaacttctgacctcaggtgatccaccccactcggcctcccaaagtgctgggattacaggtgtgagccaccacgcctgaccatattttgtggatttttctaattcatagggatgttctggattaatgggaaccattaatatgatatacttaagaaaaaaacaaagcactcacttttgggtcctaaagaatcaggatctggtccctactttattactgacaatcttcccaaccctaaggcagtaaagggaaccctcatgggctttggtctatcttgtaaagtaagtggaagggttggactagatgtgtgcttcccaatcttttcaagcacgagggacacttcacacatcaaaacctctctcagactaatcaaacaacagcagatatactttaagaatctgtgcagtgagaaaatataatgaaaaaaggtactttggatgcagtaacagttgaaaataaacttccaatttattaatcacagcagagtcaacattcgtttttaaagtaacggtatacagatgttagatgttatttatttagtctacaaacaacagttggtgtacatgtgaatttgcagtccgcagtaactgcatagcaggtcctcttctcaaggctgggaaccctgaatgacatacagacactctaaagcctttctagcactgatctgccatgattgtagtcctaccactgccactatctaggctgtgtgactctgaacacgggaggatgtctctgttccacagtttcctaactgtatggggagtggaggtaccctagtgatgtttcatcacagcactgtgcagctatgattgtgtgtgtgatatgtttcagcagaaaccgtgagatccccaggagagtggctctaccaaaatgtaacataatcgcccaactctttttggcatcttggaaatgtttctatacagaccctgtaatatcttcttgcagaagaactcctgtccctaagtgggagatcatcagctctgacacatccctgcacacgctattctcccccaaatagagagattcctggggacaatctccttaagcctgcttaagacactccagtgagtctctcagagtataagccagtgtccttaaagcggcctgtaaggccctacatgatcagcactactgctacctcatctttctccctggctccatggccacctccttgcttcactccactccagccacactgggatactgatccttgatcactctcagtaagctcccaccccaggcctttgtgctcacagattctccgccctggagaactctgcccccagaaatcctcatggctcactctgacacctccttctgctcaaatgtcactttcgcagtgaagcttttcccttgccaccctatccaaaatagctacctcatcctgcactcccaccccaacccctactccctctcttccctgctttattttgtctttttttttttwaaaaaaaattttattggtgcatatttttctttttttaaaataaaatttttatttaccattactttcaatggcaaaaactgaaattacttctgtaccaacctaaatctgtacttttttaatggggtatatgtaatattttgttacatgcacagaatgtgtagtgatcaaaatcagggtatttagggtatctatcactttgagtatttatcatttctatgtactgggacattttaagtcttttcttctagctattttgaaatatacaatacattgttaacaagagtaccctactctgctatcaaatattagaatttattccttctaactatatgtttgtacccattattctactctctacctccatgagattaactttgttagctcccacatataaatgagaacacgtgatatttgtctttctgtgcctagcttgtttcacttaacacttaacctgcagttccatgttgctgcatatgacagaatttcactctttatggccaagtagtattctattgtgtataaataccacattttctctatctattcatcctttgatagacacttaggttgattctatatctttgttactgtaaatagtactgcaattgttttttctgctgccataaatatgggggtacaggtatctccttagatatacttatttcctttcctttggataaatacccagtagtaggactgctggatcacgtggaagttctatttccagttttgcaagaaacctccatactgttttccacaatggctgtactaatttacattcctactgacagtgcataagggttcccttttctctgcatcttcactagacatctgttgtttttgtctttttaataattgccatcctacctgggataaaatgctatctcactgtagttttgattttcattttcctgatgattagtaacattgagcattttttgtatacctgttgacaatttgcgtatcttcttctgaaaaatgtacattcatgtctttgcccactttttaatgtgattttttttctttttgctgttgtttgagttcctcgcatattttggatattagtccttggcagatgaatagtttgtcaatgttttcttccattcaacagattgtctctttactctgttgatttgtttcctttgttgtgcagaagcttttttatttaatatagtcccatgtgcctatttttgtttttgctacctgtgcttttgaggccacagacttaaaatctttgcctaaaccaatgtcctgtagcatttgctctaygttttcttctagtagttttatagcttcaggtcttatgtttagtcttcactccattttgagttgatttttgtatgtgacaagagataggggtctagtttcgttccgtggcatatggagatccagttttccatgcactatttattgaagagaatgtcctttctgcaatgtatgttcttggtggcattgtcaaaaaccagttggctgtaaatacaaggatttatttctagattctttatattgttccattggtctatgtgtctgtttcataccagtatcatgctgttttgattaccatagtcttgtaatatattttgcagttaggtagtgtgatgccttcagctttgttctttttgctcaggattcctttggttattcagcctaatttttggttccacatgaattttaggatagttttttctaattctgtgaaaaatgacattggtattttgatacagattacattgaatctgtagattgctttgagtagtatagtcattttaacaatattaattcttttgattcatgagggtaggctgtttttcaatttgcttgtatccttttcaatttctttcatcaatgttttgtagttttcattgtagaggtctttcacctccttgtttaaatttattcctaggtatatttttgaagtgattataaatgagattgtcttattcttttcctcagcyacttcattattggtgtatagaaacactatttattttgtatgttgattttgcattctgcaatgttactgaatttgcttaccacagctaagattttttggtggagtctttagatttttctagatataagatcacattatctgcaaaaagggacaatttaacttcctcttttctgattgttatgcctttatttctttctcttgactgactgctctggctaggacttccagtaccatgttgaccaggactggtgaaagtgtgcatccttgtcttgttccagttcttaaaggaaaggctttcagcttttccccatttggtatgatattagctatgggtcacatatggcctttattatattaagatatgttcttgcaatgcctggttggttgagatttttatcaccaaggaatgtcgagttttatccaatgctttttctgcatctatttagagaatgatatggctactgtccttcactctgatgatggctatatcrtatcttttgatttgtgtatgttgaaccatccttgcatctctgggataaatcccacttaatcatgctacattaccttttttgatgtgctgttgggtttgatttgctagtgttatgttggtratttttatgtctgtgttcatcactagcctgccatttcctttttttgttacattcttgtctggttttggtatcagggtaatgctggcctcatagaatgagttaaggggaattgcttcctcttcagtttcttggaatagtttgagaagaagtaatgttatttctcctttataagtttggtagaatttggcagtaaagctattttgtcctaaacttctttgttgggagagtttttattacggattcaatcttgtagttcattattcatctgttcaggttttctgttttttcctgattcaatcttggtaggtatgtatgtgtccaggaatgtatctatttcctctaggttttccagtgtattagtatatagttgctcataatagaatctgatgatcttttgtatttctgtggtatcagttgtaatgtcctctttttttgtttctgattttgtttatttgggtcttctctcttttttcttgtatagtctagctaggagtttttttgctgctgttcatctttttaaaaaaaaaaacctttgttttattggtcctttgtattttttgtagcctcttttttatttagatctttattatctctttccttctactaattttggtttggtttgttcttgcttttctagttccttgaggtacatcattagattgtttatttgaaatctttctactttttgacgtaagcatttattgctatacactttcctcttagcactgcttttgctgtatctcataggttgtggtgtgctatgttttgatttttatttgtttcaagaaaytttgtgatttcctccttaatttcttccttgacccagtggttcttcaggagcatgttatttaatttccatgcatttgtacagcttctgaagttcttcttctttttgatttctagttttattccactatagtctgagaagatacttggtataatttcaatttttagaaatttgttgagacttattttgtggcttaacatatggtctatcctggaaaatgttccatgtgctgttgagaagaatgtgtgtattttctgcagctgtcgggtagaatataccgtagatgtctgttaggtccatttggtctaaagtgcagtttaaattcaatatttctttgttaatttctgtctagataatatgtctaatgctgaaagtgggatgttgaagtctccaactattattgtattggagtctatctctccctttagatctaatactatttgctttataactctgggtgctccagtgttgtctgcatatatgtctagaactgtaatattctcttgtggaactgatctttttattattatataatgaccttctttatctcttcttactgtttctcacttaaagtctgttttatctgatattaagataagtacttctgcttgtttgctattggcttccatttgtgtggaatatctttttccatccctttattttcagtctatatatgtcttaccagtgaagtgagtttttttaggcagcatataattgggtcatttttttttttttgtccattcagccagtctgtatcttttcagtggaaaatttaatccacttacatttaagattattattgatatgaggggacttattcttgtcattttgttcaatcgttttctggctattttgtatatcctttgtttctttctctattattgtttatcattgcagtttggtaattttctgtagtggtaacacttgagtcctttcccttcctcatttgtgtgtttgctttaccagtgagttttatacttttgggtgttttcatgatgatagatattgtcctttcactttcaggtgtagagccctggtaagcatttactgtagggctggactagtggtgatgaatttcctcagtttctgcttgtctaggaaagaccttatttctccttcatttgtgaaagataactttgctgagcatagtatacttggctaacagttttttttttttctttcagtacttcgaataggccattttctcctggcctgtaaagtttctgctgagaaatctcttgttagtctgatggaggtttccttacatgtgactagacacttttctcttgctgtttgtagaattttctgtctttggcttttgatagtttgactatcacgtgccgcagggaagaacctttttggattttatctgtttgagaatctctgaacttcttgttatttgaatgtctcaatttattgctatacttagaaagatttcagctattatttcattaaacaggcttttctatgccttttgggcttctcttcaccttctggaacactcaaaatttgaattagtcactttatggtgtcccatatgtcatatacactttgttcattttttaaaatttcttctccttcttcttttttttttttttttgttctgactgggttatttcaaaagagctatcttcaagttctgaattttcttctgcttgatctagtctactgttgaagctcatgaataaatattttatttcattcattgaattcttcagtttcagaatttccatttggttctttttaaggatatctatctctttggtaaatttcacattcacatcctgaattgtttttccaatttctttgtacggtttatctgtgttctcttatatctcagtgaggtttttttttttttttttttttttttttgagatagagtctcactgtgttgcccaggctggagtgcagtggtgcaatctcggctcactgcaacctctgcctcctgggttcaagtgattcttgggcctcagcctcccaagtagctgggactacaggtgtgcgccaccatgctcagctaatttttgtatttttagtagagataaagttttgccatgttggccaggctggtttcaaactcctggcctcaggtgatccacccactgcaccctcccaaagtgctgggattacaggcatgagtcaccgtgcctggccagtgagcttctttactatcgttacttttatatttttctggcatttcataaatttcttttccattagtatctgttgctggagaattattgtactcccttagaggtgtcatatttccttgttttttcacatttcatgtgtctttacgttgatatctgcacatttggtgcaaaagtcacttctaactttttggattgactttcataagggaagactttttcctgaagatgtatgtatggtgttagttggtcagaaaaccttaactttgattctgggtgcatgcaggagtgtagtttctgtattatttcttcagccgtaaacagtgtcagtggtatttgtgatcttctcagtggcttaggctgcagttgttagtagaggctgtggtgaggttttgttggggatggggacaccatgtgagccagttctctggcagcagtgggccaagggtatctatccttgggcccctgggcagtgtatgagtgcattggcattagtgagtccaagtgggccaattcttgggtttccacgtggcttgctcaggtgccagcagtggcagtggtaggctggagtgtggacaaaatctcacactcttaggcagcatgcatagcatggatgatggccacggcagtggtgggacaaccctgaggctccccagtggcacacatttgtgttagcagtggctgtgacaagctgggtggtccaatccccaggactccaggtagaacatgcaggtgggtgctggctgtgatggtggcaacaggctgggtgggccatcttcaggtccctggcaggagtgcacaaatgctggcagtggggacagggtgggataatcccgaagacactggaaggcatgcttgggtactgggagggggtagcagtgccaggctggttgggcttgtactcagggcctcctgtgcaggctatggtgcacaaggtggggtgatcctcaggcccccaggtggagtgctcgggtggtggcagcagtggtagttataagcaggcaaagcctgtcttcagggtgtgtgcaagtgctctgcagccctgcagggggtggacagagttgctgtcagtagcagcaggtgcaggtaggtggctctcaggctctggggagcataagcttcggttcctaatggtgacagctgtggcagtagccacagcagcagtgggaagagccagtcctcagggtacatgcaattgcactacagctctgccgctagttgggatggtggttgctgtcagtggcaatagctttaggcagataggttttgggctctgggaagcatgcattttggcttcctttgtcctgaggcagatctccctggtgcactgcactgcctgtttcctgggatacaggatactgtgtgctgtagtgctggggcatcacaccacagtagccctctaggtagatacagtgggatatcagtggggcttgagagatgtggagacgcaggtgctgtcaggccctaggaaaggatgctgtctggtgagggctgggctctcaaaatcgtaccacgctacagctgcttaggactcaggggatgcatgtgggacccagtgtgagttccctccttggaccaattccctagcatggtctcaaggcagctccccatgttagtctgagagcctctgagggtcaagaggctctcccatggctgggattgcaggactctgtggtggaaatgtggacccctggggatctctccccctttccccacactgaggagcctctcagggcttctagctgatcccggctgtgcttccctctccttccttgccttgggtgtttcctgccacttttctgttgaatcccagtgttctctcctagattctctattcaaagtgtgattatctacttgctattttggttcctctttgtggaggaggcaagtgccggatgcgtctagtcagccctcttgaagccttgctttatttttcaccatatttcttttatatatatatacatatattgcctgcctccataagaatggaatctccacgaggacaggtatttttgtgtgctctgttcattgctatatcacctttgtttaattagtgaatgagtggccttcccaaaggtttagaacacagtcctacagaaagctacatttatgattttgttatgaagactaagaggaaaattaaaactattcagagaaatgtgcttcacagacagataaactagcttgagcgattttatttgaattggctggaaggtaccattctaatcaaaagcaagggatctcatccctcaataactttttttttgttgtttttcacctgaatacctgtatatttagggaatgtatggttaatctttatcttgcccttcatcctcctaattctgtcaacccttataaatcctatttatcaatcttgtctttattttttgttttctcatggattatatccaaggtttgaaaactcaaaggtcatgtaccaacctgtactattgaatgctttaagctatcaggacttttcactggcaatacaaagctgtcactgatttcttgacagtatactatcaaacgacgaattgataaatcaaacagaaaggacaatatcatgtcaatccaacatctagacctaagctgaattaaaagtctaaaaacagcaaggaaagattagggatgctgtggtcccagcatgaagtcagtctgtgcacattaaagccacacgcagtgtgatcctgaagtcttgctccctgctgcgctcaacggcctgggagccagattactagcactatgctgggtcactgcagttgctttttaatgactacaagtacacctcccagtgctctaaaccgtaggacatcccaggattgtcattttaaaaattctctcccttctctctcccggggctgtttggatatgggggacgaactggcagcctacctggtcctgagctgaagtcttgtgaggcctaaaggcttggactacatggtaaattgtatgcaccaaatgggggaaaaggtaaataaaatcacttatttatatgtggttagtcagtttttgccaaaagtaaattagagtcttatcagaagtaaatggtaacctgtaccagggcaacccccacaaggctaactcaagggaggtgttatgaaatgaatgtttgtgtcaccccaaaattcaaatgttaaaatcctaatcctcagtgtgataatatttagagatagtatctctgggatgtaattaacattagataatgttatgagggtagggccctggttcaatgggattagtgtctttataagaccggaaaccagacagttcacaaactttctctgccataagaggacacggcgagaaggctgccatctgcaagccaggaagagaggctgcaccagaaaccaaccaggctggcacagtgattttggatttcttagcctctggaactgtgagaaatacatttctattgtttaagtcactcagtctatggcactttgttatggcagcctgagctgactaatacacaaggttatagatttttaaggctgctttaaattgtaaactcccggaaagcatatttggaatgctctgctggtgatactttgaacttgatgtttttcttctactcaacaagaaggtacaggaatactcgttcgtccccattacacatatatgcacacccacacccacccacgtgcatatacacacagtactctgagaacagccacacctcgctgagacaaggttttcttcacagggaaacataagttgatagaaagtgcagttctaggatactttggggaaaacagacatgcctgggcagagtcctgcagccctggacttctgacccagtcactgtgtagtgtgcttcttgtctgaagaagccacagaaatcagacaagaaagtagatacacgcaggatgggatgtactagggccacacggggtgggtagggagccatgaaacacacatgcatcttccctgctctgtaacccttcagaggagatcctccatactctcctaagaacctgtccttgttgttttgatgagaaaaattaacacagtgaatatggaacaattaaagatagggaggacaaaactacgtatattattgcagatgatgttcttcgaagtcctaaatgaatgcacacatctgatgatgctacagatccagaaaaaaaggaatgatcaattctattaaggatagtatgctggattatacacacacaccacacacacacacacacacacacacacatttcaaacaaaacaaaacaaaacacagaagacacaggtaatgtttagcagggttccatttcctgagttcctctggcttccattcccttttaatcacatccctgaagtaaactctgaatagcatataacatattaagaaagtcctttgttctaaaattatacatacaaagaaattgagtagccattgcttctaagctgaggggaagaaaatgaaattaattttaaaatcgaagaacaaaaggtttcaatctataaacttcactgacatacctcttaacaatcactaaaaatgttccaggtgctacacatacctaggagagccagcccacatatccatgacataatttattaattaatatagagttggaaggtactccaagaaaggggtaaatgaaaatctcaaccacaaaagtccaattaaaaacaggcataaagcactaaacatggaaaacaatcagaacacaatggatttccctcctttcccatgtcttcaagatagtaagaaaacaggctgcttaaaaaatgcctttattacgggaagatctactagacaggaaagtaggaaaggacagcccgtcccctccactccctagccagaaggcaccattcagggactgatcctctcttcatagcaaccttgtaaatgcacgcagtggttgaccacctccagtagtgggtcgctaaccattcctgaaagtagatcattccaaaacaaaaaacatataggaagtgctttgaaagctatcaggtattatcaggatgtgagaatcccatcatcatctttcatcatttgacagacacgactattagaacagtagtcttcaatgtatgtacaaagatattcatcattaattgtagtaagacagaaagtaaactcagatccatcagtaaggatgattaaacaactgttataaccaactagtgaatctatatggactgatatggtacaatctccaagatatatatatatatatattttaaaaagcagactgcaacgtagtatgtacagcatgctaccatccaaatgacagaaaggatatgttcacatacctttgtatattcatagaaggacacgcatacataactgactgcctctgtgaaggggaactggaagacgaggggactcgggttggaggaaatgtactctgaagcatatatccttttataccgtgttctttacttaaacatattttttaagaatctgtagtccttttatcctatttgatttttctctactttaaaaaacgttataagatgtaagggagaaattaatttcttgcaaagttaaattcttttccattctagcttctattcatgaatctttgtttaatctcttagaatgacaaaatacaaaataataacaacaaaaagccctctaatccccctttacagctattccttttatatgattctcttatagttcataaacatctaaaaataacttcttaaaaatgtgatactatcaatcaaacataaagatatggagcatagcttttagctattttaggaggaaatatttcttatatttaatttttctttattttcagtattaatagctaaattaattactttaatggcaattggtagatgaagttaatattcctagctttttatatacactaattgtgatactttgactcagagtaagtcaaaatattggctctattctttaaagtatttaaatgacatttttctaaatagaaattagtagacattcattgcagaaaacttgaaaagtagacaaagcaaagagaaaaattaaaacaatacataatcacaccactccagagaaaaccactattaattttgatatacagatttcctttttaatttccagcacwtgcatgtatatattatttatataatcagaatcaagctgtatatattgtttttaaagtctgttttaataaattatcaccctcacttatcttttgtttgtaattaagattataaaacacgttatttataaaatttcaaattttaattttaattttttctgttaatctctgacaaatgttaactaaaacaaaaaaattaaaaatttattgtctgaaattcacaaacggaaataaatcttaaagaaacttaaataaactttcaaataaatgttttttgaaagtttaaagcatttatatttctgaagttattaaagcttaaaactatactgggacttttggaatgccctgtattataaatatgatcccaggctatggtttttgtttttgctttttttttcaatgactaacaggattctgttatgctgctacactgtaatatctaatcccttattactggatttttttttttttttttgagacagagtcttgctttgttgcccaagctggtgtacattggtacaatcacagctcatagcagccttgacctcttggactcaagtgatcctcctgcctcagcctcccagggactacaggcacgccctactacgcctagctattgtttttgtttgtttgttttagtacagataagccttgtyatgttgcccaggctggtctcgaactcctggggtcaagtgatcctcccagcttggctgcccaaagtactgggattacaggtgtaagccaccccacctggcctggatatttatattgtctcttttaagaggtcacaaagaacataaaaattggggaataaatgcttgtcaggtaaaaacactccactcaggttagaattacaataatatactgaaatcctagagcaacaggtatgaaagtattaaaggtttttaacacatattgttaaattatcttccagaatagctaaacattgccaccaatattggcactacttagagtaaaataaaaatatctttaaaaataaaagtgatttttttcctcttaaccaaagacattcacaataattaaagtagtatgtttcaggattactctgttaccacagcttgaaataaatctccatggtgtggttcagaagagctcttttacaaactgacccacaatccttactggagtttggaggtaaagttttaaataagcccataatagaacacagttaaccaagtctttaacatgagtagtgggataacacatactggagctaagctaagtctttcatcagcttgctgagaagctgatcacaggagaagagggtacaggtggccaatgagggaataagtagcaggactcagccctcacctacagtgttgttatctttctggaagttgggttgaattaattaattggggagcaggggtgagactaactatcctgctccttgggtaagttactggatctgtgcccagatggaacatgaagggaaaaaaactgtgaagacactaattaatcttcctgatgttttcaagtctgactcgaaaactttcaactaaaggcagggccttcaaatccatttaaaatagaagtttcagtgattagaaacctgatcggaatgaagcttttggccctctaagaatgataagtaaactgctgtcaacaacgcattggacaaaaaaggtaataaaggaccttgggccataaccacttcctttttatatgcccctcgcctttcaaacttcaaaagggaggagaatttggcataaatgaaaggaaaaaattcatagccactaggagtgatcacagcccatacaaagcagaccgggcaagctcctatgatgccacaccatgtcacacacagacctccagaagaagtaggctatggcttttgaaagtgccaaatgtcctctgattatactacgtgagtgagcctaggagagatgggccttccaagaaaatcagattctggctgaattattcaatttggacaacggctataacttttatactagccaaagaatagaaagaatatattttatgcattcgacacaggcagttctggccctttataataaaaatggttccactgtgtgctggtggacccttgttaaaggcagcttctacgtctagaccacgggaacaccttttagttggaagtgctttccactgggctccttgagttcctctgtaacaaaaagcccttggatgaggaaggtccaagaaagtctttccaggtattagcgaaaactctcttattcagataaatagaacttggctctgacatttactagctgtgtggtcttgagaaaattattaacttctctaagcctgtttcttcatcagtagtgaggaagatattaatggtactcaccttataggagtagaaatacagattaaatgagagtgcaggaaaaacacttagcatctgaacatcatgattctctcaattttatagggaatataggttaactattttagaatatatagagtaaccaaatcttagccatcaaagtgttgcctaccaaacagacttagcaaactgcgttatttatttatttatttatttatttatttatttatttttttgagatggagtctcgctctgtcgcccaggctggagtgtagtggcgtgatctcggctcactgcaacttctgcctcccgggttcaagcgattctcctgcctcagactccctagtagctggaattacaggcacccgccacaatgtctggctaatttttgtatttttggtagagacggggtttcaccatgttggccaggctggtctggaactcctgacctcagctgatcctcccaccttggcctcccaaaktgctgggattacaggcatgagccactgctcccagcgcaaacggcatcatttaaaaataacccgttattaataaagatttagaaataaatacatttatgaaatccttaaggatgcttaaaaatgttttccttgattatgctacttacatattttctctgaaattgtttcactattcattggtcaccaagtcccttcttgaagacaaaggcaaacttcagtacctatctatataactagtgacggtgcaagtattcagtctgaatgattcatatggaattagtcacacaatcagaatgaagaacatatgcataagtgagattctattagctgcagaaaactgtcaattcctgaaaagtttatcttctccagcattccaatcaagaacctttttctcttttcacactatattatcggcaactcatggtttccacacccaccagcatgttaacactaaagctatatccagtctcaatctatttccaagtccctaatcctaaatttctaactgtctcttggatatctccccctgggtgtccagtaggcatttaaaactcatcagggtcatggcatgaaatagatggcacactgaaaggggagatggaagcaagtctgatgaaggcattcgttatgaggttgtaaacagcgtaagagaaatcaaaaagagatagagaagcaccctagggctggcaacaaaggaaaggcattacttatcactgggatcaaaccaaagataactgtaatgtcatgagcggggctcccagtggagttgtggccataggtagaagactcaaacacagtcacgccagtgcaaagaagggaggacgtcaggggtaagagacatatccctccttactctccttccaccctcaaatctctagttgctgaacccaatcaaaggccagaaggtaagaaagttcattttgatgcagccatccagggcacacaccaaagtgaagcggtccaaatccagatttactagtttggcatccacccctccccctactcccccaaaatgtgtccttcctgtggtattcactattttggttgataggataactcgctagagtagtttttggtcactcaaccttattatcatgacctagacctctgcagctcctactctcctactgcagcatctcctacttcaagttactcttctctccaagccagcatcctccatggactctagttatctttacaaaacttaaaccttggtgtattcacctcctagggctgccataacaaagtactacagactgggtggcctcaacacagaaattgatttttctcacaactgtagaggctggaagtctaaggagtcagcagggctggattctcttgaggcctgcttggtttgtagatggttgtcttctccctgcgtcttccctctgtgtgtatgtgtgtcctaatttcctcttattataaggacattggtcatattgggttagggcccattctgatgacctcattctaatctaattacctcttaaaggccttatctccaaaaacagttatattctgaggtactagggggttaaggcttcaacatatgaattttgagcaaacacaatttacttccaaagcattttctctgcttaaaagccttcagtgtagccgggcacagcggctcatgcctgtaatcacagcattatgggaggctgaggtgggtggatcactttgaggccaggagttcaagaccatcctggccaacatggtgaaaccccatctctactaaagatacaaaaattaactgggtgtggtggcacatgcctgtaatcccagctactcaggaggctgaggcaggagaatcccttgaacccaggaagcggaggttgcagtgacacaatatcataccactgcactccagcctgggtgacagagcaaggctctgtctcaaaaaaaaaaaaaaaaaaaaaaagcaaggaaaaaaaaaaaaagcttcagtgccccttcccccaccattttttttaagacatactccagatttttaaacttggcatgcaaaatgaccttaacaacttggctacccaacttagttttccagcttcacctcttgcatctgctgtttttgcattcagatatcaagctccccgaaccaaccatactttatacctcctcacctctgtatgtgctgtcctctttttgtaaaatcctctcacatgtccagtaatctgaaaagttatttttgatgcctgaggcaaacccaattacccccttaacattcctaaaaaaaacttgaacaccctacttttttagtttgtttcaccctgaatggcaataaattttttacgtctttctcccgcagtacactggcaattccttgaaggcaaagacgatgtctgtttttgcttatcactgattcctctgcacccagaaccgtacctgggacacagtaggagctaaacaaatatttcttgaatgaaggaaatgaaaaaataagtgaaaacatgaacaaaccaataaaaggggaaagggtttctcttttgatacctagtacagtggtatggtactcaccaaacttaagaatgtacttaataaatgattgctgaataaaatcctgactgaagcatacgggaaaatctgaaaccatgaagggatctggagttatttactttaagaaaagttatggaagctgattatctttggggtaaaaaggaaatggatttttaaaagcctataaacttcagggaagaagcgccaagatacatgtgacaaggcaatctgagctccactcagatccaagaacaaagggttcctggtttaagctatggaagtatctgttccagaaagcagctgggcagaatttcctcacacgaatagctcttaatgtatgggaaaaagaaaagagcaaaacaaaacaagcaaaggcagcaaaagggaataattagtgtaaacagtttagttttttttttaatgcattggacaaactccaagaaggaaaaaaaaaatgttgtgggataaacatctgttcactcggaacatgacagagcccttgacaggctctgcggcctgtgtgtgtccttatgtgcccgaggtttatatttatgcttccactgctcagacagcccacagagtggcccagaaagagagacctattccaggccaggacgcactcctctaactccacgtgggggtgtaggggcaactctcattcggttgtgtttgacacaacaaaaaacacactgaagggaagaagagcaaataccaattgcacatgtggaactgctctactccacctgcactgggttccatcaacactgtattttattgactgcacggaatgcacagaagtgaccagacaccacacgtttatggggattagcactgtctttccatccctatgatccttggtatcaagatgttaagtgcaacaagttgtaggagtctgttttcttgtgccagatgtgccttttgcaatcagtcactgagtctaggagtttctaagaagagaactccatgagaaaattcatcttcagttttcagtaccacctgatagtttctaagaggtgcatagcagtgggcctagagatgaagccagatggaaatgatctagcawtgtgcaatgggcagtgccctgaggaaaacacccacaaggggtggatggcctcaattctcatctccatgacgatagatcacattaccttagagccttgggccacgtgagtccaattctgaggcctctgacccagctccatcagcccagccgatcttacacaagtctcacccttaggagtacattgtgttaagatggggacagattgcctcacccttacctttctttctggctgggttcacaacttctcttgctctatcatccgatttactccattttctcttcctaaggcccatggctctcagtttttcattattcttatggcattcatgtctaactctggcattctattagatatctggcaggggtgactgccttttgcttttctcctagacctttgtccccagcaccatgtgtacattttctgtgacctgcctcaagacaagaaaaatgttctttttctccccttaggcataaagctctctgggtctctaaagtctccctgatagccagctactgacttactccacataacacaagaggtcacatttaacagaattattctgagagtggccagttggggctgttaagaaaactaattctcaagctgatcctggcccacctgctgacttggctggaagaagcgctggcacccagagcttcacactcagaagaaggtcatgggggaagcagggtggctgccggctgggaggcatctgaggagagtgaggatttcactaggctggccacaaaagatgacaccaccgtcttttttcggggggcacctcattctatctgtctacacacagatatgcctacacccacaataaaaatgtttataaataaaaatatttggtactagttttgattttctacagaattgggactaaaaaaccaatttattcttacacttgtggattaaatggtaactccacagtttaattttatctgaaaggggraaaaaaactgacatctagcagttaaacatgtctttgtcactagaggcctatgacacaaatctcgatgatattttatgagaacatgtatagcttttctccacttgtggctataattgctgttggagaagccccaacatgtaaaggttgatgcttctgaatgtgctgaaagatgctggaactaaaccatgcagtgacagctatcaaaatgtcaccaatgcagtgtcatattcagtcaagatgcttaaaaattcaaatgttcaactaacactgctctagtgtgcgaggaagagcattacctggctggttggtagggaaatgaaatgagattatgtgcataacagcacttaggaagaagcccggtgcagggttggctgagctaggaagagctatcattcgctgggcactgactccatagagtagtgtatgccagacagtagtctcattacacatgttttaattcaattaatcctcaaaactgtgaagtggatactatcctcatgcctgggtaaaaggtgacaaaaaggaggctaagagaatacccagctacttagtattggaggctggattcacatccaggtctgtctgactttggagtctctactttaaccgttacttaagttctggtttctcaaagcatcctgaagagagccatgtacatttcaggtgccctttgtctttactgtcccggtgtgaggtatgcgctgcagggcctagcaatgtactctctttacgtgggcctaaacacccactggtatttttaaaaagacaaaatacggtatttcaagtttctaaataatttttatttaaacaattacaactccttgccacttgctcattaattgaaaaggtttcatttgaaatcactagtatttattctaggaattagtagttagtttgaagagaaggttgcagtagctaaaatttaaatttatactaatttagggcacaggaagcagtatataatatagtgaatcatgtttcaaatggaaagcaaacaaaagagtgtccaaatgtttcatcctrtatctatcagagtccatttctggtgctaaataaaataattaaagatctctgccctcagtttaccccaagtgcaaaatgaaaatagtacctcactcaacagatgagtgattaaattagctgcagctgggccagcttggcattaagtaactgctgtgcaagactttttgaccgcaaaagagcaaagtggaggggaacaagagccaaaaaggacacacccacccatttgcgctcccttttgtattaggaatgcagggcctcagcattgcccaaggggtttcagggtaagatgctggacaggtctgatagacagttctggctaacccttgcttgaaaaggggaagagtttgggttctaagtagctccagaataaaaggaagaagggtctttgagacactttgggagtttgagccaaaccagagactctgaaaatggggaaagcaaactggaatttccttgaaggcctatctctaatttctactttctacctacccccaacccaactcttgctcccatccccattcccattccctggagtcatctgactggaaactggctcaagctctgagtgagtcactggttgaccccagcacctagactcctggagccccccaggaaccctaggagacacagtgaagcccgttggtacaagcaactcaaaacaagaatgtgccaacttcccaaaaaaaggcaatggttgggcatgtgctctctgctccacaatggcattcttcaaatgctttataagccacttaaaaagaaaactgcctacccataattccctgaagacgtctggctggtttatgcaatttcccagttatgcatctttcctgtaaagggaatctgttggaaagctggctctgcacaattgggaaacttgggaccatcatgattaatcattaataaattcacagagaacctcgcctcatggtttaactctgcggtagtctccagaaaatttgaataaatgattctaaatattttttaaaagcatagatagtagaaatcttccatgtactttctgacaactcttatacagattacaaatttctgtactttccacactctcccaggaatccattgtctctaacacctaccagactgcatcctttgcccatttgcccacactcactatttcatcccacctacctactctttatttaaaaaaaaaaaaaaaaaacaatttatatgttcctttctatgttcatttaatttagttttctggatccatgtgtatgcagtatttgcacatgctagatgctagtgctaaaaaaaaaaacattaaatatttaggaagtaccgcccatgggttcaactttttattaggaataatgagagataatacaaaaaaagccatatttgtgtgatcgtgtgcattgcacaagtatgtgaatgtgtgggtggtgactgtgcatacgtgcacttctgggggctcccttaaattactgcctctgtagcctaatgctgtggctgactgaacagaagaaaatgttctcaacacaatgtatgataagataaattaatacatacctggataggtgtctgaggagcccgaggaggattagctatcacataaccatacactaagctccatgcacgggcccagctaaaaagaatatactaaaaaccaatcatggccaggcgcagtggctagtcctggaatcccaggtttttggcagactgaggtgggaggatcccctgaggccaggagttcaagactggcctgagcaacttagtgaggccccaactctacaaaaataaaaatacttagctgggcatggtggtgcatacctgtagtcccagctacttggaaggctcatggaggaggatcacttgagcccaggagtttgtggttacagtgagctatgattggcccattgcactctagcctgggtgacagaattagactctttctcttcaaacaaacaaacaaacaaaaacccaatcattttctgggtttctttcaggatgtaaaacccttccagattattaccttttacctaactaaattctggcaatttttttttttttttcccggcggggatggagttttgctctgtcgcccaggctggagtatagtggtgcaatctcgactcacaacctctgcctcctgattcaagcaattctcctgccttagcctcctgagtcgctgggattacaggtgcttgccaccacgcccagctaatttttgtatttttagtagagatggggttttgccatgttggccaggctggtctcgaactcctgacctcagctgatccacccaccttggcctcccaaagtgctggcattgcaggtgtgagccactgcatccggccaattctggcgattttagaaacatccatattggtctactcacagtgccctaaaaatgccaggcaccctcttgcattcatgcctagttcacatgtcccttctgtctggaatgaccattctctcctttacctcctggaaaacttgtattctttcttcaatgtcttattcagatgtcaccytttctttgagtccttcttggactccatagcagacagagctcacagctctttccactgggctgctatggttctacgtgcacacctctattacaaaattcatcatgytgtccaagttagttacttctgtgcctgactctgccagtagactctactcttcttgagtgtcggacatcttcaatcttattccataacctcccatcctgacttaaaaagtgtcagtagactgtctgacatgtcataggcactcaaataaatgttgttggttgaatgaatgaataatgacatattacactagttctttagaaacaaacagaaactcctgaaattgaaataagtgaattccctcagaatgcaggaatttgagataaaatgttttatcctttagccatttaagtgaaaagagaacttgttgatgatgttaaagttccaaaaaatgcttttcataccagtaaaatttccagacatgcattaaagcagaatcaaggccgccagacagcttaaaccactggcgataacttcagacagagaaagaaagggcaaaggcattaatgagaatgaacaaaaatttcctactctgccaacttaaaatctcttttcaatttagaaaacctcccacaattcctgtgtaaaaattcaaagtgtaaatcacgcaataattaacaataatgcaggcaaaagctgcattagataagtaagattaacaagtgtagtagaagtctcaagctatattacatagccttattataatgctgaaagaaggaatttgacttccaaacaatgaaagagacaaacagcagaatggtccaagaaatggagaatacaaattcaagcatggatattgccaatcctaacagatgaacattccaaggagctcatactggtactgagatttagcatggtggcagatagtcccactctgaaaccacttttgctgctggtagttttagggccgccatgaggcataaactgaggagctaccttattactacaacagtgtgtatttcagtactttttaactttcttgtgttgatgtagttattcaagtggtcatttttgttttccctttggatctgtcttttctccctatgtagccctcttcatttagagtttattggtacagttttactatcttgctgatttaaacctgatataaacattttgttgtttttatttttgagtttttttattattaggtgagggtgaacattgttctatgttcattagttgtttcatttcttcttctgtaaactgaacaacattgctcttttacctattgagattttaagtcttctgatcaatttaaatagaaatgctgttaactttttattatatttgtgatcaatatcattccagttttttaaatagttttcatgttatttctgacacatagaagaaaagctcagcttgcatgcttggataactactcatgattatatcattagtaggtgggatatcagagattagaacccaggcctgcctgaccccacagatcaggtccttaaataatttgttggctgggcacggtagctcatgcctgtaatcccaggactttgggaggccgaggctggcagatcacgaggtcaggaggttgagaccatcctggccaacatggtgaaacccctctctactaaaaatataaaaattagctgggcatggtggcgcatgcctgtaatcccagctactcaggaggctgaggcaaaagaatagcttgaaccaaggagttggaggttgcagtgagccgagatcgcgccattgcactccactccagcctggtgacagagagagactccatctcaaaaaagtaataataatttgctgaacagggttaatacatttgggtccaaacttgattgatgatatgtagccatcattgaggattatcagttaatgtattttgtatttgactttgttgtagctgtctatttttgctgctatcaaagcttgtttatccatagcagcctgtctaccttgaatctgttgtctcatatatgcyaggagtgtaaaaataagctaactaagtttgccaaggcagtataaaacaaaatggctgactgcattttaaaaatggggtgtttggctcttcagacttcctttctttaagtttagggatcaaggtccttttccagggtgttgctaggagtctcacctttggataactgaggtttttccaggactggtaatctgaccttcatatagtaggcacttgataaatgtttgttgaagataatgatacttttctttagttttctaaattgcccaggaaaagctttcccagtcaagattagagacacagaaattttccacacacaggtaaataactgggaaattattttcataaggaaaaaagtcttacagttttctgtaaataaaagagcatcctattttcattctcacagaagtctaaaaattatagaccaatacatttgttttctaaagagaaatatgtaattcactttaaagaaaagttggctgtgaaagagatttctatcaattaaattgaatggtgaatcatattttcccattaagttccatttaaaaatttgtaatacagaatcaaacttggccttctcctcaaagatgtccctagactacgtatattcatttaaggaaaaaggcaattttttttcaattcaaccaattaaaaatgtaaataagtcacaaaatcagaattccaaataagccttaaaattccatatgtctgcttcattgagagtagaccctactgtaaaataagataagccttttatgctctttgcaattaattctataatcctttctctcttaaggtaaatattcctttctaaaagtcttctaaaattaattattttgtaggataactcctgatagcttatttataatgctggggacaactgctcaggaactattaataacttagtattctttaaatagactatgaaaaactgtaatttacaaatatttataacttgcttattctgtgactaatacctgccaagctttgtagtcagcagtgggtatagaaatataaataatatataaataatacatggtctcaagaatctcccaattagtagcagagaaaggcagacaattaatttaaattcatatcataacaattattattgagcacagacagccatgtagaaatacaaaaaggggcattcataactgtctggtagaagggtgctaagaaatgcttcagagaggaggtgacatttgcgacaaatcttgtgggaggagtagaaattaactaggaagacaaaattacaagcacagaaaaacaaaataaccttcccacactaactctcttaactctgggcaaacaaaatcggaaaaatatacctgttcttaccccaaaaataaatttgcaagtattggaaaaagaagcattactaataactaccataattttattaacaaatctaatcaaattactctacttttcttctcacacagaggaggtgatctagtgaatagaggtaaatatttttcctaaaatgtaggtacctcatgttatgaattatccgtgtatgcaacaactaatttcacacttcctactaatttccacctcctagaatccaaaaggaagccctctggaccagcaactgagctgcctgtggctgataaccccatctggtggttggtatggggaactgtgtggtacagggtttccatccttctacttttcttcccagaaggaaagaaaatgctgttttttctcactgtctctccttttctctttatagctcattatctccagcacctggccctcagcacacaaatatttgtttttagattcccaataaatagttatagaactgagctgttttgaataagaaatcattaacacaaggcttttccatttttcctaagcacttttacatttattacctcagcacttttagctcagtcaccttagtatgaagatgaagaacagtattgtataagtcatcaggattctcatctgcttgcattaaaatacggtgtactccataaggagatgacccctctctatcgatcaattatttatgaataaatgaataaattccctatccttttctctccaaattcttaacctggtaccttaagaactaactgttcttcattttatttgtaaggcaaaagccaccataaatcatccatttgagttgtgctagttaaacatatacttgcagctgagcaaacggagggtaaagattgtgataataaagaactatctacttctacagctgttgaggtagtttttaaaaagaactcaaatattccagaagtctccaagtacttttttctttatcttttaatttagcctgccttttctgaggtgccgaccttcaagattttttaaaacttcaattttatttttctgtaatgttaagttacttaggttgcaaaggtattagtttacagaagcaaaagagagagaagagagatacaggaagaatacagataaagcaaatggaataaaatttaaaaggtaggaatagcacggagatacaaaacagggtctgtgaaagactgattctcaactataaagtgtattcatatacttgtttacttaagaaaagacaaaaagaacacaaatatacaaactctgttaatagttacactgttgacatatctcccatagccacattttctgagccattttgaagaaatcttttatttaaccttttctattctcaagtatcttgtcctgtgaaacaaaaggacctgattatatgatttttaacgactcttctagctagaagtttgctgttgttgctgctgttttgaacattctctgagtctatgaatgatttaaaaaaatacataaagaagggcaaggaaaggaaaggcaaatgaaggcaccagaaggaatataagatttcatacacagaaatgtaagaaaaataatgctttccagcctaacacctctacttattaaaggcattaattaaagtaaccaaatgtggctgttttcactcaggatataccctgcaatgccaaaatagcaaccaccttaccaccaccactcccctgttcccctaaaatcagaaatgtttcctttgaaatattcgtgtttctccaagttgaatgtgtcattatccaaaagaagtctctaagctaaacttccatattcagcttcaggttttgaattcataaaatgaggaacttaaaactgacctctcttgccaaggtgttgcctattttgtttaatatggcactttaaggccttcagttttaagacacttgagaagtacaaagtatcattatgttaattactattattataaggctccagagcttaggtgagctatatgctaatgtctaatgtactcagtagtgatctacgacccaggaaggtgatttccaagcatcacatgtcagtctattgtccttgtgtaactccaaagagccacacacaataggcagaagcaggcacagtgacttgggctttgataatattgctggagtccaactttctgtgcaactctgctgaatactaagaaaaatatgaccctactctttcccctaagggtattctttacagaattcaaatcaagatagaccacagaaaaaccaaaaactcaatcgtgcatgtcccggagaaaattaggtagtaactcctaaataaatcagtacttaaccaacttcaagacagatattcctaaagtttagtgtgtgttcaactacctatgaagctggtgaaaatgcagatttctgagcccctaaaattctgatttggtaggtctggcatgggttcaaggagtctacactgttaacaagttcccaaggctgatgcaggtggtccactgacaacattcttgagaagcactgctttggggttccaggaagcctgctaataaaatagcaaaattctgattcaacacattcaacaaaaatttagaggtctcaaagacagcaataccaagtgtaatgtattaatttttaccacagtttctataaagcagcaacttaagaggctaagatttggactactagttccaaagttttgaccaaagacaagttgaattgagaaaatgtttcaaaaatgcaatgtcaagaaatctatatgtatatgaacaaagtaaggcagaagaaaagactttagatagcaaaagtggttgttatacattttgtattttcaaatacaccaactagcagcttagaaaacagatgtggcaaacagtggaccaatttaaggcctattaagtaaaatacataagcaaaaataagccatttatgaataagcttctgtaaggaggaacatccaaggaacaggatctgaaatcctaatacgtctttgcattcttaaatgctaaagtcatgggggagaaaaaaaacaactccaagtgaaatgctatgaggtgttaatgtatcaaagtgttactcactaagaataacacataaaactgctcaagtgattaccacagggttttattacaaagacaaatagggatacaagagatatagctaaatgaagaggatggctttgcagaacaacagaagaactatctacccaaccccagcccccaactaaattaaagactgaaccactggcaagaaaaagcatataaacttcctataaaactcctggtataatcaccagcgaaatgaactggatctgtacttagggctcaatgcctagtagccgatgaccatcctttaagactcagctcaaatcacacctcttctgtgaagtcttcccttccttaacwcagcaggagaaatttcccagtgactacaacattggctttggtattcaggtattgtactatttttataaccaaaataccagtatttctgttggtggagtagcatgatttcagaatgggtgagcagtgtcattcatcctgagctctctccagttcatcccctgtgcccattcctgtctccccagccacttacccaagacaccttcacagtaaaaccgaggaagactcccagctcctccttcccgttatcagctcctgcaatttcccctccctgcgccaaacccaaaaaaggcggaggttagacttggaggaggagaaagatcccttgaagttgagggaactcttccctgggaaagggttgacctagagagaaatcaaagctggtactgaggccaccagcaagagctgagaagctgccagaggatagcagtggccctgaaaactccacagccctgttgatctggtgtggaaattctgggaggcccagggcagaggggctgtggtcaaagctcttagaggcacatggctcttcattctcaattgtttaaggcaagtttgaaatcttgaagaaatggattgctaaatttcagatgtggctctttgggggatagaaaaggggtgctatagacagaatgttatagcttaaaggcctcaggaaagcatctccacctgagtttattcttacatattctaacatggtagatttaaatcatcctttgaaataaaaacagccccctgcagaactaggcttatcacttattcacagtgccatgtaaataatccagttgtcaccccatgcaaacctgcccactctctggtgaggtgtcagtgcccacgaacagtgggggaaaatctgtgtgtgaagactaccaaaaggggttggatatctcaagaaagacctggaaactcttctctccaagaaaagatttgaattgaattttctatttagggaaatccagaggtagataggtagcaaatgctaaaagttttaattttaagaaagggaccaaatgttatcaaagcatttccaactatcttgctctaatttattgttattctcatgcttdtattagtaattagttttaactcactattgaagaattactgtagaaaaacttcactgtagagagggaagggatgcttttttcttttcttttcttttcttttttttgagatggagttttgctcttgtcgccaaggctggagtgcaatggcgcgatctcggctcactgcaacttctgcctcctggtgggtttcaagcgattcttctgcctcagtcttctggacagctgggattacaggtgcttgccaccacacctggctaattttttgtatttttagtagagatggggttgcatgttggtcaggctgctctcgaactcctgacctcgggtgatccacctgccttggcctcccaaagtgctgggattacaagcataagccaccacatccagcctcctttgttcttttttcctaggtattcaatgcctcaagaggagctggtctggctggagcatgtaggcataaaacaggtaccaaaaatcatcttgagtcagcaaaaagagctgcaggtatagtatctgagaaattaaaaacctcatatatgtttactttagaacctacagagtaaagtcaaaaatcctaagtatcttttaagagcctcagtgcacttcatccatcattaactactatcgataaccatcttacccacaaatctgattagaacgctgccttctggcctcttaatttccttaaagagtcagagctgtgggagctattaactttaggttccctatcaaactatcattggcaaggacattgagtagcgagaagcttttcatcattctcacattgttttttttaaaaaatacatttctttaaagataaagaatgaaactgcagttgctgggaggaccatccagttcacttctcatgttttacaagtggaggaatccagagaagtgaagtgacttaccagcctcgggtcacctggctagagtgagaggtagaaaccagcgccagaacacagaagtcctgacttcactggctggcgctcttcccyagtctcacggtctttccaagagagaagcacagctctttccaagcagctttctaactgctcaggagagggtgatgtctacgaactggtcctccttcaagagccactaaaatacttacagattgccccatttagtttaccttagttccacttagttacaagttcaaacttctatcagaacatgtgtcaacagttccatgatctttagaggaaagacaagggagtgagttctctcttttctggctgttgtcaggaaaaggagatggcagtactccagctttttccccctcccctctgtattgccatgtatccaaggcattcttttctttattactgtaagataccctgcaaagggcaagaggaagccatgtgggacagcagatagaacatgagacttggaatcagagaaggctagattgtaatattccctctacttttcacttgcagggtagcttgtctgaactacagacagacttagcttgtctgaactagagtgtcttcacttgtaaaatgtaaaacatcgcctactccacaaggtttttgcaaggatgaaatgagattctatatgcaaagcacctagtacagtgtctggtttgcatgagctcctcatagaaattagtttccttctctcttctgctgttatggttaagattcgagacaagtaatttaaccagttagtctcccctatataatggaagataatatatacttctgatgaaaagatactatgtaaaacaaaatatgattttaaccatcaagatgaatacctggaggcattaattcaatgtataaaatatgcaaaggtaccaattcactaataaatacactatggcaggagcttgtcccaagatgccaatttgctgaagcgagaggtacatgctagggccaaagtgccagggacactgactaaagcagccagagaaggaaggctactaccctactagagatgttcagcactgagtaaaatcccaagacagctaacaaccacccatcaagaaataagcagagctaaaggaagtggcaactgtacaggcgtgtggagtgatacggtggaaagagcgcaggaaaaccgggccctggaaaccctgtgttctacctccagatctgctgccagtggatgtgaaagtttggcaagtcctttaaaatgcctgagtattcattttaactctggaaaacagagatgacaatgccggccctatctagcttgcaaagagaatgtgccttgtaaagtagaaagcacaatataaatgtaaagttaaactactgtgattgtgcaaatatacaaagataggaaacaaaggactaaactaaggaagccccaaagggtgacaacaagacgggggaatgaaggccatcactctgattaggacaccaggtgaaggttccaaggaagtaacaccaaggagctgagtcttcgtacccagtactcagtgtgtagactaccatccattataccaagggaacagggcagcactggttataaacaggcacaagaaacatttaagttatactcggcttaatttttttaaaatacaataaaaacactacagtaataatgctgttaccatttccattccttgtctttggaatagtacaatgggcttagcattctctctttactgtgatgagtgacatattctataacaggaaaatgcattgctattaataaggaacctagatcatggggccataagcttttgtggacaagccccacacccagtttgagctggtcggcttttcctgcgtgatactgggtccacacagactacttggagagatgatcatttattgcaaggatatttgagaacacgaggaacaaaggcaagcactttgtgtgcactgtgctcactctggctccagctctcctggctctgggatgtggactgggtttcataagcaaggaggaaaagttgcttagtgctgttccaggtaacgatccagaagtgagtgacagtacagctcttgtttgccctgcatgtctgttacagagagatctgacttgacttttgggccctcctggtatatggacttgtactgggtgaactgagcaggtccaatctgctgcagctagatcactgctagctcctggcccatcctccaacaaggcgagctgcccaactgacagctacaaaaaaagaaagaaaaaggattgggttctgtcccccaaaatgtggttctgcatgtagcaggcactatggcttgatggactccttcagtacatccagtttccttggtaacccaactatgtactaaatggtttccatggcaaaacacgttccagagtccaaataaccaacctacacatacaatttggaatgcaacttattagtggggggctgcctgcacttgaaaaaatgcatragcttaataaacagtcctggttaccttattgtggcaccaaagcacatgcctctgaggagcccattcaaagggcatcacatcagggaaggggccagggagtgggagagccaaacctaaagtgtgccagactgagcaatgcgatactgtttctgcggtacacagtattccaagagatgagatcttgatctgaaagtaatggacctgacaaccacagaataagagtaaagtatttctggcattcctagaaatctcttctaagaactgaaataagattctcaaccttgaacaaggtgttcagtctacaatttggaactcaaaggaaaagaaggtattaccttccttttcagttggagtgataatatcccattagggggtgtatgaaatgtagggaggtatattaagtggtctcaatcactaaggggtcattcatccagcaggcaaggaccatggatgccagatgtccaagaatgcactggaccatatcacaaaacaaaatgagtacaacatccaygttgagacatgtgtcctattactaaaataatttcctaaagggaggccgggcgcagtggctcacgcctgttatcccagcactttgggaggccgagacgggtggatcacgaggtcaggagatcgagaccatcctggctaacacagtgaaaccccgtctctattaaaaatacaaaaaattagccgggcgtggtggcgggcgcctgtagtcccagctactcgggaggctgaggcaggagaatggcatgaacctgggaggcagagcttgcagtgagccaagatcgtgccactgcattccagcctgggggacagagtgagactccgtctccaaaaaaaaaaaaagattttcctaaagggaaaaattataactttttaatgtatttcttgctacttgtcctttcttctttaaaacaaaaaattaaggggaggaaaaaaaatctaaataatgtttttaaaagttcttaatctgtttaatgagagttctatcacaaagatgtgaacttaagcaaatgatgtaaaagaacattaagaatgatttgtcaaaatgaagaaggaagcaacttgactttctaagacaggacagcacagtgtgaacagaggctccattcttgggcttgggagagtaaacctgtcatggcacctactgtaaccttcgagttcagaatcctgtggcccaaggtcagggactacgtaggcctgcttttcactctgcaactaacttagattttctgtcttacatgccagtagttagtgattatgtagagggaagtcattaagtgcaaaaatcactcatttcagatctccaaaaagactacggaattttaggtctgcgatgggcagatcctccagaccctactctcttctgctcctagtccaatttcaggtttaggttattcagaaaacttccttagtttcagtactcccttcrggggtcctgaacacttttaaatctgaactgaactgaaaagtcccatattagcttttcttaaaattcctagaaatggctgaaaattttatacatgagagttctagagattaaaatccaagtcaggatcagaatggatttgctagggggctgaaaatcccctaggcctccagttctgaccaaaagcccagttcagcctcaagatccaagagactgggcaacatccagagtcactcaatagttgcagccactcaacattctacagtggccccactgatggtacatcctttcatattttattcaccactcatgtttccttgtctgtrattcatgttcatggttttttgctcactgtctatcagattttttgccattttcttaattttaaagagttctttattttggatatgaatcctgtgccaattattttaggctgataatttgtatttttaaatgcaatgagactatgaaatggcaatttggatctgctatcggggacataaatgatctaatgtaggaaatgctaatatgcacatggaaaaactttaaaatatgatgagggtaggaagtagacaagaattctagccaagaggaacttcaacaagtgagcttaagaatagtctgctgacttcaaagaatatcatcaagaaaatgaaaagacaacacacagaatgggagaaaatatttgcaaattatgtatctaataaaagtctagtgtccagaatatataaagaactcttacaactcaataacaagaaaaataaagcaacttaaaaatgggcaaaaggtctgaattggcatttctcctaagggatttgaaaatatgtgtttacacaaaaacttattaacatgaatattcacagcaacattattcacaataggcaaaaagtggtaacaatccaaatgtctactacctaatgaatggataaatcaaatgtggtatattgatatactggagtattattccacaatgaaaatgaatgaagtattgatacatgctaaaacatggatgaaccttgaaaacattatgctaaaaaaaagaagtcagtcacaaaagaccacatattgtatgattccacttacataaaatgtccagaacaggcaaatccatagagacagaaagtaaattaataattgtcaaaggctggagggttggggaaaactgggagtaactgcaaagggtgtgggatatcttttctggggtgaggaaagtgttctaaaattgattgtggtgatggctgcacaactctgcraatatactgaaaaccactgaactgtacactttaaatgggtgagctgtacaggaattatagctcaataaaactactaacaaataaataaaagaataggctgaggcaaaaagtagtgaaggaaagggaaagaatgacagaatgccttaaacccagggtgacaattaattttaggtttctgctacagtgtattttcctttggcccttagtaggtatctctaaaaatgagcagaaaaygcaacttgtaaaaggcagtgaaagtcaggaaagagaggtaatatacaaagccaggagtcaggcaaggggaggctggagccaaatagctgaaaaatgtaagggtctagatttaaacagcaagggctgagacaaaggagaagagatgcgtatttacagatataagaacatgcagggcatcctcccagctctttctgtctgtgcttcatctttctcctttgtttcatttctgtccaacactgtctataagtcacaccacactggaaagatcagtgattctcaagtgtttagtaagtatataaatcactaagggtacttgttaaaagcacaggttcctaaaaccacacccagaactttagattcagaatgtgggtggccccagaaatccacttttaatcaaatcccaacctcatgttgatgcaggtgctgtgaggaccacactcggagcactggtgtgtgacctccatggtccggagccccctccaaggaactagtgggtagcatgtaagaccaaggmctttggaagctaacagatctgggtttgaatcctgttattgccacatactcattgttgacctctgacagttacttaacatctgtgtgccttaatatctccatgtgtcttcagacccaaaggtctattgtgcacactgaataaaatagtgtttgtaacaggttcagcacagtgtcttcagtgtcgtggcttctggattgctcttgtctgtgattcttgtccctggccagcgtatcactgccatggccggtggacatctcactgctatctcaataaaaactttagagaaggagccttaattcagagtcagtggatccctaaagcatttgggcttatatacaagcaagtccatgcatgttctgaagaatatgcaagattatctgggggtagagggagttgtggatggttacagctatcatgagattctcaagtttgaagtggggttgtgactcaagcaaagtctagagctgacccctgagagaaatatttagtccctcacttcagatgtctgcttctacattttcctcactagtttatcctaaatgaattcaggtgactggtattacctaaggtccctgtgcacagtatctagagggaatttcaaaaattggggtccctgaacattttgaaagaaggattcagaagaagatgttgatgttgatgatgatgacagtaacagcaagaacagcaacttataatacatcaggtatttacaatgtgcctggcactatgctaaacacttaaacacattctctcatctaatcctggcaaagattctatgagggttctagacaaagaaactgagttatacagaaattatgtaacgtccagtagttcacacgactacaaagcggcaaccagggctcaaacccaaatgttaccgcaaagcagtggtcttaaccagtgtgtgcctttgcatttcactaaagactttatcatgatgggaggggcaggtgggtcaggatagaaggtaaagaggctgttgagggtagagatgaagttctatttctgaatgaacttcagaactcaggtaagtttctgatcctttctctgttttgtcaccataaaatgggggcaacagtggcaacgaacctcatagggttgttgtgagaactgaatgagctaacaggtatagagcgcttaacacatgtggcatgagtgttcattggtattagccactagtagtatccagcatcagtatccacatacatatattttcctatagaaatagttaatatggttttgatgtttaggttttttcattttttcaattgtatatatttaaggtatacaacatgatgtttttgatatacatacacatagtaaaatgattactatagtaaaacaaataatatgttcatcactttccatagttacttgtgtgtgtgttaaaagcacataaaatctactctcttagcaaattttcagtatacaatataacattattaattatagtcctcatgctgtatatctgatctctagatttattcatcctacacaaactgcaagtttgtattctttgacctacttctccctattttcctacctcttccccacccctggtaaccactgttgtactctctgtttctgtgtatttgacattttgtttagattccacatataagtgagatcaggcagtatttttctttctatgcttggcttatttcacttagcataatgtcttccaggttcatccacgttgcctttatgaaggctgaatactagtccattgttttatatatatatatatatttctttatccaataatctgtcagtggacaattaggttgtttccctactgatgatcatttcagttgtttccaccattttcacccttaacattaaattacagggccaagttaatctacacttttaagaaagagtttgaaaaaagtaaatgaacaatctctggtgaacaactctaccagggtggaaataacaaagaccaatcaccaaaatatctatctacacacaaatattctgaagggttttcatattgaatgaacacaaaaatctaaaattttaaaatatcatgctccataawctgtttttttcaaggaataatatatgatgatattatagttaatgaatccttaaaagctctcaaaataatttcctttagctttaaaacacattaaattggttgtgctaaactctgacaaagttaaagttaggaaaaaagtactaggtcagaggaggaaatgaaaacatggaagtgttatcaccatttggtcataaactccttttctcagagaaacatggctataaaaatctgttccaggataaaaacttggcacaaagaaacccaatctgacatcatactttttaaagattagggtggagtagggagaggagggattaaaaagtgggagggaaaattctttgcatgcagggaaaaaaaggttgtcagtaaagtacattttccactgatacatataacttcttcaaattaatggtttggctcagctgaaatttgccaaggtagatttcaggctttttcaaaaatgacctctattttgttgaagctgtctataaaagagaatgttcacagacaggaggttcattccctgttatggtcctatttgcaatattatgttaacccatcatttgttttgttttaaactaaaggcttccccattcattaagtcattagtgttgctaatgaaagacagcgtgtctgaattttaacaagtctagaaaaactccaatatgatcattaatccctctattacaggactcaaaatcagacataccaggatcaaattatatgctctttaataaaacttcacacaggaaaatctgaaaacattgatgttagaccgttcctccaacaacagtgtacagagctccacttcatatatgaattttacacatttaagagccttagtcactgcctacttacaccaaacttgtaatcaagaaccataccattactttagatactaaataattaccttttaaaaccatgctgtggacataacataccttctacagcaaagatgaagtagaacaactttatttttaaaatccacctgacataccccccatccacattgatattctgccctgaaaactaagtaaatgatgctttattaatataacaaaccaatcattgatcattgtctagatggaaacatactgatatgagaaaatcatggaaaatctgagagctaggggccctggaaggaccagtgctgtgaacaacatgagcttaatgaggtcatggtcctaacacaagaggaaagctctgaagtgctggttttaataccctagagccttgctccttctggaattcttctgtccccatcatgaaataaattaggaaacctaggtgtttgtgttgggtggggaggcatcagagtaggagaggtcttcatgaatctctcattctgcagtaataggggtaaaaactgcttcctaacatcagaattatgttagctatcgagagcaagaaaaaagttaaaagtgtgttcttatttargcaaatatcartaaatatgaacaacagaattcttgcaaaaatgatcatccattatatatcctttataacaaatgttcccaatctgttggcctcatggcatcatgggggtttagggttgctagaacaagtttactaaatgatcacacaccaagcattatttgaagactgaataaatgctctgtgtgtgtgtatgtgtgtgatatatacacacatatacatatatgtgtatgttatgaaccgaatatttatgcccccaaaatccacatgttgaagccctaacccccaatgcaatagtattaggaggtggggcctttggaaggtaatttggtttagataaggtcatgagggtagagtccccatgatggaataagtacttttacaagaaaaagaagagatatgagggcttccactctactgtgtgaggatacagcaagaaggtggccatttgcaagctaggaaaagggtcatcaccagacaccaaatttattagcaccttgatctggaatgttttagcaaccacattgtgagaaataaacttctaccatttaagccatccagtctatggtattttgctatggcaggacaagctaagacaatgcatatgtatacatatgtatatatacacacacatagctacatatatcttttatacacacgtgttaggtgtgtatgtatgcacatatacwtacagcacatatacaatatgtgcatatatacatgtatatatgtatttgtctttcaaatatatacttatactgttgtgattaaaaaatacaagtatatttaaaaggcattttgaattcatttattaatatgaaatgctaaaagtattacttctatccctagggatctatgaaatgcttttgaaatttattttttacccatagtaaaatttactctttgtgatatacagttctatgggttttgacaaatatgtagagttgtatattcaccgtgacaacagagaataattccaccattctaaaaaaattgccttgtcctgcctctttgtagtcaagcgcttctcctatgcccatataaaaggttttgacattaataaaaggtcctcatacttggaagatattggaataatggtctcacagtgttgatgaccatctgttttataaccttaagctaccttttttatacattggtttctacttccatcaagtgtctgacataaaggattgaaggggaaagtcactgaaacaacaggataggaggaattagagacttagagttcagacttcaagatagtacaaagaaataaatgctagaacttgaagatggaagagatataggtagaaaaaaaagaaatatgcctgagagatgcaggaaaagcattgagttggataaagctgatgagtgatcatttacgaggaaaagtaataaactctgtttattacaaggaaaagtaataaactctgtttttaagcaagagaatgatagatcagatttgtgttttcagaagactactctgtctgtaatgtggcaactagactgaagtggggaaaaaggagatgcagggagaccagttaccagtcctgtttagagatgctagtagctcagataagtcatcacaaaggatagaagtttaatataaaaccacaagaagtgaagacaaacaggaaagcatttcaacagctacacagctagaatatctctagtatgtcattcagagcacatctgcaatcccagtcaatccttgtagaaaactggaatcatcaagayacaatacagaaagacatctagcaatatggctaactggataacctagagtcctcctgcaacaaaacactaagaggtgttgaataaattttttttattttttatttactcattttttttgagatggagtctcactctgtcaccaggctggagtgcagtggtgcaatctaagctcactgcaacctccatctcccaggttcaagcaattctcctgcctcagcctcccaagcagctgggactagaagcgcatgccaccaaacccagctaatctttgcatttttagtagaggcagggtttcaccatgttggccaggatggtctccacctcttttttttctttttcttttttttttttttttttttttttgagacggagtttcactcttgtcgcccaggctggagtgcaatggtgcgttcttggcttactgcaacctccacctctccgttcaagcgattctcctgcctcagcctcccagctagtgatcccyctgcctcggactcctagagtgctgggattatagacgtgagccattgcgmccagytgaaaaaaaatktttaaacrtagttacacttcctccaaattaagaataattcccaggagtacctatccctggtcccactacctatggcttgggtatctggggcacatggtccacagcaggctgtgagtgtggtgggcactgaggcttctcagagagaacaatgtcatatgcagttttcctgcatggtctgtcctgtaaagaggcataaaggctgttgtaccaaggaagtgacagggatcaagctctgttttattgagattaatctagcaaagaataagatacttagaggcttgaaacaggctggggcaagggtgaggagatgaacatgagagacgacacacaagcaaaatgaactggcaattgattagatatgggaagcaatagcaagaggtcaaaaataggatgcctgggtttcatggctagggtcattagaaggagggtaaagccattaatgaaaataaagaacatgggagaagtatagatttgggggacaggaagacaggaagtgttagatgataattcacactttaaatattacatatgaagatataatgactattctagcatgagacaatatagaagacattaaaaatgcagaactgaactatagaatatagatccttaaatgaggtttaggaattgctttaggggaaggtgcgttactctccaaactatatttaaactttttatgcatatatatttttctagggtgaagtctatggctctcattagattttcaaagaggtctgtgtcaatctgctattcctttaaacatactgtgtcaactttggttactgttaatctctggtgttgtacagtttccttacgatatgtctaggtgtcaatttctttttatttggcctgtttgagattcaccggactttctcaatctgagggttgatatcttccatcagttctgggacatcctgggggcattttcccatctactttctgatttctttgctcaatgtttttgttaactagcactttgcatctcagaccttccactgaggaatgttttcctacttgtgaataaatataaatgaacagcaactgcataaaacagtaatgatcggtgtgaaaagctttgctgttaagaaatagtgttaaactggaaatcatgaatttctcatcttcacggcagaaaaaaaatctgcacaaaacccttgagatgttttgcagaaaggtgctaggcctgattttttaaattaagatatagtatatcttatagctttagactaattattatgctgtagagaggagtatagcatttaagagaaataaggcatagaacttccccaagactcaaaataaatttaagacagaacttaagggtcaaacaagtttaagaaacatgtaccagtgagatttgarttatcacagatttatatacatcttctttctaaatgtgtattttctgcctaaaaaggaagctagataaaaacactgagatatcactaacttaagtggctagggaggtgggagttctacaccagaatgtttccaaaaatatgatattttggggctgattgattttctcccccaactaaattctgttctggttcttttttgtaatatttcaaagcaaaggctgagctcttgatcttttgggaggcacaggcaagacaaaaggccaaactcactaatgaaaacttgctgaacttacttttcagaattccattctaagtcatgaagaacccttttggccctgctcccagactagtaaaacgaacatctcaagtccctagaggataagacagctctctctaccaaaatcaaatacatatcttctcctgagagctggctgtcttagcatactcaggaccatctatttatcaaaggactaaagaaaaaaactctccaggagcacaatatttattataggattatctcagtgactcgagaaaacatgagtaaggctaaattaaaccatgtttactattacgttctattacttaaatcctgacacaaaatcagcctaagagatctggaaggtctcttttttgagaagactgatacggattttttttcaaggcaagaatttttttctttaaaatctatacctgttagttatacaatttttctcattgttttaaaaatattttaagcatctaaaataaaaattttccattctgttaagatatcaaatttggtggtaaataaaatcacatataccaatatatttaacttgcttattgcttttaaaaaacgtatttgatccaatttatccgaatgtaatatccttactcattcataattttaagtagtattattttaattttcagttcccctcaccctttccctaggtcctttagccaagtttcactttatcccagcccttgtagatcccaggctatccaaatattccaagagaccatgtttgctgccaggcacgctgtggggtaaaggcaggggaggggaggctggagacgccaacaggactatattaggtcacataggtcacagaagatcaaagtcatattccacctccaggattcagttgataaaccgctcttatgaaacagggctccacctctcagaaacatgaacaggcgaccataaaggaaagtatcctcctggctagccacaaggcacagcaataagaaatgactgtgaaagcccaccgccttaacatgcacatagtgtcacagctttctgcctctccagccagacctgtcaatggagactgtggttgagcttgggcaggggcctggctagggccagcctggccagaggggctgtggctcaccagccctcaactgatggaaaagaggcccaggccttaaagagtttagagtccagggaggcaatatgacaaaggaggcataaacacagggaaaaagtgtggtgccattgtggaggcaggcagtggcggtcaggaaatgttccatggaggaggtgatgattgagaagatctaagaacatgggcaggactttaacggaccctgtgggggaggtaaataaactcaatgttctggtctaaggagcagcctgagcaaggtatggaagtgaaaaaaatacaagatgtgttcrggaaatcacaaaattctgyttggctggacaacaggatacacgtagagtccagcctagggtggaaaagtgaacaggactgtaacacggaatctgaatgccagatggagagctgtgcatttacttcgcttggcaacagagaggcattgaagcttctcagcaaggacattacaggactggaatttacttcaaaggacagtgacagttccrcatggataaactgaaataggaargaactagaagttaagagcccytcaggacccatggcaactggaagactgaactaggtaatgatagtaggcatgacaagactcagagacattgtggagagtgggtttttagtccaaaacaactggctggctaataggggcatgaggtatggtcaatgcctttaagatgtaccacctgggcaccaagaagacaagagtgtcatgaataaaaacaggctgtaaagaagaaacattagcttattgggggaatgatgagtttagtttcaggccctttraatttgaggtgtcaactgaacacacagatagacatgtctatctagtggttagagaagcagatctgtaagcagggagaaatgctgagattagaaatggggatctgggtgtcatccacaaacaggcaatgccacaaaagtgtctagggatgttatcacaggaagcacaatttagcataatttaatgggttgaaaaaaggaaggagtagcagtgaaggagacaaggaaggatctaaaaactccaagttatggaagaaaaaagctatattataaaacacatgatagacatactatcatgaggatcagatgggatggtaaagtgaaaagcagtttgaatattttaaagtactgaacaaatacatatctgttattgttacagtattgcatatttaatctctagaaaagccaggctttccataatcttccaaagctccttctccaccaagtcaaatggaaatgtgatctcccactctcttgaactcttatagcacttaataagtattttctcaaggagcactaactaagcatcaaccatgggccaagcactacagtagggcctttctcatctacctccccacttggagtagatgaaactgaaacttagatttattcctcttcacagaagatgaaatgaagctcaaaaacgttaacttaagccaagattgccagccaataagtgaaggaacagggggcttctgatgccatgtattaatatgccttttctattaatccacaagtcacaacttgccatrtttgttctgatccctcttactytgaggaaattaaggagatgagccacatttcatttatgctgacagcctctgaagcacctagcaaagggcctcacatgtggttgattctcattgggtttctgttgcctgaaagaacaaacatgcatattgcaggtacacaggcctcaataatagtgagcgttcgtgggctgggaagttttgagtactcatttccaaggcagatgtaacttaacaaaaagttctaaaaacaaattctgtacttgtgaaagatgccacctggtctgcctcagggctgaagtcctctttttatgcacagagtgggaacagcacagggaatgaggaagctggttgtctttaaaccactcccacaaagtggctcaagccaagaaaagggcccacacctttcgtggaagagtgctatgcagactctcatgcccatttaacctttgggttcactacaacaactgccaacagtctggggaagagggaaaggtagagcatgtttcacgccagctctgatgatgtaaccttaaaactcacagcttttctgccaggggaaaaaaaagcaactggtttagaaactattttttccccttttctaatattcaaccaaaatctaatttgcatcattgactactagctttttttttttttttttgcataactcaccattgacttttttttttttttaattaacagaacttactcgtgtctaattcaacggattggttttggttccttggaagacaaatgtatagggccagaaatatgtttatttcataaatgtcccttgtgcaagaacacaaagttcttctcagaagcatttactctgcaagtcatagaaatgcgcagtgggagaccggtaaacaatatgcatctaagcatcgtaagggcgtgcagccacgtgcggcagggctgccagggacaccagacaactattccacgaccctgggcaaacagacttcagaagtgggatcacatttcagagcttcatcaaattagaacacatctcagagtcttctaccaatgaatctgactgatgttctcttttgtcaggattgtctaatttgtagtctttttagggtacaacaaatcaatattttttcctacatatgatgacaagacccaaaagtagcccttttcttttccaattgctgggagtagttaacgtgagtataatatctttgcctcctgcatggacaagctgggacagaggaacagtcagactggaatggggttcctcccaggcccacgatatctctctatgcccatggaggagatggtgggaatgcaagccttctcttggtaatttttacccagtgtggatggggctattggtctctmctgagcctctccctgtcaaatgcactgcatggggcttgggacttcctagaaagagccatagcagaaaccaaaaggagtacaagcctcagctagggcaagagtttgacgttggctttgggcgggtccacatgggatgcttttcccatgactcctgaaagaactctccaagtctgaatcgataatcaatgcttggatagctcaaagttgacaagatagtataaaacacagaaaataaatgagagcttagcacagtcagttctcaaaacctatcccatgactacagccttcttgaaatggcatgtctgttctatgctctgaactctggaagaattaaccacaagtattaataactttagcaaatatctaagcccttatagaagtcataccccaagtttacttcttttatgttaatctttctctaaaacctcattttgaaaacttctacttaaagatataagaatgtttggtagtttgttttggtattataaacgtagttctaccaagtgaatttgtagcaaccaggaaaagtataagacctttcagtgaggcattttccaatattttggtgagaactacttattcacctagaagactgccaattaggcaattgataactgtgtattgcatttatgcacggcattaaaaaaaagacttgttcctcaactcaataagtagcttgcaattcagcaaaagatttttaaaaatccttatcaccaattaaagctatgatgggtagattataatataaatatagattataagattaatataaattcagtgttacaaagagctctggggaaggctagactaattgtcctcagggaaaatggttggtagagatggtatttgaataaggccttagaaaaagtatagtatttcaacaggaagaggggttagagaagggccttgtacatggaaggagcagctttagcaaaagcacagaggcaagagagtgctggcaatgtaagaaaacttcaagtgctcaggtctggctgaaggaaacagtatatgaggggaagcaaccgaaaaatgatctaaaagggtatgctgtggagagctcttaacgtaagaaagaagaagaggccaggcgyggtggctcacgcctgtaatctcagcactttgggaggccgaggtgggtggatcacgaggtcaggagtttgagaccatcctggctaacatggtgaaaccccgtctctactaaaaatacaaaaaattagccgggcgtggtggcgggcgcctgtagtcccagctactcgggaggctgaggcaggagaatggcgtgaacccgggaggcggagcttgcagtgagcggagatggtgccactgcactccagcctgggggacggaacgagattccgtctcaaaaaaaaaaaaaagaagaagaagaaagaaaaaaaagggaggaaggacatgagagagctggactttggagattggaaaaatgacttttaaaatatacccttccctaatcatttcccacacgttagatttttagagtgagactatttcattagcaagtttatttgcaaattaggtgtagtaacttccaagaaaaacaacctagctgctggaacaaatgtttttctgagctggcaaattattgcctgcagcttaactaatatattcatattgcccacatcttgcgattgtttcattaactctttgctcatcaccaaagcacctttgtaatttaactcattagttacacaatgagtggctacgctagaactggtacttgctcccttatttacccatcctctccttttctgccccaacttatccctgctaaacactcactcgttcttctcctatgaactgtatcaataataataatattcatggctattacttgctgagtgtttactgtagtgccaggcactgtgattaatgctttatgaacagtattaatataatcctgaaaacaacactaagaaataggtattattatgtctattttatgactgaggaaacaagctcagagaagttacattttgtgacagctggtgagtggcaggaaccaggtttaaactagatctgcttgactcagagcccttgccttatgccacgtcattctactgcctctggtatccactgatcgcttactaatatgggtcagtattttcaattaaaaaataataggccgggcgcggtggctcacgcctgtaatcccagcactttgggaggccgaggcgggcggatcacgaggtcaggagatcgagaccatcccggctaaaacggtgaaaccccgtctctactaaaaatacaaaaaattagccgggcgtagtggcgggcgcctgtagtcccagctacttgggaggctgaggcaggagaatggcgtgaacccgggaggcggagcttgcagtgagccgagattgcgccactgcactccagcctgggcgacagagcgagactccgtctcaaaaaaaaaaaaaaaaaaaataataataataataataataataataaaacactctttggggccaggcactgtggctcatgcctgtaatcctagcactttgggaggccgaagcgggcagatcacctgaggtcaggagttcgagaccagcttggccaacatggtgaaactctgtctctaatgaaaatacaaaaaattagctgggcgtggtggctggtgcctgtagtcccaggtactcgggaggctgaaacccgagaatcacttgaacccagaaggtggaggttgcagtgagccgagattgcaccactgcactccagcctggatgacagagtgagactctgtctcaaaacaaacaaacaaacaaaaaacaaaaaacagaaacattctttgggaggccgaggcagcagaatcacttgagcctaggagtttgagactagcctgggcaatagagcgagacccggtctctacaaaaataaaaataaaaacattaggcatgcatggtggcacctggagtcctagccacttgggagactgaggtaggagggtcacttgagcccaggaggtcaaggctgcagtgagccataagcatgccactacactccagcctgggtgacagagtgagacgctgtctcaaaacaaaaattaaacattcattgagtgtctgctactgtaaaatcctgttctaagtgctgtgtcagatatataaaaagacaagagaatgcctatagattattgatgttcataagctcccatatttgagtataaacagctgtgtcatattggtttttaagatgatgtgtccatgatttataaattagagcaactaaggtcggaaggggtaaaaatggctcagtatttttactaagaatgctagatagtgaccacatctactcacagacagaaatcagccaactgtaactaaatgactcacagagaattttaataatacatttcaatcagagtctgtaaaaactctctctgctgatgaaaaatctgtcctgtcagaagttcccaaccaaatctgcttataatccattttcaatgaacctcagcttcctttgaagtagaataagctactaaagcatttcacccacaataagcacactgtgaattcaggccttacaaaattcattactgatgaataatgttacttggttataacacaaatgcgatatcaaactacttctgccatgtagcctgaatgttgtgtaaaattatacgcagctatttcgatgcagcaaaataaaacatgttatctttttaagctatctacttttaatattagctttactaacttctgagtcagtttttgctaaatattttgaagaggctagttacattttacaaataacattaatagttacaaataagtaagaaattgggccagatgtttagcagcccactgtaggctacaaccattcgaactccagggaacatctggaaggagtctcaattttggactcagtctgcctattcttttctctctacaaaggtacagtattcatgtcactaaatgcacaataacacttgccaaaagggtgtagtggcaagtactaactgcatttactctgcaatggaaactcttaatatgatgaattttttaagaaaacaaaagtcaatgaagagaaataaatgtaagagttcaagagtggcaaaagaaagaatgagacatattggttagcaagaagtagcaccaggctacctcatgttaatgacacttactgctcaattcgaggtgacaagtacagcttggggtacacctgggtggcttcagtgtcctcaaaactaacagagaggagggccacatcttctccagggtcttcatttacatccttaaacaagaagtgaaaacacaacatcagcacctgttctcctaacatcttattagtgtcaagctcacagtccactggcattgaagccatgactgtgagttacccttattccactttagcttagctgctttgcacatcctttccacacacctacccactcctctagagggatggattttaaactttctgagcaaagcccaccacagcaaagcgaaagacctccacctatctcacttgttcccacattcaggaggtagggggcgggtagtgaacctggtggtaacaaagaattcagcaaaaatataattaagttgcagtaaacatattactataaacataatttacatcctacaacatcaaaaaacattaaaatatccagtaattttcttacacctaccttgacagtatgttgtaagctatttaaatagcaaaaatttgcaggaaacatatcaccatgaagagtgtcaccatacaagcaaatgacaagggggttaggtacacatctactttggcaaaatgataatggatgattcatatgtgaatcatgagacatacatatcttaaaagtctagttataagaacactataagacaaaacattgttgatccaagtatgtaccaataaacatttgagattaaccaaataacacacaataaactaaactgataatgataaaactaaacttactgtaatttataattaaaaagcaagaatagcaggaactgaatattataaccaactcaagccaacgctgatgatacactgatgaagtgtcctgaatcaaaactgtggaatttacaactatgtgcatgtgctttatgattattgccaagcaccaagtgtctgccagacttctgaataaaatactgaattaaaataaatctcgtggcacacattgattttaatttgtgaataccaaattttaataacccttaatttatttttggttggtagtggctccaagtcaaatataaaaattttaaacacttaattactaaacacttaatatgtgttaaacacttaacatctttcactcatagagactggtaagaacggacctatatttctggatcagttcataggtccttaggaaggttcagcagccacaccagcagcaagagagggaggggtcacacctagactttaagactcattactcggctgggcgcagtggctcatgcctgtaatcccagcactttgggaggctgaggcgggcggatcacgaggtcaggaaatcgagaccatcctggctaacacggtgaaacccggtctctactaaaaatacaaaaaaacaaaattagccgggcgtggtggtgggcacctgtagtcccagctgcttgggacgctgaggcaggagaatggcatgaacccgggaggcggagcttgcagtgagcggagatggcaccactgcactccagcctgggcgacagagcgagactccacctcaaaaaaaaaaaaaaaagactcactactcatgagcttgacattgtatcttcaacctcaaatacaatgtcttttgtctgtcatgccaccccttcttttccttcatcctgggaagctggccatcactcatcctgctcaactccggaaccttcggtctccttgctctgcattctcttgtgtgtataagatggatgagtgtgacatgtatacacagggacaagaaccacaagtctctcccatcctaaaaaagaaacatttttaaaggaaaggaaagaatcttgttgaactctacagagctccttggattccctctcctctcgctcctccccttcacagactgcttggaagagatatctacacactctctattcccttctcttccacttacccttagcccacaacgatagcctactactgaccccacaagttcatgaagaccattcccacyaagggtaaccactaaacacaccaaatrcttctctgcccttttcttacttgatgtctaaacagtatttgacatgggtgaccacttgcctctcgaaactctcttttcttgatggtcttttcytgtctctttggccacttccctttccgttttctttcttttttaaaaaattaaggacttcatgtctaaaataccaaaagcaatggcaacaaaagccaaaattgacaaatgggatctaattaaactaaagagcttctgcacagcaaaagaaactaccatcagagtgaacaggcaacctacaaaatcagagaaaattttcgcaacctactcatctgacaaagggctaatatccagaatctacaatgaactcaaacaaatttacaagaaaaaaacaaccccatcaaaaagtgggcgaaggacatgaacagacacttctcaaaagaagacatttatgcagccaaaaaacacatgaaaaaatgctcaccatcactggccatcagagaaatgcaaatcaaaaccacaatgagataccatctcacaccagttagaatggcatcattaaaaagccaggaaacaacaggcgctggagaggatgtggagaaataggaacacttttacactgttggtgggactgtaaactagttcaaccattgtggaagtcagtgtggcgattcctcagggatctagaactagaaataccatttgacccagccatcccattactgggtatatacccaaaggactataaatcatgctgctataaagacacatgcacacgtatgtttattgcggcactattcacgatagcaaagacttggaaccaacccaaatgtccaacaatgatagactggattaagaaaatgtggcacatatacaccatggaatactatgcagccataaaaaatgatgagttcatktcctttgtagggacatggatgaaactggaaatcatcattctcagtaaactatcgcaaggacaaaaaaccaaacaccgcatgttctcactcataggtgggaactgaacaatgagaacacatggacacaggaaggggaacatcacactctggggactgttgtggggtggggggaggggggagggatagcattaggagatatacgtaatgctaaatgacgagttaatgggtgcagcacaccagcatggcacatgtatacatatgtaactaacctgcacattgtgcacatgtaccctaaaacttaaagtataataataataaaataaaattaaaaaaaaattttagattacaaaatttaggcttgtcttaacaagtcaaaccatacagaaatttataaagtaaaagctcttccacccctctctcacccccacttttcaaggtaaccaatattaactgtgtgtgtaggtagcttcaaactactttctttatgctcataaaaacatatacacatttgcatataaacagctctttaaccttctgttttgttttccctaaaggaatcatatcgctctatcaactgctttttaaatagccacataatattccatggcatggatttattttttattaaaccatttccttagcaacaaacttcaggttgttcacaattcttggccacttgatagtgctgcaataaatattcttttgtgtgtgtatgcttgtctcagtgtatgtacatttgtgtgtgtgcatttgttagtagtggaacttatatttttaaatagagaattaaaactgagcttcttgggtcaaaggttatgaacattttacatttcaaaagaatttgacagattattttctaaaaattttgcaacaggccgggcgcggtggctcacacctgtaatcccagcactttgggaggccgaggtgggtggattacctgaggtcaggagttcaagaccagcctggccaacayggtaaaccccatctctactaaaaatacaaaaattagccaggcgtggtggcacatgcctgtaatcccagctacttgggaggctgaggcaggagaattgcttgaacccgggaggcggagattgcagtgagccgagatggtgccactgcactccagcctggctgacagagtgagactctgtctcaaaaaaaawaataataataaaataaaataaaaataacaaaataaaaaaatatttgcaacaattcacatttggacctgtgagtttgtataagcctgcttcccctcatcctgaatcactggataacactggctgttaccactctttaaaatctggaaaatggtatctccatttagattcaatgaatgaggctgagcaactttttacttatttactggtcatctacatttcttttgtaaatttcctgatcaaatccattatccatcttgctttaaggttcttagtctttgttgtcgttgttcattgagtttcttaatctttttctgtcacatgtgctaaagttattttctctttttgactttttacttcatttgagggctcttctgccatcacagaaaatttagatttttgcagagttaaatccggtcaataactctgagattctataactgcttctctagtttttcatcttatattgttataattttatttgtacattgtagatttgcaatacctctggaatatatttttaggtggcatgatataagaagtatagctttgtttggtcttgttctgtttctaactgggtgaggagggggataagtgggtaagagcaggatcttagcacagtatctggcatatggaaaccactcaatgttagctgaatgaataaattagtgaacaaatggaatgttcctccctaatttttattctctacatctagagatttttcaggaacctactttacaaatttttttgtcaccaataatgtctagaaactaaatgctggctccctgctcctggccttgttaatacaccaagtcctccagaactagtgactttaaaaggagagcccaggtcaggagtctgagcttactgatcacttcttgctcttttatagatgatagagtattcaaccttgaactttcttttctgtaaaatgagaatgaaaattgtaaaaaacactcagggtctgcaacgaacagaaactactcaattgtataatatgactttaacactcgtcaaacatctaaaactaaggttaaagctgagcttgaagacattcataggaacaaattcattttatgatctaagtgtagaagtagccctatgtgagttagattggtcaaaaagacaattaaaaaagaaataacatttactttcagaaacctttccccaatgactaagttttcttatgtaaggtcaaggctagaggctatgattacaaatcacataaccttgcaaaaacacactgcaaagaaccaggggccaccaaaatcctttataattgggggctttattccatatgcctatgggtaatttataattacttccctttctgacttttaaactttcaatttcactactatttcaataaagagcggaaatgcttagagacaatcctccaaacaaacggaatgactctagtttatataatcaacatttatcatctggcatcctgaaaaaagtacataaaacatgagtctgaatatgaaactagttttttccaggagttcgttttatatgtgttattcctgttggtgtggcacatgagatttccccgaaatggtatttgattcctaatggatatctaagtttgaatttgagtgcttaaacaagcccatagaattccaaaaatacaaatccacacagtgctgtttctagtttctgcaactctaacaagcatgtacatgtgttccctcccatctgggaaattagaaaagaagctcttgtaccatggttctgagaagctaacattacagatgattactgtaaccactaatggcagcatttggaaaacaggggatggttacagcatagtaggggacatttaaaaacgtayaagtatacattttcagggctctgtatctgcaccatttgaaactgcaaaaggctaaaatgggaggaaagataccgaatctgataaagctaaagaagactattgtcccccacctttataaaagtctgccaggcactgacacacgtacggtaaagcaataacggccatgatattctggtgagatgtaacagtggatctggctcagcccttgattaaaggagttcctatagtgtataatgaatattcactataggtgagttcctggcaggctgggagattttcgtgttcatttttgcacccccagtgtctggaacatagtacatacagagcaactgatggaaaaaatggaattaatgcagagataactaaaagaatgagtaaatgaatgaaataagccactgaactagcttttctaaacagagaaatatttgggtttcaggactgacagtataaatgatggaattaagtggaaaatgctttcaatagggaagattctcagtatttatctccttaattccttaagtctatgcttaagattttatttaaaaaaaamctcaagtctgaactatgtatcgccaaggatacacctattaataagagaaaatacttctggttagatcataatggttcatttacataactattctcaattgaggctctttgcaaatatcaaaagggtgtagaaaacaacaacaattagccttggaaatgaaagtaaaccaagtacaatttatcattatgctctactcctttgatatgctaattatcccaagtaaagatagcagtcattaacaagtccctatatgttgagaacattagtgtcaatataggtacaaactaccaattaactaattgctgaaagacattagctgaacaagaaatactgcaaatcacaggtcacgtaacaggacggtaaaaaagccattgtatttctcaattcaaaaaggcttacaataaagttataactgttactagcaaaaccactcagtgggtatatatggctatacaggcgctattacatagtatgtcgaaaatcaagtaagtgcttctgtgtttgtttgtttgctggccttaaacwcctgggctcaagtgatcctcctgcctcagcctcccaagtagctgagactacaagcatgaagtacacccacctaagtaagcaccattttaaaatggtattaagctagactcagaattaagtgtaattcctcgagtaaccaaaaactaggtctaggtaagtacttcatcatacaaaagttatgagttttgttgcctaccctgtcacccaggctggagtgcagtggtgcaatctcggctcactgcaagctccacctcccaggttcatgccattctcctgcctcagcctcccgagtagctgggactacaggtgcccgccaccatggccagctaattttttttgtatatttagtagggacggggtttcatcatgttagccaggatggtctcaatctcctgacctcatgatccacccacctcggcctcccaaagtgctgggattacaggcgtgagtcactgcgcctgaccaagttatgagtttttgacaaactatatgcaaatttgcaaaacagaatcctattttaaaatatacaaagtgaggttagtattttagaggctccaatatccatcaaattatataaatttagatttttttaatcaagttttttcaagtgggagagaataagactctcttagggtactaccattcatttaagcatttaacaaaataaataaaatatatagtatgttacaaatgttatagagaaaaattaaagcagagaaagaagataaggaatgaggaggaaatgaaagtttaaaagggtgctcaaagttggctttatggagaatcagcagtggcctttcattacttcacagagattgaagataaaaagtgctcttgacttgctatgttatatattagcatatacagccccaatcaaaatttgaatttgggttctactggcataaagacatcacaatgtgttatggtaggaatatggtaggaatgaaataaaatctaagcagaagagatagtcaagaayaaggaaagtgacataagtaacaccttggtctcactgctaagaggtctgtctcataatgacactggtcatttcagtaattaggttatttcctcttcataaacatactgggaaatgtacaagagccagggaaagcagtatagtcagaaagcaaaacaaatccaaaagtaagggaatgaagttgagccaaacagatgaggaagggcaataaacgggtcccctgtggctaaacccggggctttactccatgaaggaggatgttgcagcactggattgggggttccaaaagcctagttacagcctatctccaacatatactgagttcttggttaaaaattatcttgatattttgatatcccttatgaaggcagcatttagtagttacttctgatttggttcctccaaacggaaatgggagtaaaaatattctccccacctagtccagacaaaatgggccactctttatacattagcagaacttgactaacatctttgcatttgccattccccttcttaaaaagttctttctctccttcttttcttaattggtgtggctttaagtttaactctttttgtaaattcacttgctccattaagattcctttcaattacaatgtgatctatgtcctccctcggtagttttccccatgttgcttcatgaattccccatgctgtttcagcaatatatattttatattccaaatagattgtgaatttcttgagggcagggtagagatctccttcttcctactaggcccagtaatatcagctaacatttattccgtgtttactcaatagtcactagcttccagctgtatatgcattatctctaatcttcgtaacaactgtgtaaggtaggaactaattattctcacttgcagatgaagaaactgaggctcagagagattaaatggtgaagacgagttttgaacccatgtatgctgactcagaccctagcctcttaatcatgatactatatcctctaggatgctattgggcacaaagaagagactcagcaccagtgctcaaagaaatgtacaaaaaacttggaaactcacatgcaggaaagatttactgtatatttacttgttctacatttagtttctaaatactgtatggcccaaagatcatgagcaacttaaggaaccatttcttcttcccttattatccaagaataaatgatattgtctgcgccaggcacacagtagatattcaaaataggttaaaagtatatgctttatgtgttttaatgtctacttttagaaagtacagggcaagaaattaaaattaacaaatgtgtaaagactaaaggctatagaagtcactgtgccaaattaaatgtattcacctgacatctttacatggactcagttaattaaggaaggagaatggcttctctgaggacatcaatgaggaccatggcattctaaggtggtaatatcaaccttcctgtaataatgtacagttagggccattctatgattaactaactatattcagtgaaaataagaagcactgattgtcaggtcaggaaaggataactgcaatgttcttgaaatagctacttcctacagggtgagcccaggacaccaggacagagctgctgccacctgcccatgtcttccaaaagcgacattttgagctcattactactagatgtcacaatacagaatagggtaagtttttttttaattctatcttgcttattattttcataaacaaagatgatttgactgctcttatttatgcaggaatatgtttgtgaagctgtacttatccttaatatattggttatagctactgtttataaaactaaattgaaacacatgtcatacaaacaaactttagggaggaaaatcctggctctttgaaaataatgatgatcaagattttgttggccaaatactgtccaatcagttattatacccaacagacacagccttgagaatcaccagcttttgaatagtcacacattaatctaaaaggtgtgtgaaatggagcccctactctggaggccagagaggttgggtgaggggaatcctttgtagtatagccagggtcctcactggaagcaaatgatgcttcctggcttctgccaacttctctactcataaaagtttttagagaaagaatcyggagtgtggagtttcccctactgccctaagtgtgctcttaatacatttgataagcttcctctgggcttacttaaagtatcaatttttgccaagacaatcctaagcaaaaagaacaaagctggaggcatcacgctacgtgactccaacctatactacaaggctacagtaaccaaaacagcatagtactggtaccaaaacagacatacagaccaatggagcagaatagacacctcagaaataacaccacacatctacaaccatctgatcttcgacaaacctgacaaaaacatgtaatggggaaaggatctcctattcagtatgttgctgggaaaacaggctagccatatgcacaaaactgaaactggaccccttccttacaccttatacaaaaattaactcaagatggattaacaacttaaatgtaaaacccaaaaccataaaaaccctagaagaaaacctagacaataccattcaggacatatgggcaaaagcttcatgacaaaaatgccaaaagcaattgcaacaaaagccaaaattgaaaattgacaaatgggatttaattaaactaaagagcttctacacagcaaaagaaagtatcgttggagtgaacaggcaacctacagaatgggagaaaatttttgaaatctacctatctgacaaagggctaatatccagartttacaaggaacttaaacatatttacaagaaaaaaaacaaacaaccctatcaaaaagtgggcaaaggatatgaacagacacttctcaaaagaaggcatttrtttggccaacaaacatatgaaaaagagctcaacatcactggtcatcagagaaatgcaaatcaaaaccacagtgagataccatctcatgccagtcagaatggcaattattaagaagtcaggaaacaacagatgctggcgaggttgtggagaaacaggaacgctttacactgttgatgggaatgtaaattagttcaaccattgtgggagacagcatggcaattcctcaaggatctggaaccagagataccatttgacccagcaatcccattactgggtatatacccaaaggaatataaatcattctactataaagacacatgcatacataggtttactgcagcactatttacaatttttgcaactgttttacgaatcatattgaactacatctttgagtttctctgagttgtgatgttatgcattcctgctgataaaaaccttgtgccagactttaatccaagagcccaacaagtttaaacaatagtgagtttttatttaagcacatatgaaacagacatgaataccayttaccacatccttaatacgtctccataacttaaagaaaaggtagaagatgtattcacttaaatcgtttaggtggctcttttaatggataggaagatttaaagttgcagttgatatagtggacatatgtgatattgcttgcctgataccctctcctctctcaggaagcttctctctcttctagaccccacccccaggccccaatccgtaaagcccctcaaagagcttcctgtcctaatacctgggaacagctgatgggtctaggaaaaggctggtcctttcttcaagatttgtgactaaatgtaggccagtctctgcagatgcagaagaaatggtgagctgccatatttcccatatatagaagagaccaggctgtggtgggagagaataaagccaacctgctgggagaagtgcaggcaagagaggagagagtccaggcagcatccacacccttagttcctgtgggtcttggtgcagctgtgtccctgctcttactgtggtttgactattcaatctgctcctagctttggaaagctaataaattgcactatatgcctaagctggtttgaagtggttttccttcacttataaccaacattttctctggtaaattattaaacgaacacagatgacaccacggtaaatcaaactctacagaattaagtgctaaaaagggctttcatctctgggttatttgaatacttactacacagtgtggaatgctgggccttcatcagaacctcaaagggctctgaggacacagataagctgcatgcctccttacctgccagaggaaagctttgctagagcaatctgcctgcagtaccaggctctggctatagctaggctagttctctggacttgctgcctctcatcttggtggacttaaaacagcacagtaacacatcctgggccttagaacaccttgcactcactgctcctcttcaatcaatgaaggaaaaggtatcagaggtgccaatgctaaaggcagaaaatccataggagtatgccatttgaatacatgaaatgttttgccagtttatcatgcaacaactacacgaatatgatgatcttctagctatagacaaaatttttgtcaaagagatcacatgctttcattttttttccatatgacatgctaaatgtgggtatttggagaagcaaaaaggtttacacagcttttgcaaatgtacgtggaagtgcccagcaagatccaggcatgaggaaggtgctcaataagttagtttcacttgccttatttctttcagactcttggtctgatatccttttcaaaaccatgctattcttcctgctattaaagctacaccctgtcctctcctctccaggttgctgtgaattctggagtttagcgattcttcccaggtggctctgtgagtgaagacagaagggaaagccaccctagaagctaataacacctttgttcctacccacccagccagcaggtcacttggctcagactgtctgtgcccatggcaactaagcaattggttatttccaagttatttcagatacctggcagcacatgctcattaactggagaccatcacaaaccacaagcgttagagaatggagcccactagagagtctccccttgacgtgatcagaggtcttttgatttgcatattgttatctgtagaacctaaagggcagcttagagttgaaaaagagaggcctggagccatatccctctggaactgtctatgggaaggccctgtacagaaaatgagctctgagaaccagtgtaaataccatatatttctcccagcctcaaaagccctcctccatctacattagcctgacatttaagctcctccaaggtgtcttcccaatttctttttttttttttgagacggagtttcgctctcgttgcccaggctggagtgcaatggtgtgatcttggctcactgcaacctccgcctcccaggttcaagcgattctcctgcctcagcctcccgagtagctgggtttacaggcatacaccaccatgcccagctaatttttgtatttttagtagagaggtggtttcttcgtgttggtcaggctggtctcgaactcccgacctcaggtgatccacccacctcggcatcccaaagtgctgggattacaggcatgagccaccatgcccggcctcccaatttcatttttctaccaccctgctgatacatcctaactactgcaggttcccacactccatgtcatcactccatcaggtctctgctctgccactcaatcctggacgccttctccccggtctacatcccccaaccccaaatctccaaattggacctactcttttttttatttatctatttatttatttttatttatttattttttgagacgattcttgctctgtccaccaggctggagtgcagtggcacgatcttggctcactgcaagctctgcctcccaggttcatgccattctcctgcctccgcctcccgagtagctgggactacaggcgcccgccaccacgcctggataattttttgtatttttagtagagacagggtttcatcgtgttagccaggatggtctcgatctcctgacctcgtgatccgcccgccttggcctcccaaagtgcagggattatagtgaacctactcttttaagttcaatttagaagtcatatcctctcatgagacttcctttatcctaccagctcatgtaatggtctctcctctaaaatcctacaggtttttaggttcacccaaatatgatagtatttgattggtttgtgtgtgtgtgtgtgtgtgtgtgtgtgtgtgtgtgtgtgtgttttaaagttatttacatatgtgttatcatttatctgattgggttccttaagagcaatgactgtttcattcatttttgtatacaaaatgaattaatatattcattttgtatttgtttcatattttgtatttggtgtccagtatggtgcttaccacaaaaacaggcacccaataaatatctgaaaaacaaatgtatgaatgtgtatatgaatgactacatatatttgccagtaaattactgtttcaaaactgggtttcaaaagcagacttccttagtagacacaacagaaatctattgaaattattaacttgactttccaatgtaaatcagttggtataagtttgggcagaataggccatttctccccaggtttagatcatgccttggaataggaggaaaatttggatctgtacacttaactgaatgatcaaaccctagagtgcagaaaaacaagagcaatctttttgccatgtctaaccataatcggatctcctaaaactagagccaataaacttctaaacaacacattatatggtgttcactgagtcaacactcatgatttgccaaccacgtgtaaggcattgtgacaagcataataaagaaaaacagaaggattgtaagaatcagtcccactcctcaaagaggtcaatataaacacatgaaaatgagagaagtttcttccttcttcttcaataggagatcctacaaggtaatacgtgattaattatcaagagccctatgaggaaaggatgaagaactcctcagttgtttctatataccgagaatgaattcgttagactcttttctgacattatgcttttaaaagaaaagagataaagaaagcaagagagtatgctgagactttgctagagtcgcttatcagcttaaggagttttggggctgagacgatgggttttctaaatatccaatcatgtcatctgcaaacagaggtaatttgacttcctctcttcctgtttgaatactctttatttctttctcttgcctgattgccctggccagaacttccaatattatgttgaacagaagtggtgagagagtacatccttgtcttgtgctagttttcaaagggaatgctgccagcttttgcccattcagtgtgatattggctttgtgtttatcataaatagctcttattattttgagatacattccatcaatatccagtttattgcatgcaaaaatcacaagcattcctatacacaccaatcataagcaaacagggagccaaatcatgagtgtactcccattcacaactgctacaaagagaataaaatacctaggaatacaacttacaagggatgtgaaggatctcttcaagaactacaaaccattgctcaagaaaataagagaggacacaaacaaatggaaaaacattccatgctcatagataggaagaatcaatatcgtaaaaatggccctactgcccaaagtaattcatagattcaatgctattcccatcaagctacaattgactttcttcacagaattagaaaaaactaccttaaatttcatatggaaccaaaaaagagcccatagagccaagacaattctaagcaaaaagaacagagctggaggcatcacgctacctgacttcaaactacactaccaggctacagcaaccaaaacagcatggtactggtaccaaaatagatatacagaccaatggaacagaacagagacctcagaaataacaccacacatctacaatcatctgatctttgacaaacctgacaaaaacaagcaatggggaaaagattccctattgcatagcgttgggaaaactggytatccttatgcagaaaactgaaattgaacccttccttacaccttatacaaaaatcaactcaagatggattaaagatttaatccatcaggacacaggcatgggcaaagacttcatgactaaaacgccaaaagcaatggcaacaaaagacaaatttgacaaatgggatctaattaaactaaagagcttctgcacagcaaaagaaactatcatcagagtgaacaggcaacctacagaatgggagaaaatttttgcaatctatccatctgacaaagagctaatatccagaatctacaaggaactcaaacaaatttacaagaaaataacaaacaaccccatcaaaaagtgggcaaaggatatgaacagacacttttcaaaagaagacatttatgtggccaacaaacatgaaaaaagctcatcatcaccggtcattagagaaatgcaaatcaaagccacaatgagataccatctcatgccagttagaatggcaatcattaaaaagtcaggaaacaacagatgctggcaaggatgtggagaaatacgaacacttttacactgttgagagtgtaaattagttcaaccattgtggaagacagtgtggcgattcctcaaggatctagaactagaaataccatttgacccagcaatcccattactgggtatatacccaaaggattataaatcattttactataaagacacatgcacacatatgtttattgcagcactattcacaatagcaaagacttggagccaacccaaatgcccatcaatgatagcctggaaaaagaaaatatggcatatatacatcatagaatactatccagtcataaaaaaggatgagttcatgtcctttgcagggacatggatgatgctggaaaccaccattctcagcaaactaacacaagaacagaaaaccaaacaccgcatgttctcactcataagtgggagttgaagaatgagaacacatggacacaagaaggggaacatcacacaccagggcctgtcagggggtagggggctaggggagggatagcattaggagaaatacctaatgtagatgacaggttggtgggtacagcaaaccagcatggcacatgtatacctatgtaacaaacctgcacattctgcacatgaatcccagaacttaaaggaaggaaggaaggaaggaaggaaggaaggaaggaaggaaggaaggaagggagggagggagggagggagggagggaggtaaagaaagaaagaaagaaagaaagaaagaaagaaagaaagaaagaaaggtctatcgcaggttaaagaaagaaagaaagaaagaaagaaagagttatgggtatctcaagaaaaagtatgaacatcttctagaagtggtaaaaggtgaggaaagaggctctggctttcccagactgcataatgctaaatagtaagctatggatgtttttcagtggacatcattctacctcttccggttttcagaacatctagctcaaaatgtgtagagacaggaggaccagtatcagcacccaaatgagggtgtagcatgaacttgtgaacagtaggcagctgaagcctggatgagcggatgacttcatttagagccttgctacccaaagcaacagcatcagctacacctgggggatattttaacaaattcctaggttatttgtatgtgcactgaagtttaagaagcactggcttagaggactgacaattaagaaaaagaaaacgggtccaaagatgaaaaaaagaactgaaaagcaacacactgaagtattatcctatgattaaacaggagaacacagatgaactatgatgtttcactggtctaggagagtggaagatattttacacaaagtttaggatttaagaataagtatacaagtgataaaaaagtagacaaattgtacttcatgaaaattttaaaactatttgcataaaaagacaaataccaataaggcaaactatgaaatgggagaaaatattgtcaaattatatatctgataagggattaatatccagaatatacagagaattactaaactcagtaacaaaaaaaccaaacaacctcaattcaaaaacgggcaaagaacttgaatagacatttctccaaagaagatatagaaacagccggctgggtgtgatggctcatacctgtaatcccagaattttgggaggccaaggtgggtggattgcaaggtcaggggttcgagaccagcctggccaaaatggtgaaaccccatctctactaaaaaaaaaatacaaaaaaaaaaaaaaatagccaggcgtggtggtgcaggcctgtaatcccagatacttgggaggctgaggcaggagaactgcttgaacccaggaggcggaggttgcagtgagccgagattgccccactgcactccagcctgggtgacaaagcgagattccatctcaaaaaaaaaaaaaaaagaaacagccaataagcatatgaaaagatgttcaacataaatcaaaactacaataagatatcacctcaaatccattaggatggctactatccaaaataatagcaagtgttggcgagaatgtcaagaaactggagcacttgtgcactgttgggggtagtgtaaaatgggatcgctgctatggaaaacagtacggcagtttctcaaaaagttaaaaacggaatcaccatactatccagcaataccacttctgaatagatactccaaaataactgaaaacaggatcctaaagagctatctgcacacctgtgtttttttattttattttattttatttatttatttttttttgagatggagtctcgctctgtcacccaggctggagtgcaatggcgcaatctcggctcactgcaacctccacttcccgggttcaagtgattctcctgcctcagcctctcgagtagctgggattacaggcacctgccaccatgcctggctaatttttgcatttttagtagagatggggtttcgccttgttggccaggctagtctcgaactcctgacctcaggtaatctgcccaccttggcctcccaaagtgctgggattacaggcatctgccaccacacccagccacacctgtgtttataatagcattattcacattagctaaaaagtagaagcaacccaagtgtccatcaacagatgaatggaaaagcaaaacatggtatatatgtacacatatatggaatattatccagccttacaaaaaaagaaaattctgacatcctacaacgtggatgaacctcgaggacattatactaactaaattagccagtcacaaaaaagacaaacagtactgcacaattccacttatctgaagtttgagagtagtcaaaatcgcagtgacagaaagtggaatggtggtttccagggggatgatttctttaacaggtttagagttttagttttataaaatgagaaagtgagaaagttacagaaacggatgtcatgatggtcgcacaacattattatcaatgtacctaatatcactgaactgtaactaaaaaatggttaagatggtttttatgttatatatattttaccacaataaaaaaaataaagaaaagagaataagcacctatggcatattccaaaaacttggataaaagggaggaagaatcatagtagaaactgaaaagtacaacaaggtacttctcaaatacttttcatactggtcacgtccatataccccggatgagccagagaaaggcgtcaggtggagagagctggcatgggcgagactatcccctttgggtcagtgatatcagtgaagctgtgccattggtataatggtataaccagggatcaggagtaaagaaaatcagaaaatgttaaaggtaaaaaggaccttagacatctgattcagcggttgacagcctatgttgtgagaagtagggatcaaatgtaccttaagagtatgtgtcttggcagggtgcggtggctcacacctgtaatcccagcactttgggaggccaaggtgggcagatcacgaggtcaagagatcaagaccatcctggctaacaaggtgaaaccctgtctctactaaaaatacaaaaaattagccgggcatggtggcgggcgcctgtagtcccagctacttgggaagctgaggcaggagaatggcatgaacccgggaggtggagcttgcggtgagccaagatcacatcactgcactccagcctgggcgacagagtgagactctgtctcaaaaaaaaaaaaaaaaaaaaaagagtatgtgtctttagagcagcaaaggggaaaccaaatggtccctgtgtaagcccttggtccccatgtcagcccttcctcccctggtcagctgtagtggctactattctgttttatataatcattgcaggagaaagattcatttgtaaaaatatttctagtatattaaaaagtaaagtttgtaactcttgatttcaacaccaaaatttcacaaatttacgaagggagaaactgagataacttccagaactgagataacggaagttatctgtccaatatgtagagctaattagatacagagatgaaaccaaaacccatgactgctgattcctgcatcaatgtttttttttcacgacatcattctgctatatccaaatttgctttgaaaattctttgtcacttactaaatgaggtctgtgtgaataaaaaaggaaatgcaagatcccaaagaggaagagagatcaaaagtgtctctacactgagttatgaagaatagaaatattcataaaaggaagaacatattatattaatagctccctaaatgaaaaactataaatgttggacttagcataactattgagtaggtggctttgttagaactttactaattatagaagtgctgatgaacagatttagaagaaccataaattcagtcagactttatcactggcttgggttagtaagaatatttctttaatttctaaactaataacaggtttaagatagaccaattgatgaacatttatagtttcgtgcttatgaacagaaattgtgacatttcacgatgcataaatgatgatgaaagtattgaagcatcctagcaagttgcaattctccagggaagctattaacagcttaacatttctagttcacattggaatgattcaacttgaatgagacaagttctcaaaaaattttatactaaataggcaagaaagaatgcaattaagatagcagactaggttgggcctttaagctaggtttcttgggtctactgctaaatcaaatgttgccatatatatatatgtgaaaacctgtaaaacagtacaaagcaggcttcacaaactatgttaaaaaataaacaaacataaaaacaaacaaaactatgtttaaaaaaaaaacggaacagcaaaataatcctcctaatgctccaataaaataaactggactttcccctcagataaaccaaggctggacccactactgcctatgcagcatgggcaatggatgttgctgattctttttcttttctcctgtcttcaattccattttcctgctatactgagtataagtttggggccagcctcaggattcattaatacagaattcattcaacaaacatgtattaatgccccactatgtgttgggcaacacctaaaggcactaaggatctacgccctcaaaatcttcacagtctagtgggaaaaataaacaactaaactattcattaggctgaaattgttacaataaaggcatatgataagagagatgtgcacctgcagccggacaaaggaaggatgcaagagagggcacgactgggcatcacatgaggcttttcaaggaagaggtaatggtcctagttggaaggaatccaaatgatccaagggagtaaaaaggataagggggtggatggaagagatgacagcacacggaaagtcactgaagtagaagggcacatggtacattcaagggactgttcaggaaggatgaaatactggatactggtgagaagggtgaaagacaaagctgaacacatttaagggccagagcgtaaacagccttaatgcattttagttaaggaacttgttttattttaagggcaatgtggaaagggattacaaagtgagtaatgacataatcagactgttttacagtattctacgagctttggaaggctggattcaagaaggacaagggttgaatgcatggtggaagagggagctctagagtggtccagaggagaggaagaaagatgttcacatagagaagcaacttggtgcagggtgtcagagcccaggcagagtgaagggagtgcacacccaagggagggggcaggagcaacagtagcaagttggttacataaagggggatggatataatatatatgtgtgtaacctatatattatgttacagtaatatattaaggataatgtgaactagatttatcactttcagagaaggaagttacaaatatgcataaagagaaaaacagaatgaacccagtgtgttgaattggaattggaggtatcagtatgaaaatggttgtttaacatatttgggtagatatacagaagtaatattgagcatcaaaataatgacagtaactgactataatccattaaatgaactagaaattaatgagtccatgctaaataaattgaaagcttgataaaaaataggatatttgggtggtttcaaaggaccttcccaaaataccaatgacaaagggggaaaaagtaactttacagtggaaaccccaacagacactgcctttaaagtgatcagtgtgaacacatcaacagtaatgagtcaaacagatatcctctgccacttgagagaaggcatgaaaatatataacatcacctctgtgatattcctgccacagatgcataaatggatctaatcatgagtgaacatcagacaaatccaaattgagagaaattatataacataactggcctataatcttcaaaaatgttgtaaatgtcaaggacaaactgaggaactattacacactagtgaaacaactaaaatcacacatgattctaaactgaattctgaaccaggcatggtaggtcatgccaggggaggctgaggtgggaggagcgcttgagctcaggagttcaagaccagcctgggctacagcaacacctcatctcttacaaaaaataacaatgatgataaatgatttaaaactaaactgaattcttctgctacaaagaaatcattgggacaatataagtgaaatttgaatgggatcttagaattggatggtagtagtatgccatgttaatttcctgattttttttttaccatattgcaattattaatatgtaagagaatgcctttatttctaagaaatacatactaaagtatttggaggtgaaggccatcacaccagcaacttagtctcaaatggttttttaaaagtgcttttattgttcttacatttctattataaatttgagatcgtttgaaattttcttttaaaggaaagaattaaaagaggaccaaaaaaaaaaaaagacaggagctggaattttaaattagaaacccattgcacatgctttcaagttttatggtacatatttatactaagttgcatgataaattatgtataattcccccaaatataactatttttcccaaattaaagaatctcaccatgcttggtcaaagaagtctacctggaataatctccactggatcctggagtcaagatttgaggcccaaagtagtcaaacctaagtcagcaatgcttcttactgaaattgcttaataaggcttatttctgtctgggtgctatgcatcgtaccttaacatacatcgccaacaacgcttgaagataaatactgttattatttctattttgaagatttgaacttttctcaaggagattaagcaaaatgttcaggatcttcctctagtaaacagagcactagaaaaaaaacttaagtttttcaactcatggcctgtgcttttcccactgcaatccagtagctccctaggtccatggcaccacgctcttcattgtgggagagacaaagatgaatgaggcaagttctcagagaagtatttctgccttctcttcttcataccacagtcagtatcttctgcctcttccctcttactaggactctctcacatactagttttcatcagtgggtaagtccagggacattatttaatctacctttttcctcattgaagagatgctaaagcaatacttttttttttgacatcacaaactgaatttactttattattattatgttttattatactttaagttctagggtacatgcgcacaatgtgcaggtttgttacatatgtatacatgtgccatgttggtgtgctgcacccattaactcgtcatttacattaggtatatcccctaatgctatccctcccccatccccccaccccacaacaggccccgatgtgtgatgttccccttcctgtgtccaagtgttctcattgttcaattcccacctatgagtgasaacatgcagtgtttggttttttgtccttgtgatagtttgctgagaaggacggtttccagcttcatccatgtccctacaaaggacatgaactcatcattttttatggctgcacagtattccatggtgtataagtgccaaattttcttaatccagtctatcattgatggacatttgggttggttccaagtctttgctattgtgaatagtgccacaataaacatacgtgtgcatgtgtctttatagcagcatgatttataatcctttgggtatatacccagtaatgggatggctgggtcaaatggtatttctagttctagatccctaaggaatcgccacactgtcttccacaatggttgaactagtttacagtcccaccaacagtgtaaaagtgttcctatttctccacatcctctccagcacctgttgtttcctgactttttaatgatcaccattctaactggcgtgagatggtatctcattgtggttttgatttacatttctctgatggccagtgatggtgagcattttttcatgtgttttttggctgcataaatgtcttcttttgagaagtgtctgttcatatccttcgcccactttttgatggggttgtttgkttttttcttgtaaatttgagttctttgtagattctggatattagccctttgtcaaaagagtagattgcaaaaattttctcccattctgtaggttgcctgttcactctgatggtagtttcttttgctgtgcagaagctcttcagtttaattagatcccatttgtcaattttggcttttgttgccattgcttttggtgttttagtcatgaagtccttgcccatgcctatgtcctgaatggtattgcctaggttttcttccagggtttttatggttttaggtctaacatttaagtctttaatccatcttgaattaattagcaattctaaagatttacaaatgtgcctcagaatataagggttaaaaaaatgagtttattgagtttatgataaccacttagctaaaactggaaagaaaaaatgacataggaggagtataaagataaacagtacgatctgtgaataatttgatgttggataagaaaagccaaaggccaacctaggaactattaggagttctggacaactaaactgctgactcccaaatttctaatgtctcacttggtagaagagatcacctaagaagctctcataaagagcagaaatgggactgttgctctctggagaaacaatgggaccttttcatctctgtgaggagtacactattcttcccacttcagtgatggttgaaaagaaactgactcctcgataaaaacagagtggggataataagacaccactttatgccaggtgcagtggctcacgcctgtcatcccaacactttgggaggctgagatgggaggatggattgaaccctggagttcgaggccagcctgggcaacatggcaaaaccccatctccacaaaaaatacaaaaattagccgagcatggtggcatgtgtctatagtgtcagctactaggctaagatggcaggatcaattgaacccaggagattgtggctctagtgatatgtgatcacaccactgtactccagcctgagccaggatcaagaacctgtctaaaaaacaaaacaaaacaaaacaaaacaaaaatactaagtaaataatgaattctctcaactcagctcacaatacaaagtaggacacgttgaatatcactttcataattctgcttcatccatctggaacactggctataaggccttactagaactttgagaagcttactgagtaaatttttttttttttttactcaataagttcaagtattgagtaaattttcccaaaaaacaaatactctaaaatgaaagatatcacatcaggaccatataattactttcagcattttatgaaaaggataaaggaaaccctcctcataaaacaaaacaaaaaactataggccgtttatagattactcaaactgacataattcagtttgtaaaatcattattttattacatgattcctatataaaatcattattttaacataggaacttataagaaaactcaatgcagttatgtttcttgtggttagtactgtgtcagagagggcagtggctttggtttacctccaatggtctctctcaaaaacaccaactgactgagtctattcctggaattgctctaacctcccctagtattttgtctgttcgcacattgtaatgcacaaggaacagtggtaacatgtgaaataagttcaaagaccccaaagtggaagacactgttttcctgcatcctacctactgtaactgaaaactgggaatttactggaattgagaatttattatgagtcagatggctgatagcctttccaaccaaaacatctgctctacaaaggcacaactgctccaatccatttcctcttggatctggagaatgaccaagttgtagcttagccctttccttaaagacacaggggcttgaaatgaaaatgaaataaaagtggatctctatgtcaccttccaaattctactactcttaaatggtattaaaatgtaacaaaatatgagaataagtatgttttagacattaaaaaaattgcagtcggttcagtggartaaccaaggatttttatcagatcattcaaatttacaacggcacagctgaaaccaattctttctctggtattgagggaaaaagggacatgtattacccaagcacagtgaaaaagcgtttcattattcatttatttattcaaaaaatattcactgtgcacttctacgtgtcaggcactattctaggaacaactggtgaacaagctagataatggccctcctcttagagcctacctttcagcaggggatgacgaataaacaagtcagccaattcataaatagccttcaaaacactataggagttatcttgtttccaatggtttatttacaacaattgataccaagatttttttctagcaactacagagagctactgcagtggttcaagttctagcatttgttaaaaaacacacattcctgaaccctgccctggggattatgattcagtaagtgtgggtaagtcaaggaaatatgattttttaacttacaaggggattgaactgcccatccaggtttggggtctattgccttagagcaataaaaaaatgtgtgagcttcctatcaatatgtttatatgtatttatttataagctatatagatgaacctatgtactaatacattatgaacatcataaaacatgcacaaacagtagaaattctaagagggtgagataaaaatcaacacaactgtatggcttactatatggggcatgttaggaggtctgcaggttccccacatggactggggataggacaaccacaggtgaggccctgtaattcacagcttggaaagacagactctatctcagccctcactctgctccataacttacatgggtgcagagaactaggcagaggagcattaaaattatcatcatctcagtgacaagaatttgggaggccctgtgtctcacttcacatgccaacatatacctgcccattcttgttaacacacaccaaatatggtaaaaccagatctaaaaaaagacaaactctgtcataggttcggcagccataaccctgttgtgtcagctgtttgaatcatgtgtgaatgagtccatgcatgctagataycaggcaatatggtagagtagaaagatcacagactttggagttagacagactagtgagaatcatagcttcatcgcttactggctatgtcaacctggctggataagttatttaaaacctggatgagtctatttcctcaactataaaatgagaagttataaaactgctgtatcagtaatagtagccaccattattggcactgttatcccagatcatcttgggactatctgacccacctgttccctgctatctgtggacactgggctttgcctgcttccctggaaatgatacctatctgttgccttctctgtatgtaaactctgttgtcaaatccttgcctgtctgtacaaaaccaatttcttcctcctgaccatgatgaatgagtacctccacaacagctgcccccttagaacctactcgctcctggccaggcccacatacatgcccttgactttgaattcagtgttacgcctcatggaccaacagcccacacttgccccttcatttggcatcgagctttctagtcgttatgcttctgcaggcacaaaatctcaacaagtagcaacttctctcttctagtcatggtctcctttccagtgtctcttgtttgtgcttcctgatattattatttgaatagttacatgtactgaaatcatttattgagtttggagattagaaggcgatacacaaaagaatctgctcacaacggcaggaacgggcatacacatatacacaaaagcatagtttttcaactaggtgacttttaaaagtcaggcagccatcttttttttttttttttttttggagacagagtctctcrctctgtcacccaggctggagtgcagtggcacggtctcgtctcactgcaacctccacctcccaggttcaagcgattctcctgcttcagcctcccaaggagctgggattacaggcacgcgccaccacacccggttaattttttatgtttttgatagagatggggttttaccatgttggccaggctggtctcgaactcctgacctcaagtgattggcatccccacccgcccccagcctcccaaagtgctgggactacaggtgtgagccactgtgcctggccaaggcagccatcttaagaaaactcaggcctcttaaagaaaaaatcaaaacaattaaaaatctatctaaaataatttagaaaaagagaaaataatcaatatcaaaccaaaattagaaaagacaaaaaacaaaatgaagagcaaaagtaaaaataagctaagtacatgcagcaacacaaaagacagaaaaattcacattaaatcaagactatacgttagaaatttttttttaattagggcattataaatcctgattatatgctagtaaatttggtagttaaatgtaaatagataaaaattcaagaccacaagaggataaaagagaggtatcgggaaatagcaaacctgaatggacaacttacaacaacagagtgaaatgttattaggattactgttttcaaagatgcctatagccaatgagtttgttggagaatgttttggaactttccaaaaataggtaagaatgttatgcttttcaatctacctcataaggcaaatatagtcttattttccaaaaacagacaagatatgcacaatgattttttatgagtatggctataataactaaataaaaaccctagtaaatagaaaaaaagatcacattaaaataattttcctatgaacaagcagagttttgttcttgtactgcataactagacacaaggaaaacaatataattcatcacgcaaagagggacagtatagaaatcatatcgttaatgcaacaagtgcttatagaaaactgcaacacccattctgagccctttggcaaagcaaacacactacaaccaggttgtcaggttctccccaagaggcctcggggtgtgcagtttatgttcttggtggacagagtttggccttctgggcacagaaactcaattctgtctgcataccaattgcacagccatggctcaagggaaggtggcattatacagccagaatgctaactcattagtttactatcaaaattaatttggtactaaaattctctatgttcgtatggttactgcattctttccctgtaagaagtcaatttattactttgtaataataaatcacagtcacaaggatggaatgaatactccaaacccctaagatcagtgtattatcttcctatgagaaaggcttatgtgggtttctgagtgaacaagagatcaaaacaaggggagttagaggaactgccttttaatagagtctgagatcctaaccttgttagtatatccaaagggaataccaagacagtttaaagtctgtgatctacattcatccttctgcatttacctccactttcacattattcaaaattcactggcgaaaccatcctttattttggataatgctggaatagttactgccaaattctctaacattattttttcttattctttccctagctttggtttgatacattctttcttcacatatgtgaacacattccaacaagtccaatattgctcacttgggatccatttcatctcccaaagagaatatcacgtttacaccttaatccatttatgtgctggctgcgactttcatggagtaagctgattcctttatttcctagttcatagggaagcaagggtagctacttgactgaataggcaattagatattggagaggaacaagaattaaaaatataaacatggggaaaaaggaaaaaatacatttgatatatgtcatagctctatatcatcaagttataaagttatatgattacagaactcaataaaatcaacttaaaataactagtgttagctaaatggcttcagcaaagttgcaggataaaaatccatctaaaactactacaagcctatatactatgggccgtagccagaaaacacagtagaaaagaccccatttataattctgacaaaaattcaataaatgggtattaatttaaatcagaaaattagagacttattcaaagatgacataaagtctgacagcagaattaaagacagacagataaatgaagaaatattatttgctccatgctgggaaaactaaatatagtaaagatgacaacattccctaaattattatgtagatttaataaaacactgattttacagaacttgatattggtactaaaacatgtgttggaaaagtaggcaaaatgccaaaggaaaaacaccaaagttatgatagtggtttcaaactacgaaattttaaaatgttacaaaagaagaattattttaaaagaagatatggtattagttggaatagaaaaaacccaaaatagaattcagaaataaagatgaaagggtggacacgacaagccagaagcaatccgattacagaggggaaagtgctagtgagcaactggagagtaaacagtaagacaacgagtaagttagagccttaagctcacaccatacgtgcaggctagagagtgaaaatatatgtagaagaaaacagaatagcatattcactccaactgtggaagagagagaactttataactgccaaaaaagtagaatattatcacagacattttcaaatataaaaaaagaaaatttctatactcaaaaatatagcaaatataatacaaaatatcaaaaggacagagcgcacagaagagctcaatgtaacaaatgtaagtgatataaggttatcatccactgcatataattaaaaagagtcaataaccagatttacttgaaaaagtggtccaaagagatgaacctggaaaaaatgtacaacttgataaaggtaattaaagatcattttaaggtatcattatataactactaacttagcaaaaataaataaaaatgataaaaatgcaattaggccagggttagagtacacaaagctctgcttcctagtcccacatgcccacccaccttccagctrgtcctagattttggtactggttatatttccagggtcctgtatggttacttatggtcaagaactcactttctacatactctggtaaatgaatctgcattttattttcctgtccccaggtcctttgctggcaggcatcacggtttccctacagctatggttccccatggctcttattcatgtcctcagtcaattacccatctctctttctgccagcttgaaccccttgccattatccagtactgtcaccttcctaggttgaccatcctacttaacagactggtttattttccaaggcagagtttttggcctatcccaacccacagaaaacagagtcttgattaagcatggagatacattttcatattgttgggaatcctgtaagttggtctaatctttcctgaatgcaacctaaaatatgtaacaagctctccttatcctttgrcccaataattctactctggggaattagttcaaagaaataatccaaaggaagaaagaaattagtgcaagatgttctcagcagccctattaaaaaataaaagagaaaatgaaggagtgagggaggaagggaagaaggaagggagtgggggagggtaagaagagaggaaaggaagaagaatttaaacagctaatagtatgagaatggctgacaaaactatgacatgttaacataatggaatgttctatactactgaaaaaatggcaactatgtaaaccacagatatatggaaatggttatgaagagcactggagagctggtttagtgacaatcgaagtgaaaggatttggtaattatttgcttcaaccccatgctcacaccaaagcctaggacatctcatattctttctgtaccttccctcgacctcactcccgctaagatgagagagctgtcctttattttctccaccatagcttaatatggttttttttttttttgctgatcaacaatacctaaaattgttgtaactttcctatttctaaatgagggtctaaatgtatgacaataggtttccaagctttgcacaactcgtgcacaattcacttttyaaaacaatggcattttagacagatgtcagccattcaaactttgctttgtctgaagactttcctgttaggccccatctatcctgctcactcggttgtgaggactactagattcaaaccaatctagccctgaaccaacaggagcctggccagacctattaagagtccctttcccattgtgaacaatgtagggaaagacaacgagtacagggagtaagagracagactatggtttgaagctaatccagatttgaatcyaaattcaactacttaatgtttgactcttagaaatatttaagttccctggtcctcagatttctcatctataaagagaggccactaatgtctattttggactacagagagtacttggtagaaattcagattgctcacaagcctgatcaccttccattgttggttctcttcttcacctccaagcctcttaggatgcaacacccaggattatactacttaaaacctcagagacagctgtcggaattattacgtcctttgttcttgaaacagcatttccattaatgaaaccttgttttacatgagatttttggacagctgagtaccaaatcttttcataagaaccctaaataccccaaatctttttcacatgaacagctctaaatagatatctctccatatcctacatttatttgtctggctggtatgtttttgtttgtttgtttttttacgttgagtgtaaaggtgtgagatggaatataatgagtactggactatgaatagaaggcttcgcttgtctccatttattcaacaaatatttatcaagcaccaactctgtactagcccctgtgctaggtattagacctacaatggtgagcatgtagacatgggccctgccctcactcagagaacttatagtgtagaagaaagacaggaaagtaagccaacagttacaaaacctatgatgaaggctctgccagggaaggtataggctagtgtaggggcatggaggaaaggcacctgacccagacttggtctagaaatgcctcctggatatatgtcctggctttgccactcccagtggttgacttaactaccaatgcctcagtttcctcacctataaaatgacgggactgctatggaggaaatttgccaycaaaattacaaatgcatttccgttgacctggcaatcctaccactgggaactggtcctataaataatatcagcatacagaggaaacaatgcatttacaaggttattcacttgcagcactgtttatgatagccaaagactggctatcataaatcattcccctacaaagggtgatttaagaagctatgatacaacacataayagactaataggcattgtgaaaaaaaaaaaaaaaagaagagggagctacgtagtggtatgaaaagattgccaagatgcattgttaagtaaaaacactgagatgcagagtagtgtatatagtatgccaccttctgtggaaggaagagaataaatgagaacatatactcgcatttgcataaagaaatcctggaaagatacataagaaactaataaaagtgactgtctatagagaaccggaaagggaatggagtagaaagacatgggatgggagtgagatttttttcaatgtatatctttttaaacatttttgagtcatataaaaatattatctaactatttacattaattttagggtgggactagataatytgtaaagctcttccattcttaacattctataattatataacaatccacatttaacttgtaataatacaaatattcatcagcttctttgtctatttgaaaaatgcttagtttataatttttaaaaataggatacttaggtcagaaccatatgaatatattaaaaacacttctgtggcaaactcaatcattgccatctatctatatttaatttttaaatccctttaaatgtattaaaatccaataaagatgtattgagtacctattctgggccagacacagccacgaacaagaccaaaaacatctctgaataaagcatttattgtagtgaccataaatcatcctcattacagatgttaataatgaatttaaacacaatcatctctctctacatatagatatttgtgttattttaaattttttattaatttttaatagaaaactttgtagaaaatctgatttaaatgttttaaattaaatttggggaagggtcagtccattgttctgataatccaacctaggcctgcactgaacaggctacaaaacactcctggctatttcaatgtgtccttcaacctggctcaggacagagaacaatttggttatcatttcctgcatcagccccccagcctggcttcccatatacactattgtactcccaatctgtcagcagcattaatgtttgattcttacgtttggtccaaatatttcacgatgaagtctgtacttttgtcttaactattataacaattaatttcttatctgtttccctcactaactgtgaataatgtgatggctcagtcccaatcttattctaagcctgagatgtacaaaggagatgttcaataatcatttgcttaatagatttttaaaaatgaacaagtgaacaaacaatggaataattaattcataacaaaactaaattcaagctaaatttaaaaagttgtaaaggaaccaagaaacctacaaggaaattaacgttctatctttattcctattacaggtatacgtcgtagccggctctcagtcccaaaagcagggtatggccatgcaggaaataaaggttacagagtgctgacattatgctgatgacatgctgtcttcacccaaaaaaggcaagtgtctcagctaagatggtagtgactggtgtggtacagtaaagaaaactgaatttgaaataaaaagacacaagttcagatcccactttcctatttactagctatgacactctgagcaagagtttaacttttctcagcctcccctgagcctttccttctcttaaaatgctaaaacaaaacaaaacaacccaaaacagaaaacaaaacaacctaaaaccaaaacagtacaaatctgtcctgcctaccacatggaattgttgggatgagcataaaaaatactctttgtgaaagagttttgtgatagtaaagtggtatacaaatttaaagaacagaaatgattactcttcaaagctggatcaagataactaaaaataatgattaaaattcaatgagactaatgtaataggggaaaagtacattttacctaaaatgtaagttcctaaaaagctaccttttaataatttgatgataatcataaagaatgatctgaagataacaccagcaaaagggcagtgatcctatacagacagcacactcagtgctatgtgcccagggactgtcggatgctgagaagatgaagacaaagaaaacatgatcctatgatcttgaccctgtaagagctcacagtccagtaaggatggcaagaataagtacaaatgatcagggcagagagagagagagagcgtgagagagagagagagagagagagaggcagagacgaagggagagaggacttggatatattaagattaattggttaggtacaaaatactatcgaagaattaaaaatcatgctaccctattcttcaaccaggcttctgtttcaaagcatcctggggggctgtaaagattcctgggcccatcccatggtatacctctgtcttaagacttctataatctctctcagcaatattttacaaatttcactatagagctcctttatatctttaaacaaatttgttcatattttatgctttttgatgctattttaaatggtattgtttttctgttgatatatagatacttttccagtttttctgttagtatacagaaataccataaattatttttactactacccttgtatcttgtcccttgctaaattcactctttgtcctagcaatctttttgtatatttcattagatcttgtacatacacaattacagtgtctgtaaacaaaggcagttgtacttcttcctttccaatcattatgtcttttatttattttttctygtcttatggcattgattacaaagttgaatagaaaagtcataagagtgtacatccttgcctttttcctgatttacttggtcataatgcattatgattacctttttaaaaataatattcagttctgttttctagtgtttttctaaagctttctgtatctatgtgctcattcacraggtataatggtttgtaattttctattcttgcaacatcctaacatcctagatagattttggtacaaagagttattcttacctcataacaactattgaggttctattggactaccttgatagactgaaatttatagctgattttagcaacatgcagactaaaaataccaagcccagggaatggctgtgacattttatgtgtaaggtaattcaagaaattattatatatgcatattacatgcaaagtatttattgacaaaatattattttcccaagtatgcataaggaaaaaactaagccacatttcactttagtttcatagttcctagttctaatcacttacccacatagacaaggaagaaaggattgtgtttatttaccttttatatctttatagttctctaagactcagaaagaaaacttctccaagtttattattattttcagttcaagtataattctcctgtactctcttgatattcatttcagatgcagcaaagtctaaaactggaaagagctttggagatcaccaacttaacatctttggtattttaaagacggatgaataggtcaaggtgagaaatgagttctccagtgtcatccagccctttgatatcacaggcagagatggaactactccttcccaaccctataataataaaaatagtctactctcctcatcccacaccctttcctgatatatcctatgcaaatgcaacagaagatactttgcaactgtgagatgctaatacctatgtatcacctatccatctggttaaaagactctctattaaaggagtttgtatttttttcgcatcatttaaaatcaaggacagtactgattggcataaggccccatttttattgttttaggactagaaaacaaaaggcttaatggatattaaagctaacatgaaaacaaattgactttcttatctttatagaaaatctgaaattaaaaacttcaatttataagggtagtataaatggaaaatatattgttaaggctcaggtattaggaaaataacaatcattatggtagatgaaaaaaacactgatatccaatatttctatagcacttggcagttaagaaaatattttttgtagatctcatttgatcctcccaaaatgcaggaaaatagaaaaataaataatgtatcctaattttcagggtgagaaaacaggttcagaaagttaatttactaaagtttacactaacagcaaatggcagatctggaacttgaacccttgtcctctaaagcagagaacaaaataacgctactaacccctgggccctttggttggctgaacataaaatttacacacaaaatgtccagaggtaaaccagaagacatctctatcttaaagaatagagatcttaaagaagtataataatccccggggaatgaccctaagctagaagcatacctatgtatttcaacttcaaaattaaagattccgataggtgctatctacaggaaagaaaatacggacatgaaaacaacagctagaaactgctgggtgcagtggctcacacctgtaatcccagcactttgggaggccaaggtgggcagatcacgaggtcaggagttggagactatcctggccaacacggtgaaacccatctctactaaaaatacaaaacttagccgggtgtggtggcgcacacctgtactcccagctactcaggaggctgaggcaggagaatcacctgaacccaggagggggaggttgcggtgagccaagatcacgccactgcactccagcctggcgacggagcgagactccatctcaaaaaaagagagagagataatttacctttctcaaggatttacaaggaactacatgctttgtggcaaatacaagcactctgtcatttggctatgtcatgattactaccttttactcatgtactaggagttaagaagttaaaagcataatacctgttaacaaagacaggtaaaaattattctaagattaatctgaacacggaaatggaaaaattctgactaatgtattatatctgtgctctgctaacttgtctgaggacacagaagactgtcagaataatctaaataatagtaatataaataatataaataataaatccctaaatctttctataaaataatgctaactcataaaacacacacaaagaaaaaaaaataccacagagtttaacaatgataactggtaggtaatttcaaaacaaacattaatcgcattgaaggtaatttgtggacactaaattttttaacagcatatttaactttactgcactgaatacaaaatcagaaccattctgccattatgtaactagtggaatattaagtcttcttactcataagatttgaaatcagaggacctttattgaagtagctgagctaacaacactggtttatgagcctgggcaagttacttaaagtgcacaaagtgtttcctcatctgtaagatgtagataataaaaatatccatttttttcttgtcaggttatcataacttcaaaagtaataatgcatttcattatctattacaatgcctagaaatctatcacttaggttctggcccaaaatctgactgtgaagaaaagaaagaaaatcaggtgctaaagttgtattttaaaatcacttagcaaactgccctcaagacctccagcatttagactagtgctagcagagaaagaggtggccaagacatagttgttaaatggaaaaatgaagctagtctacagtgattttcacttttgaattgcaatatttgttattcttccataggtttggctttccgcgctttatttctctaggtaccatgtctgtggatgttggtttgatcacagccatcccagccttatgtaaacaatgggtagtcaatatattcatgtcaaaggaatgaaggagagctctttcctcactgaatcacagacacttggggccaggagagttcgtaaaaattaagtattatgaaatgacgttttgaccacttgtctttgtcccttttcaataaaaaggaaaaaaaaaaccctaaatgcactacttttacaatatcttttggtaagttactaggccaggcactgatttagagacttaggatacaatggtgaataaaagaggctgcctctcctcttagtgcttaygatttgtcacatcaaggcaggtacacacacacagatgaacatggcctgctagtggctacagaatccccacaagatatgtatcgagatgacagtgggtatagagattgcttttccagattggccctcaagatccaaatggattaggaataaacatacttgtttcctttaaagcagcagctcacaacctcagcaatacattgaaatcaccctggagagctttaaaaactatagatgcctttgtccccctcccagagattctgatttaattggtctggggtgcagcctagattgggagtttttaaagctccccaggtatggtcacggttgggcaacactggcttagagcagctcagaatttcctaaataaccaccctgtcctacaaaagtctcctcacctgggagaacagaataattgcagaagcccaagggccatcttcgtccacacctgtagctccagagcagtcacctttaagccctagggttaggcaagggatcctaagagcaagttttaagagaatcactggagttgtaaagaactatggcagtcaccaccttatgtaccccaatggcaaatgtcaggagaaaacagtcatttaggattctaaacatctggatgagaacaagctgaaagaaaacaaactaaaaagagaatattgtaagtactagtgattaattatagatacacacttgttttctgagtattcttaaacactttttactgtagaattgttaaaaaaaaataagaaaatacaaatagagggaaaatatcaccataatctatgacatctatgtaagccagacttctttcctgtgtgtgtctatgtgttcacataaacaaaatttagagatttatggtacaaattctgttttgtagtggactattttcagttaacaagatattgtgatgaagacttctggttgagatgacagattaaactaccgaaagcattactgatttattagaaacaaaacctcggccaggcatggtggctcatgcctgtaatcccagcactttgggaggccaagatgggcagatcacttgacgtcagaagtttgagaccagcctggccaacatggtgaaaccctgtctctactaaaaatacaaaaactagacagggcatagtggcgcacgcctgtaatcccagctactcaggaggctgaggagggagaatcgcttgaacccgggaggcagaggttgcagtgggccaagatcatgccactgcactccaacctgggcgacagagcgagactctgtcaaaaaaaaaaaacacctcatattgaggaagcccccaaaggtaaaatagaggtactggcagttgcagtgagaggcaaggctaaaaagaggagtaaaaatctgtgtaagcttgcaaaacggtgagaacccctcgtacgacagagggcccagaagcttcatgttctcattagcttcagcctccagcaattcatcaaaatctctagttttcctacaaggatctagtggcttctgcctcaggtaagcaagtgctgacatcctaggactcactgagagctcctgtctctatccacatttcaggatagctgtttgttctgttgccttagttctctgatgagtccatgaaaatctgtctgtccagcttttttcttgtggtaaaaatgggacctacatcattccagctcttcagatcacagagctgaaaccagaaattcattccttggcctccaggagccaagccttatatgttcttacactccacatccatccccagatatgagaccaaaaatttattttctggagaaattgaaaactcctccagaaatggccaactgatgctggcatttgaagatctctcaatgaagaagacagctcactcctggtcttctcatagttaagccctcaattaacaaggatgcttctctgctaattatgatttgcttaaactgatattaaaattaattttgcattcccggaacaaaaatagattaggagattgctcaagtatggtggcaaatcagaggaaaaccaagatgagataaatgtttcttttttcctaagttagaaagtaagtaattagaagtggactctatacagatattttgaagatacatgaagctatgggaaacaattcaagaaactaaattagaaacagaagatgtgctggcgatttttaagagcactgtcgtgcttatgtgaagaatttttgaaattattaacttgaagggaaggaaaagtgcatcytaaataagttcttacattgttatttctgtctaagtacagttttacagtagttaaataaaagaatcataagactagaaaaatagataaggcccttgaaaacatatttcaatattctccttccttcaggcaaaagaagacctctatcagctcacaaaagttactatttgctaggttagacgcaaaaaaacttttttcagccctcaaacaggtattcacatgcattgaacaggtatgtatgcataaacttgtccatctgtaaagtaaaactgtaaatgcccccaagatgggagcatgtttacgttgaggtctaaattaattcattgtggtgaataaacaagtaataaaataaaattaattaggaagaaaaaaagactgttctacgaactcaaagacaaattatttatattttaaagctcaaggtacattttctctgtacttggaagttgtgtaaatgtgttagtacactgggtcatatacaaatcagcatattcttggctatgagattttaacagatagattcaaattcttccatctatttgtctaagctttaaattctattttttctgcacttgggcatatcctgtctacaaattacagacggacaagttcatttgaaaattgactaattaaaatatattgatcataaaatatgtactgttatcttttttccttaacacatcctaaagctaatcttagctgaaaatgtgtaagtacttatccctgtacagcataagacaagaatataattcaatgaaacctttacaaaatgtcagattaattacattttttcagtgcagatggatttaaggaaatcatctctgaaaacagtacttcatttaaagtaaaataaagacataatcttctctgataagtcaatgtgtaggagatgccaaaatattaaaactgccatatattaaaatgctttggtatgaatttttcaaataattacaagtagtgtatgatgatcctgaggcaataccctagaaacactaaagtttttatgggtagcacaacaagaagaatcaattgcatgacacacgagaaataaactgaatcatgtatggctaaaaatcttaaattttagagaggtcattagtctataagtcaagtaatatgttaaatattcattmctttgacaagcatttatcatctaaaatatataagtattcaaatatttctgtaactctgaacatcaagttaatatgaagttgaccacataggcaaattttacgtctccgtctacacaggtcagcatgacatttctctaaaatgacttctttatgaggttttgaaattcagtgccatagaagtcagatgcataaatcattcctgcagaatacatttataatgtaccattcattgtgcaatgccttcatgttttggtggacttaaaagatttactgttacttgagtaaaacattaacagagacaaaatatttatctctttgtttaataaagcttaatatgcaccttaaaacaatttacatttatgtatttgttaacacaatacaagtaatgttctattcatccccaactgaaatttgttatttaaaacatttcctatgccatgtctaactaaaaatggcattttaaagctgtattcaagttagaaaatacacaaaatagagaagttaaaaagtataaaactggatggtaatgttttccttttattgtttctagtactgttacccttcattctgtaagagctgtcttctttccgtttttttaaaacccaaataaagaagttaattttgttgacttctaatacttcactaagtaaaatgaygctgggagtgcctgaatacacattctatcttttaaaataaatcacacaggtctggcaaagtgtcaaaaatgtagacagttaaggttacgttaagttcctctctttttcatggtttcttaatagactatgagaaggcagaagggctcctcaggccaagttttcacgtctcatggcccctaaactactgtgtagaacggtcagagtctacacttggctccctggattcattccatggatcaaagctccaggattaccctttccagcaacagatgacaatgctaacagcacaaaaggcatcaacactatctcttcaggaaactacccaaaatgaagacacccaagggtacttgaatgacacacattttttttcttccaatgcccctggcctccctcaatacccataaccctagaaaagaggaaagtaattgatccatagattccatccaagttctgctttcaaacacaactccatacacacacacaaagtggtgagcaaattctatctatacacttctataataactgacattcatattttcttctggaaaaatgccctatctgcctttaccactcacatccctgaggtatcctatgcacactgcctcaccaaacgacacctctcccttccaaggccagctatgatttctctcttaacgcactcttcagaggcctttccaggcctgttattctaatcaacttggtagttcctactactttcctacctttagaccctctccaagtccttagtacaagtataaaaatcctgtatggttgccgctgtgtctctatcatccatgtgtacaacaggaactatcataaccctggagtgagaaggaaaagacagccaygctacccgtcaagcgcatcttactctgctgtgcatcacaagagagggcaggacacctttaaggtaaccaaattcatggttagaaccaagtgtataataacaaaatgttactaaaattaggtaggtttgtcttcattattaattcacagaaagggaaggggggctatgtgttttattctctttctaattgtccttactacctacttaacacaggtcactgtgctcaataaatacagatcacgaaatgaccaaatatatagatacacaagtaaagaaacatcatctatatcaaagatggccactcgctgggacaaagataagagtcagtatctagttacccacaggccaaatcagacctcaggaacacaaacactgctaggtaatgttttattcatcaatctcccagggacaatgatagtacatacacagcagcaataacatcaatcggttcagtaaaaataagaggcaagatcatgtcccaagaggaagggagggctggttaggactggaagcataaggagactagaaaataggaaatatttaatagttattaaaacaaatgtgctgaagaattgataactactgttaagccatacaaagggcccaaaataaaattagaatcacaaatttgtagtgggccaaatcagtacggttctcagattgcttctaaaatgttccaacagcagattgcaaaaagcgggaaagcatgcagtgactatcacagtggacaaagaacgtgattaggagggttgaggaggtggtactgaagtagtaggtctttgagacaaggctaagcatgcaatcagcagagtctaagagtgaatgactgaaggcacagatctagctccacagatgtggaggagtggaagaagcagcagttcaggacgtggtaagcagagaaagagagtactgatattttagaaacagagcagtgatgatgaagtacaaggtgcagcaaaaaggaaaggtggggagcagaaatggagctggaaagactctaacaggctgaagaaggatgaatggatcatcattttacgtgccagaattggggaggatgatggcagaggatggagagaagataagacccaggtactgaggttgtctagcaaagtgggaatgagtctagggttgacagagtcagcaatgattactgaaaagagtggtgcatgtggacaaattattaggttttaatattttcacagtatatcaggagaagtgagaaaggtgaggcctccacagcaacgaacagaatcaattttcagtaaagacaagaggcagcagaaaaattacttacaagtgagggaattacaactccagatgaaagaacactatttctggttactattaagttgaatgaattaattaagcatagagtctactagtaaaatactctgaaaacctgtaaactaaagaaccatgaaaatagcaaccatccaattccttaactgtgatcattatctgaggattcacatgccaagcactataggaagtgcttcacaggcattattttatttcatcctcacaacttaacactgtgagacaggtattagattcattttagagaagaggatacaaaggcataaataagttaaataacttgcctaaggtcagagtcagtgacaaaactgggactggaactcaagggtaactgatagcccttgctgttcttaagcaccaacagaattcagatgacatattgccttttccagtatttctgctcttctttttatctttaaaatgtttctttgaaagctatgaaataccagtgctcaaccacatcagacaaccaataccacaaaactatttgctttatactgagaacgcactgtagtgccttccttggaatgcaacacttttaacctaaaactgaaaaatatatcacgctgaaaaagaattgctcttcactttcaaattactgatatcagggtgaatggcttgttcttctgtgcatggttgttttttttcccccatagcaatatgccactgtcacatcatgaaatcttaggcagctactattgtttagtttcaatatgtttccttacctccaaagaaaacaatcaactctaagttgtctccacttcattactaataatttattattaaaaagcacaaaatgcattgcacattattactttagttcttatgcatagtagataattgttttttattaaaaactgcatgtaaaaacatctttaggacatttgataaaacatatccccatgcctttttgttatccgtatcatgtccacacctagagaatgaggcaggtttgaccttctgaaaggtaatgggtctgaaacaaactaaagaaattatgggcctcttttcatttggcttaaaaagggatttatgatcatttctgttcaacaacctaaattcatttagggctgaagtgagggaaacagaggaaaggaagtgggagtagcgtagcattaagaaacgctgagaagggcccagtgtgaattaggctagtggaaatgcagactcttaagatgtgctaaagcctgataaccacttttagtgttttcaaatccacaattcccacgcattcatcttattcagtggtgatgtctacaatgttaaagttgccacaagatacactgaaagcaacattttctgtaccaagtaatttgattcacagaaagcatcttctcaacacagtggaccttgcctggtcttacgtacaaattgggaatcaggtaagtgtggctctagcctgcctacaacaatcgtctgcaccacaggcttggataagttcttcttctagaaaagaagcagctcctacttgccctgtatatcttaaagggctgtgagaagaagcacatgcaggcgctttgccctggggagagttacatgtagaagggactctggatggaagcaggygctctgtgaccagcctgccagtctgcgaatctatgtggctggctgcactacgttttcctgccctcctctccccagctataggaagattgttttgtaggctcattattgcttcaccaactgctaggaaggaaatatttctatgcaataaaaattcttttggtgttttttactcccttctcatccatgcaaaacaggaaagcatgatacattgccttttatggtaacaaaagatccagacgaaggttcttaatgttcttagacaattgtgctcacattattaccacaacactttcctaacttcactgtttgaataggaaaaaagatgccttacatgctccaagcttaatrtatctccagggaagatatatcctgacaaatgtttactaaatcaggtcacggattaatcaaatagggagttcactgaaataataaaattaatatgcttgcagatggctacttaaaatgagaatgccaaggtaattgtaagtggttttaaaagcagttttcttttctctttcaaatatttgaaccatgctcttaacaatgtagtctacagaacacaggcacagattggtctcttctaacatgattactgcttttatttacatgttgttcaacagccatcrccaaaaaaagccatcatcagactagtatctcatctcaaggagtacctaccatctctctcattatatctagagatttttgaggcaggtagtctatagatccttttgcctcatccaggtagtctatcctatagacaaattttggtactgaaatcacctctctctccttctcttttcaatgctctgattacatacattataatctgttttcatttaaggaaatgaaacacatgtccttaatgctttttctgaaatgctggatggtacagttatttttaaatgagtatcacagaattttaaggctgaacctcagagattatctagttcacttttgaaattaaagataagactggagctcagagaggtttctttactttccccagagtcacaccattaattaaagacaaatatgataaaagatgcccaatttaactacttttaaaaatctaatctaaaaatctgaatgtacaaatattattctttgtatagaaggagtggctgaagggtttcttaaatggtgagctcctatagtttctttttaagaattcactgtgcaaaacagtgtatactaaccctgcagaaatatatctacagtataatgttaactatgagcctagatttgtaatttattttttaggtaacatatttttaaaatagtataatataacttttattgttaataccactacaaataaaacattaagataattccggctttttcaaagagtttatgtgaaaacgtaaaccctaacagtttattttctaatgtctatgacactgtctcaatcagtgaaatgaaatccacccacctttacttcaaattaaaggcaatgcttacatttacagagaattatgttccttaataagcactgtaaatccatacaatgtaattaggctggatttcccatgaaaataagtatgaaggtaaggtacctgaccaaaggcctagagctcaatttaatttaaaaaatatacaacgatcagaccattgtatttgaacagtgaaataatatgcttatttactgcaattcaaaaattagtcataaaacttttctttagtaagctatatttactaataaaggaagcaaagagcttttattttacctctaattcctgcctctcttgtactacaacaaaaagaaaacaaataaacactgtcattggagtaatcaaattctgaagactttctctagaaatatgtgcaagagtttggtttttttcccttagatgaaatagtctaatcactgatataatgaatgccaatctagccaccatgcagataaagaaacataacatgaaatacaaaggaagggcctgtgtagccccttacctttctcatccccttacctactacccctgccaggtatccactattctgaaatttctgttttgaggaaactctggcacacttaatggttcttgagaaatgattttattgccattttttctttctgcaattttttctatataaatttagaaaataagttgctaaagaagtaggatcagtatttcccaatttcttggagaatatgtgttaatttgtgtgttcagctgacataacaatgagagttgaaaaattggttcatgctggaaatatgattaactgtaaataaatctaaatgagaaccacttgtttaatgattaacgaaggaaggatggaaggacagaggaagggaggaagggaagaaggaaggctaaccattccaatggatataagaaatgccttcatgctaaaccctttcaagtttatagttccacctcagtttctcttctgaatgccagacttgcatatcctagctactggacatctccacctagatgtctgaaaggcaattccaaatcaacactgccaaattattatagaaatcttgatcaacacctcagtgtgctcacccccrcccaaacctataccccactctaatccccattctcccatctaaatacaatagtccttccttatccatgggaaacatgttccaagacctgccagtggatgcctaaaatcatggatagcatcaaaccccctatatactatgcaaaaaattcattttccttcttcataatttcatggatagatgattcattcttactgtaaagcttagcaacctcagcatagggtttttttctttcattattaattctagaactttcaccttttcacttaaagcactttacggcttgtgtggcatgtctgaattgccagcatccctactcttgcactttggggccataattaagtaaaataagggtcaacttaattcaagcattgtggtaccagcaacagcagatctgatattggttatatcagacatccataaagagatatgatataaccaatatcagatctgctaattggctactaagtgatggaagggcacgcagtgtacacagctagagcaaagtggcttgtacattgtgaagatgctggacaaaaggacaattcacatcttgggtgggacagagccggatgtcatgagatttcatcatgttactcagaagagtacaaactttaaaatgtataaattattaatttctggaattttccatttaatttctttgtacaatagttgacccaggtaactgaaatcccagaaagtggaaaagaggatggaggtactactgtaaatggcgcaaacatctacccagttacttaagccagaaaccaagtggtcatccttgwtttctctctgttggtatttaattktcttgatataatcatgaattttatgaaaactatgttcaacattgtcctgtctttccaagatattgtcactctagagaatcaagaaaaggaagtctgataacatgatatagtgtttttgatgtaattcctgagaattttctttggggtggagttgagggagtgagagggaggttaggaaataaagagataggatcaaacatggtattgctagaaattctgggtgtcacaacaacccacaatgaagagtatttgttcttcaaaacagaagatagttgtcccctcccctcaaaaaaaccctaactgtaatcttcctctaaaataatatttatttgggtttaaattatctcaaaaataacagcctttatccttagaagttctagaatcctatgtcaagttttttgtgaaataaacagctcctcygtacactacctcttctggagtctgtaatcaaggataattatactatggaataaaagccaaaagttaatacaattttaatagcagcttacagactccataaaaatattttaagttcataaagcatataggaacgaaacacaatagtcttatcttaaaactttagttcttaaaaaggaaaaacttaatttaaatatgctgtaagaagatattcaaatatagcaggttgtgcttattgttacaaacatttatgtacttttataactaactcgtctctccattcctattaattattaattacatttaatactattgttagaaagtaggcaaagctctgggtaattttagtgtttgtctctaaaacctaaaggctgaaaaggcctgtcagcctctaaaaatgaaagacagtggcatttgagagaatatttacagattttctaagtcatttacccctactgccaatttctaattaatgaaagaatatatcaagttgataaaaccttgcttatcacctaaattaggcaatgatatacagatgaataaggcatggagcctgtccttaaagagtgcatggtacagaaatatctttatacaaagtaaaaagagaaaattgagatgataaaactttctattaaaaatgttcaatgggctgggcgcrgtggctcacacctgtaatctcactttgggaggccgaagcgggtggatcatgaggtcaggagattgagaccatcctggctaacatggtgaamccctgcctctactaaaaatacaaaacaaaacaaaaaaaatagccaggcatggtggtgggcacctgtaggcccagctactcgggaggctgaggcaggagaatggcacgaacccgggaggcagagcttgcagtgagcggagaccgcaccactgcactccagcctgggtgacagagcaagactctgtctcaaaaataactaactaactaactaactaactaaataaataaataaataaataaatataaaataaaaattttcaatggttatctaggatttaaatgatctcaaatacagtatatgttgaattactgaaagaggagttgttgccataaaaattttttatctaaaatgttttatctaaaaatattttatctaaaatttcatttaaaaacagggatgagattttcttttcttttcttttctttttgagaaagggttttgctctgccacccaggctggagtacagtggtgccatcacagctcactgcagccttgacctcccaggctcaagcgatcctcccaccttagcccccttgtatgctggaatacaagtgcatgccaccatgcccagttaatttttatayatttttattttttgttgtagagacagggtctccttatgttgcacaggctgctctctaactcgtgggcccaagtgctccgcccaccttagccttccaaagtgttgggattacaggcatgagccgccacacctggcccaaaatttcccacctcaaaaaattttaattaaatctaataaactacaatatacaacatatttatttagtatattgtatataacatatacaatataaaataagctatacaaaggaaagaaaaaatacatgagacaatgtggaagtacagagtctctcattcaaatgaagtgaaaataatagttctattatagtttcaggaatcataaattctaaaaagcatttgaattagctgcctatttgcagtgacttctgacatataagtagcaaatactgcatactgcatttaagcaattaatcagaatgattttccattatctatcaaaactgtgaaacatgagatttatacaatcagcaaaagcaggtgacggcccctaaaaagacacactgcatgcacacacasacrcacacacacacacacacacatgcacagagaaagagagagagagagagagaaaaacgtgatgtttttgtttttatagaggccatactttgaaatttaaccttacttttattctttcttacctaaacacaaatattctttgcttagaagggaacagcattatgtattgggagccactgtttactaaaggagtagggcctcaaagttatacagctctattactaatttgttaggagcctgaaggcccagttaatctgcacttaaaagaaaaaacaacaacaaaaaacctaaacagccttctcagcttttacagaggtgcagtccaatccagacagttgtgtgtcccagcagctaagtccaaagtgtccattgtgatcaaggaaaaaggcttgcttgttagaacttgtattagctaaattgggtgcactcggtattaaaaacggaggcaggcaagggcaacagctgccttcttaagactttgtagtaaggaaaatcttcaggcatcaatgcagatgtgtccccaagggtccgtgaactgaaaaaaatctgtgactactctaagcatgtcctaggggagctccatcaacttgccctcctttttcttggtctatatcaaacctcccacttccaaaaatcttggaagaagaatgaacttctttaataaatatcaatttagtgagatgtacactaaaagtacaaataaagcctattattttcaaggaaaacttacatctcaaacaaagcttgaaaagctaaattcacctaaataaatggagagtctcggggtggtgaacaggcaccctccactggtcctggtcagcttggctgaccattctgtcccatacgtacttcacgcttttcacctcccctcaccccaactaatgccatggaggtcagtaaagaaaaaagatagtgagaaagtccacagaaagggaaatcagtccactgaaaatttatcaacagtataatacggcatgacttctcatataggggttagggaagtaaaaaccctgttttattcacaaacatacaaacacataaaaggctaaatttgaattttgctttgtaagtcctggtcctagactcccttctcagaattaaggcactctgtatctgttgaatgaatattcagtggttttcaaccaggggtaattttgccctcccggggacatttggcaacatctatagatatttttggctatcacaacttgggggcaggaggggaattacactagcatctggcaggcagatgccaggaatgctgctaaacattctataacatacatgatagcccccagcaaaaatgaattatctggccaaaaatgtcaatagtgctgaggctgaaaacactgggtaagagaatagctatttgtcacaaataaattcatgtctactttctgaattgtccactaccccaattcctaatggccccagcaatttcttccaagtataaccagatctttgagcaccagtcataaaaattataggaaatgtaaactgacagaatatcctgggagttacaaatatgtatatatatgtgtgtgtatatatatgtgtatatatgtgtgtgtatatatgtgtaaatatatacgtatctatgtatatgtaaatatatttatatataaaaacctggatattgcttaacccaggaatactactcataagactttatcctaattagcaattagatatatatgtctgtgtgttcatggatattcactgtagcactctttgtaagagtacctcccccactccccaaaaagttaaaaacaatcttactatctagcaccattaattaaattatgacacattcatttawcagaatccagaatcctatacaatcttttttcccgcccaaaggatgtggtgagtccacaatacacagttaactcaaagaagccaattaagaaaattaccaaaacagcctcaactgatggatattatattattattagtgttcatttctagggggtagaatttcatgaatttttccttttctattttacatgcattcatacattttttacaatgaacacgtatttataaaaaacaaaaaagtaaacagatttcttattgattatttagagacagggtcttgctctgtcatccaggctggagtgcactggcaagatcatggtttacttcaaccttaaattttggggctctaatggtcctcctgcctcagcctcttgagtagctgggactacagaagcacaccacgacaactggctaattaaaataattttttttgtaaagacaaggtctcattatgttgcccaggctggtctcaaacccctggcctcaagcaatcctcctgcctcagcctcccaaagtgctgggattacaagtgtgagccaccacacccagcaatttctatgttttaaaaaagaaaaaaggacaatagttaagggtgtaagaaagcttggaaatcatctagaacgataccttactcaaaagatgagaaggggaggattagagagcttaagtcctactgataaacggcagagccagctcaataccagagaactcaatctagcagagaaagagaaggaaaggcagcatggcattaaaaactgaacaggagctaaagtatttaccagttaatttaaatgtatggaatttgtttcaaaataatccagtttgggaaacaggagaggagatacagttgaaatagattaaccttgtgataattattggaactaggtaatgggttacaggacagtagtcgttctatctttgtatatgttcaaagttttctacatttaacaggtcaagtttatattttccagctctgtaccatgaaaagactgagaaaccataatcaatctggtagcaatgagcataccaagagcctaaactgtaatagctaaatatttcccattagaagaatccaggctggccgggcacagtggctcacgcctgtaatcccagcactttgggaggctgaggcgggcggatcacaaggtcaggagatcgagaccatcctggctaacacagtgaaaccccgtctctactaaaaatacaaaaaattagccaggcgtggtggtgggcacctgtagtcccagctacttgggaggctgaggcaggagaatggcatgaacccgggaagcggagcttgcagtgagccaagatcgtgccactgcactccagcctgggtgacagagcgagactccgcctcaaaaaaaaaaaagaatccaggctgccaacatggtgaaaccccatctctactaaaaatacaaaaattagctgggcgtggtggtgtgtgcctataatcccagctactcaggaggctgaggcaggagaactgcttgaatccgggaggcgaaggttgcagtaagccaagatggcgccactgccctccagcctggtgacagagtgagacttcatctcaaaaaaaaaaaagaatccaggctcacatctgtaatcccagtgctttggaaggccaaggcaggaagatcgcttaaggccaagagtttgaggttatagtgagttatgatagtgccactgcactccagcctgggcagcagagtgagaccctgtttcaaaacaaaacaaacagaatccaggtttaaaaaaaatgtttagtttcagatttgggtcatgaaatatacaaaatgaatttcaaacatcttggcacagcagatatcaaagactactagggccatgtcaaaaggattcaggagctaacctgaagaggctacagctggccaaagatgagaatgaatttcaataagggtaagaattgcagtaagttgaaacccaaatatatttaaagtcataagttcaaattaatttaatacataaatagtcaacttggaaggatgacaggctaattcattatcttgaaaacggaataaatagaagaagcatttatcctgcctttcctatatgaactgtaacgctggataaccaaatagtagagaagcatctccttacaaaattattccagttaataaatgaaaagagaatgataaaattatagtatcaccattttgcaacccccagtgaattaatggatctaggtactatgcaccaacagctactaccaccgcaataaacaagtgacaatcacrcaatatgtgccttcggataaaagaacacatcaccaccaataacactgccaaaggaattgaactcagatctaattaagcctttccatccagctgccaattggcagtaaatacacaggaacatgctgaactgcacaatgagcctgcaatcagcaaaatctagactgtgggaaactacaagtaaatgacctgagttcttcaacaacaataataacaaaacgataagaaaaagaaaggaatagaggaggaatctataaatgaaaagagacttaaaagacatcgaatttaaaacaatgggtaagactcaaccatagttgaggggcagctcggtgatgaagacaaagaatgtcgagggtttcttcctaacagtcagaatggtggctacttttagagggaggaagaaagttgtgattgggatggggcacatggagagaaggaagaactctctaataaggtgacatttggggcagatcttattctcatttaataattaagaaaactgaggctgggggcgggggcgttgagtaacttgccaaggttacacagtaagtggtggtgtgctatgatctcactaagagcttgagctcttgctcaggctcttaactgtgatttaacacctttttttctaaaggtatataaaaactaaagtgcacaaatcttgagtgtaactttacttgagagtaaagttcaatgaactttacaaattaaatagttttgttctcaaggttttaaatgtccatataaagagaggaatgcttaacctctttttgaaaatgtctttcagtgcaaagccaacttgttgacaagttaagattgataagaaaagtacttcaacttgggaggctgaggcaggagaatggcgtgaacccgggaggcggagcttgcagtgagccgagatcccgccactgcactccagcctgggtgacagagcgagactccgtctcaaaaaaaaaaagaaaagaaaagtacttcaaagactgcagcagtaagcaagctttacctggagctgggggacaggagagtcagaaatgaggcttttttctttactgaataaaataaaaacctccctgaggatttttgaagagagccagcgtatggccattggaggtgagacatgacaaagtagcttcaatccacagaaaaagagacatgcatggggcattatagtaggaatgctcaaagataaaaacttgcaggttacctaacagaggggatagttttcatagcaccctgaagcaggcagaaacagacactagaaagctgttgtgcaaattaaaagattttcttagagcaataaggaagactagagtgaaaaagtaatttgattatagttaggtttaatgaagctatttgaaactgtgcctgagtaggtctagttcttttaagttgattccacgtaatatctcaaattggatttgatatataaatcacagtaattagtaaatatttgtcctgttactttaagaatgaatttttagcatggtggcatgtgcctgtagtcccagctattctggaagctaagatggaaggatcagttgagcccagcagttagaggctgcagtgagctatgaattaaacctctgtgatccagcctgcgcaacagagygagaccctatctcaaaaaagaaacatacttgaatttttataacaatcacagtaacaagaatgataataaataacattcatcaagagctctgtggtagtctgaactaaccagttacatgtattaactcatttaaccttcacagatactcttggaagtatgtagttacagcctcactatttttttcagatgaggaagccaaggcatgcaaccaataagcaacagaaatggaatactgacattattgtgtgtctgcatttatccactgcttgcatttactcggcagtcaatcttcccattgggccaatcctgctcgaaagtagcaccacaattctcatggtagcagggcaatcttaatggaatttaggaagaactaagctctctagaaagaaggcctatctgaaacagttccatttcagggaaggaagtgttagaagtaggcttaacctgtaagcttaacttctgcaactctttaatccattatattccaaggatatctggaagtacattagatagggtatggcctgtaaactatagatttctctagtgcagtgcttggcatgtagtaggtactcaacaaatatttattgaatgaaagtgaaaatgaatacatgagtaacaatcacagaacattccaacatattgtataatttcctaataccaagtaagtaaaccagataattgccagtggatcctttaattttaagcagttgttgaaaaggctaactaaagaaggggatgtaagaaaaacgcctggagaaaacaagagaggaagagaacaaatgcaggggtatgaggtagctgagagaaccaacaggctaatagatgatgatgaagaagcttttctcactgatatgtaaatatacatggatagctatctttattcagtttgccaggagtctccattatcctgaaaagtgaaaatgtaattaagctgtaccccttcacactctcatacacaaacacatgcacacttattttccattaaaacaccctttgaaataaaagcggagaaaaagtcaaagcagaattttttaaattcacgcactcattttttttagtttttatcaacctagttattttgggttgctattcactaaaaactataagatatgtcggtgtcggggccatatgttgaaagtcaacgggattctttttcttctagcattctctatctttcattggcaggttttcttagtaagatctgtcatctggaagagctcattctgcacagttgatgattttccataggttatgttttcaggctgaatcataatcttttgtagttataatctgctgaaattctcattacactcatacaatatttaaaacattttgtgtttttatttttccaaaatggaatataagagtttttcaccatcttcacaattaaactaatatcaaattgtcttgacagaatctttaattatggggtagagagtgattaagttttataacttaaaatcccagatctaccacagagttgtaaactcagtattttatgtattcttaacaaaggctgtctgcagcagccaagggaggtcacaaatgttatactgcatgctttgattctgatttatggttaggattgttagaacttgtattttgtgccctcgctacatatgtaggttgtaaatattgcataagaagattggaatgcaatagccataaaaataattgcaggctattacataatcagaagtctgttcctattctttattacggtagtctcatcatactaagtaatatatatgtactgaataaaaatagaatgagctctagcattatattcccttttatgtttcttttagatttaagattttaattgctacaattgtggatcacagtgtttctttaaaaaaaaaagtagaaaaagcgaggtccactcaaataatgtaagaactcatctacattatcattaaatcattttacatacacgcatatattattttttctttaaaaagaaatttttttaaaaaaggaaaaaagaaaattcttactgagtatacactgtgttcagggcactgtgctataaagcaagaaaatacaaaggtgaattacaccaattctgccataaggagcttcaactcttcccagcatctgcccttccttcctgtttgtactgctacctgtggatcacttcatttctagttccagtagcctcctttaacctatgctccttccctccatgtgccttccccagtgaagtcttaaggtgccactttgtaccttgactgttttaaaacctgacatgactctttaatgtgtactgatgaaatccaaatcctttaatctggcattccacactcaacaatcttgtttgtccttgaacagaattcaaactcatccacctctgggcctttcctcaaacttgcactcttcctggaggtgaccgttgtataatgccatatctgatgggtaagatttcaacagatagaaattgtaatgtggagtattacagattgaggaagacacaaaatcaagaaagtataagatgtgttcaggttaactgttcagtatgaccgtggtataaaattgatgtaagtaagtagaagggacagggacaatatattaataacattcaagagctattattatagatctgagtatctaactatctttctatctctctgcctacctacctaatacctgtgtggttttaaaacatgtccacaagggccacgcgcagtggctcacgcctgtaatcccagcactgtgggaggcagaggcaggcagatcacctgaggtcaggagtttgagaccagcctggccaacatggtgaaacgccatctctactaaaaatacaaaaattagccgggcgtggtggcacatgcctgtaatcccagctattcaggaggctgaggcaggagaatcatttgaacccagtgagctgagattgcaccattgcactccagcctgggcgacaagagcaaaactccgcctcaaaaataaataaattaattaaacaaaataaaattaaaatgtccacaaactcttcgatattcctaccttcaaacggtggagataattccctttatcttaagtatgggctagacctaaataacttccatgaagtgagtaaaaggaagtggcagtgtaagacttcacactaggtcaaaaaaggccctgtggcgtcctcactcttccttggattgcttgttctggaagaagtcaagccccatgttgtgaagacactcaagcagcctttggagaagccgatgtgatgaggcatcaagccttcctaataacagccatgtgagtgaaccatcttggaagtgcatcctccagccccagttcatctttcagatggctactgcagccacttgagagacactgagctggaacttctcagctaactcaatcccaaattcctaagccagaaaaactgtgagataatgaatgtttattgtcttaagccactaaatgtcgagtaacgtattatgcagcaatagataactaatataacctatcgatacatgtctacaaaagaggctatcagtgacttcaaatataaatatatataataatattcccaaacaatatactaaagaataaaaagccttttaagctgtcatattactgatatgactaataagtacagtgaggaacactgaccacatttatcatatttaccaacatatatacgtcagcatagaatacaatgcctaagtcagagtcacaatttaataaattatcgtggctgttttttttatttttttattttttatttatttattttttttttgagatgagatggagtctcattctgtcgcctaggctggagtgcagtggcgcgatctcggctcactacaacttccaccttccaggttcaagtggttctcctacctcggcctcctgagtagctgggactacaggcatgtgtcaccacgcccagctaatttttgtaattttttttttttttttttttttagtagagacagggtttcaccacgttggccaggctggtctcaaactccagaccacaagtgatccgcctgcctcggcctcccaaagtgctgggattacaggcatgagctaccgcacccagccacagttcaataaatattgttgaataaattggtggatccttttccaagaacggctctgaaggagattttcttacattatgataaatttcatgtcctaggtttcttaacaaaaggcaaaaccaggcagggcaaatggagagaaaatataattccttaaaactttctgtattcaatatattgctttttaaaattatgtttttattgcaaaataaaatacaaatatggaaaactacacaaaacctatctatagcttagcgaattactacaggacaaaaccacccaggtagagaaacagaactttgtcagctatcctagaagctccttcaagctgtgtgtgtgtggatggatgtagtttcctttccctcatcccagactattcaggcttagaataacagaggcgatattaaggagaaccacaacccaaggagtggctcctgtcacggccagaacctcgtgagcacagttctttacggcattataatttgctgctagccatagtacctgtgagtgagaagccagagcagtctgaccggatcaggaataggaagactctcaatgtaaacttagtatctttttttatgtttaatacgtggcattaaagaggcaccagtggaattttcaagtgagaagaggtgatagtggtaacaggtttagacctcacacttatgaacaagtcaggattcttgctttgtagattttaatttggratagctttatattacagtgttgactaaagttaaaccgccttgatttgttatgattgtctaataaagaaacttctgatggtgtgctaaagaaatgaagttgaactttcagctgtgtgccctcaagtaaatggttcttttttttttttttttgagatagagtctcactctgtcgcccaggctggagtgcagtggcacaatctcggctcactgcaacctccgcctcccaggttcaagcatttctcctgcctcggcctcccgagtagctgggattacaggcacccgccaccacatctggctaatttttgtattctttagtagagaagaggtttcaccatgttggccaggctgatcttgaactcctgacctcaggtgatccgcccacctccgcctcccaaaatgctgggattacaggcgtgagccaccgcacccagacaagtatatgtttctttactgcaattatggattgcctgggtgcactagcataaaacttcagcctcacacatgccaattctcaagtatatgggtctatgacaattttctaaaatgaatcaagtatcaattgaacattagagtataggaatcattcaaaaggctgattctgaaaaatgaaaaagaatagcttcatgttgatttccagctttttgcaatatcatttacgataactagaaaacactgaatcattctaaaattattatgggaatttgcttaacttcatttaagttggaaaacagatcttacacagccttaacaaggcttctaagtcttgccctttaatgacgtaattgtttagaggtgctaataaagtttcctggacaggccaatatacttcaaatgaaacaagattagattactccaccattttacaagatagcctgcagatgcccacaagatacgtagtagcaaactaagttccattcagtgccaagtaacttgctaatgtcacttttttagaaagaaagggaggtgagatttgttgacaggactactatgggtctccactaaaaagttcctgtcaaaaaataagcattttcacagttccactgtatcagagactacaaagaatatgtgaagcattgaaatcccaacccttcatccagtgaaaacggcttgctctacaggaagcctccatggtagtctcttggggtaaaaagagcgtgggcttttgagtgagacagacctgaattgaaatccaggccctgccacatacagttcatacagttaggataaccctgggtaacccattcaacttctctgagcttaggtttcctcatcttaaaaaaatgaagataataatgccttactggcttactggatgagtcaagatttttttgatcataagtgacaggaacccaaatcatactcacataaaaaaaagttacttattggaaaactatgggaggggctcaaagattccaaagaagagctggttataggagctggagccaaaatagtttctcaaacctcaaggaccaaaaccaaaaatctcagcactgacagtactctttctctctaaatctttatcactcatcattttccatgttggcttcctttcattctcactgtgtagagctgcactgtccaaaatggcagttactagccaaatgtggttactgagtacctagaatgtgactagtctgaactgagaggtggtaaagggtaaatacactggattttaaagacttggcacaaaatatgtaatcatacaatgagtcattaacaatttttattttgattatatgttgaaatgatattttgagtataatgcgttaagtaaaacattattaaaacattatttcacctacttcattttagttctttcaatgtggttactagaaaatgttaagttgcatatgcggcttgcattatattggtactggacagtgctgtctagagtcttttcccacgtgatgagaaacacagcttcttatagttctggactcaattcaagcttacaaatatctcagaaaagaaaaggatttttccttcctacttaagtttgtaaatgtcctaggaaggactctgactgggcaagcttagatcacatacccagttcttaaactaacccctgccaggcagaaggggaactgcactagacagtcctagcagaatcacatggatgaaggagggaaaagaacatgggcatgggatactactacaagaagaaggggaaaagacgtgctaggcagacaaaacaacatacatccactgtgccaccttacagggtggctgtgagatgtcttttattctgaccaatgtctgtctctaaatgctagtggtgacattaagtggctgtaagtcataacacagaatggcacacattagaaaccctggggataaacacttgagatttctacacctgagtgttcatcaaatgtacctgaaccaatgatactaagccctagatgctggaagcttataagaaggattgatttcaaagagcaattggtgaagatctcagctttactctacattgatgtgagctgataatgcctttttaacacaagtatcattgctgataatgcagaagaagttttatgaagcaggtaacaatcctggaaatatgttttttttttttttggttttttttttttgagatggagtcttgctctgttaccaggctggagtgcagtgacgcaatcttggctcactgcaacctccacctcccgggttcaagtgattcccctgcctcagcctcccaagtagctgggactacaggcacgcaccaccacaccaggctaattttttgtattttagtagagaccgggtttcaccatgttgcccaggatggtctctatctcctgacctcatgatccgcctgactcagcccacaaagtgctggtattacaggtgtgtgccaccatgcccggccaggttttttgttttttttttttttttgagatggactcctgctctgtcacccaggctggcatgcagtggcacaatctcagctcactgcaacctccatctcctggattcaagcaattctcctgcctcagcctgccaagtagctgggattacaggcacctgccagcatgcccagctaatttttgtatttttagtagagaaagggttttgccatgttggccaggctggtctcgaactcctgacctcaggtgatcccctgacttggactcccaaagtgctgagattacaggcgtgagccaccgcacctggccaacaatcctggaaatgtttatatgctgttttgaatctactaccaaatacaacaggccataaagtctacagcagcagttctcaaagtgtttgggactcccttttacaagtaatgagaatcatgaagtgctcctatttatgtgtgctatctctgttgacatttagcctatctgaaattagaacacaggtttttaaaaaaaaaaagttattgaaattttatcacgttttcttctagaagttgtatagtttcaggttttacttttaggtctataatccattttgagttaaactttacatggaaatatatatatatatgtcaacaaatatatatatatgtcttttcaaggcatggattgaagtttcttttcttttctctttttttttttttttttttgagacagagtctcactctgttgctcaggctggagtgcagtggcacaatctcagctcagtgcaagctccgcctcccaggttcacgtcattctcctgcctcagcctcccgagtagctgggactacaggcgcccgccaccacgcccagctaattttttgtatttttagtagagacaaggtttcaccgtmttagccaggatggtcgctatctcctgacctcgtgatctgcccgcctcggcctctcaaagtgctgggattacaggcatgagccaccgcaccaggccttttctcttttttttttaaatatagatatccaattgttctagcatcatgtgttgaaaagattatctgttcttctctgaattgccttttgcacctgggtcaaaaatcaattgtccacgtatgtgtggatctatttctgaatattctattctgttccaatgatctatactggtatatttttttctagaccatcatcacactgtcttgattactgtagctttataataagtctttgaaatcagggaatgtgagtcctccaattttgttcttctttttcaaaattgtttaggctattctaggtccttggtatttcaaaataaattttagaatcagattgtcaatttttacaatttctgctgagatttcaacttgctagaattgtgccagatctatatgccaatttaggaagaactgatatcttacgagattaagtcttccagcatatgaacatgacatatccatttgtttagatcttcattagtttctctcagcaatgttttgtagttttcaggataaaagtctttcatatcttttcttagatttatctctaaatattccataattttgatgttattataaatgttatctttaaaatatcaaattttaattacttgttagcctatagaaatataattgattttatatattgaccttgtatcctgcaacattacaaaattcacttattagttctagaagcttttttgtaatttccttaggctttttgacatagtcaacaatatcatctgtgaaaagatagttttacttcttcctttctactctaaatgttattcctttttcttgctttattgctctggccaggcccccccagtactgaatagaatggtgagagtaacatctttgccttcttaatcttagagagaaagtatttggtcttttacaacatcaagtatgatactagctataggattttcatagatgtacttctatcaggttgaggaagttcctttccattcctagattcctaagagttttttaatcaggaatatatgctcaattttgtcaaatgttttttctatgtctattgagataatcacatgatttttctttcttagtttgttaatatgattagttatattgttgatttttgaatattcagcctaccttacatccctgggataaactccacttattcataatgtatcatcctttttatgtatcattcttttgagtttgttaaaattttatttcaaatattgcacctgtgtttatgagacagatgcatctggagttttcttttcttgtaatatctttgcctgatttttgtcatcaagtagtgctgtcctcacagaacaagttagaaatcatttcccctttttcaattttcccaaagattttctatactatttcttccttaaatgattggtggaatttaccagggaggtcatctgtgcctaaagttttcatggtgggaacatatttaactataatagacacaaggctatccaaattatctacttcttcttgaataaactttggtaaaatccgagaaaatttctaaaatgcaagaacacacaagcaaatatggccttggctatcagagtgatgacaccatgtagcctctggaatactccactattcactcatgaggtatggaaattcttaattttattttgaaaatagtttttacctcatgtactctctgaaagagtcctggaaataccagcagtccttggaccatacttgtgagttgctggtctatggaaaagagactaagaatgccaacactatcagtattccaggatcttctgctaaagagtattttcatgaagtactcacatgactttctagggttaacacaaagttgacaaatctaaatcatatcccatcctgcttcaagagagtcaaactgcttatgagcaatcctggaacaaggagaaacaccaactttatttctgggattcacacatcccaactatataatatgatcataatatgaaaacaaatctgcaacagatacaaggaagaaaatggatcttcagaaaaatgaaggaaagagggtagatccctttgtgacattattttgtcattaaactagatcaaggtatgtgtgtactgttaaaatatgtttcaaaatattttataaaataaaaaatccctctcttctagttctgtattaaatgtcaatcaagtcaagggcttctcctatgccaaattctggaaatgtatttataaataaaaataaaaaggaggggcgtgctgggtgacaatgattgtaaaactcagctaagcaaaaagaataaaaccaaaaaacctcagagacacctcagactgctgtatctcaggataagggaggcaacggtaaccagcagccacagaaggcacagggcgggctcgaataatgcttctcaaaccatccacagtgaaggagccgttgttgtttgtttctctctaatccatcaccaactgatggatttgtaaaatacattcaaagtgaattactagaaaaagaaatcttttaaaacacatacaaaatacaaacccaacatttctatcattagattcaacagatatatgattattctgtcagctgcttttaatgtttctaaacgctctcaatgctgtgtttgtttcatcaagaaccaaaactgatgcactttgggtagcacyggctagaaggttctggcacctttcctctcccctactttcccaggttaatcactgagttaagtgaccatgcaccccagctggtatataaaattatacaatgtttatatatatacatatatatatatattttatatacacttcagcaaatctaaaacatgcatcacctgaagccttgatattaagttttctatcaccttgagccctgactatgataacaggtctgcatccagggtccagcctcatttcctccttcctcctctccatcattttatattatgtttctggctgatttctattcctaaatacaatcccaattgtaatactaccctgctcaaaaataatgattaaaatttgagttaagtatttaaggctgtaacactatgtctttaaaatgcccttcctttcttatctcccactactttgtacacaagttctacgttttagccaaactggactgttcaactgttttccaactgtgctactgttgccacctaaaaaaatgcttgttctttctgtctagcttcttttttttttttgagacagtctcactctgtcacccaggctggaatgcagtagcgtgatcttggcttactgcaagctccgcctcccaggttcacgccattctcctgcctcagcctcccaagtagctgggactccaggtgcccgccaccatgcccggttaatttttttgcattttcagtagagacggggtttcactgtgttagccaggatggtctcgatctcttgaccttgtgatcctcccgcctcggcctcccaaagtgctggaattacaggcgtgagccaccgtgcctggcctgtctagcttctctttatcaaaaccaagtctttcaaggccgttccaaatgtcacctcctttataaaggtttttttcccagccaggtgtaatcctctctcaccaacctactaaattttgtacttttcttaataattaagtattatcctaacatgcattacactattatctgtgtagtcaccttacaccattaatcagcttttacctttatttgagttgtaggtctgctgattgatgaaaatggagtaatgagaacagatgacagaaacaaaccggcacaacctgtcaggtgccaggtggcacctttaagatgtgggtgaagaaaactctaccatagaggaaagtagttccagattaaaaaaaaaaaatggtcacctgtagtgatcacatcccataattcctgttagtctcactgtgctatatggttccaatccccacttccctttctggatcataggttgcaaggcttccctcataaacggactgaagaaaatagggcaaatccaaaaagctgatatgaagggattaagtctacacattggcttaggaaaaccaactgcttaaagctggattagtaagacaaggaagtatggtcttctacaaactcaagaagtacgaattaatgttgatgcttagagtcttaataaacactgacctgatcaaccctccctggagttttgtgcttatttttgggcaccacagtttaagagagatgctggcaatctggaacactccctaaagagaagtatgaagatggagaaggacttaaaaacctgcgacatatttggaaagtgcaaaggactaagaatgcctagcctataagttttaaaatacaagtgttgctgctataatatgatatacgcattccttaaaaaattgcattctagtaaattacatactaaaaataagagacttatgaggaaaatatagaccacttaaggcctgcacaactttgtaagcacagcactgacaaaaaccaaagtaatttcagtaaaatattaatgtatttaagatgctatattcccaataataagtgayacaataaataatacagtatgcctccaaagcttgctatgttcatmtgtattagtgtactttgcatttagttgctgtatttagtggtcaaaataattaatgtgctagagaaaaagtcaactgtaagccatagctgcttttgtattatactgacaggcttctactatttgccaattgtgaacgaactaattcatgttactaaagcatgtcctgtagaagaatagactgtacttaaatgacaatcactataaatggggacagggtagcaaagcaggtcaactgataatcatttgagatacacctacattctaaaatagaaattttgaaaaaaagaaagaagcacatcataaaaaaaaattttaaataaactgtaaaacaacaaaagaaagccaaaagaggaaggctctcttttttaaaaaataaattttattgtgtatatttaaggcatacaatctgatgttatgggatatatacagacaataaaaaggttactacagtgaaggaaattaatacatccatcatctcacatagttacccattttttggtggttgtttttatggccagagcagctgaaatctactcatttagcatgaattccatatatggtacaattctataacctgtagtcctgttgcacattagagtgctagacttgttcatcctacacaggtgctcttcgtaccctctgatgtacacagaagatgtatcctacatccccccattcaccactcaccaccacccccaacccatggtaacctctgtattgttctccgcatatatttgaaattttttttaagattctacatacaagcgagatcatgcaatacttttctttctgtgtctggcttattccacttagcatcatatcctccaggctcacccatgttgtggcaaatggcaagatctcattcttttttaggactgaataatatttcaaaatgcatatgtaccacagtttccttatccattcaaccactgttgaacaattaggttgtttccatatgttggctcttgtgactaaagctgcaatgaacatggctgtgcagagatctttatgaggtggtgatttcatttcctttggttatatgcccagaagaggcattactggtagttctatttttaatttctttagaaacctccattgtgttttccataatgggttaccccaatctacattccaagaaactacctgtaacttcttttttccaagaaactacctgtgacttcttcatttttactaagaaaatatatataccattgtcagaattaccataaatcatatttggaaacttaaggcaagtaaaaatttaagttttgaattctacataagggaaatcagaagagaggaaaaattaagtagtaaacataactctgtcataatttcaatgaaattttttcttttttttaacttttattttaggttcaggggtacatgtgcaggtttgttatacaggtgtattgcatgccacagggtttggtatacagattattttgttacccaggtaataaccatagtacttgacaggtagttttttgatcctcaccctcctctcaccctccaccctagggtaggccttggtggctatttctcccttttttgtatccacatatactcaaagttcagctcccacttatgagtaagaacatgcagtatttggtattctgttcctgtgttagtttccttaggataatgacctccagctccatcgctgttgttgcaaaagacatgatctcattgttttaatggctgtacagtattcacttgtgcatatgtaccacatttttttcatccagtctaccactgatgggcatttaagttgattccatgtttttgctattgtgaatagtgcttagttccacagtaaattcaatactttgaaatacaaattaaatgacttaatgaaatcaaaaccatttctattctgcacctgcaccaagctcagaagtgtattaagtaccatcatatttattatctcattaatagtcccaacaatcctgtgtggtaagcatagctatcttagtcagttccaattcccataacaaaacactataaactgcgtagctaacaaaatactataaactgtgtaaaaaacagagagttgtttcttacagtactggaagctagaaagtccatgatcaaggtagcagcaactgtggtgtctggtgagggcctgtttcctagttcacagatggtgccttctcactgtgtcctcaggcctgttagccctctagggcttctttcataagggtattaatcccattcaccagggctccaccctcataactgaatcacctccaaaggtcctaactcctaataccatcaccttggggattaggatttcaacatataaatttgggggaaggtgggtataaaatttcagatcataataatagctaacgtcattttaacagtttgggaaactaagacttggaagataattcagtaaattttatgttactaacagatgatttaaaataagagagaagatggaataaaagaaggaaggttaaaaaaagggtagggggagaaagagaagaagggagacttcaacagagttgaaggtactaatcaaacataaacagagaccatggtataaaaaccacggacactcactgagccaaatccctttacgtatctatttatgatgcaccaggtgtctttgtgaagaaacactcccctccatcatctagaaaagggatccacaaactactgcctatgggccaaatccagcccaatgcctgggctggatttaaaaaaacggtttatcttttactttaaaaataaacgttgttttgtttttgtttttagaaattcatattttttaattgacaaataataactgtacatattcatgaaaaacatagtgatgtttctatacacataatgtatagtgatcagatcagggtaattagcatatccatcatctcaaacatgaaaataaagttttattggaactcagccacactcattcatttacatattgtctgtagctgctttcatgctatgaaagcagagttgagtagttgtgacagagaccatatggcacacaastctaaaattttactatcttgccctttagaggagcctgctggaccctgaactagagtgtatttttccctaagtcctgtctgctctctagagaagggaggtggaacaaggacgaggtactgagcgcagccatgggtccactgcttaataaagaaagagacagattccctgcagtgtaagtgttcagaccatctcactgctttctttgtgattaagtctcaaatgcaaattttggctcaaatttagcaaggataaatcgtcttattacaggagtaaacagcaccctacttttatggcactatcttcccagtactccttcctacttttagaaaagtatgcccactcctatttgattagacagaaattatttcctttaagataagaagatgacggttctgtgtgaattctttatggtccttcaagtaccagacgactattttgctttaaagctagattttacaagagtgtgttaaagcagtctttctctctaaaagctgactattaagtgtgactttactgatttcaaaaaaattccctgaacttaaaagtctcaaattcagaggagttatttaatctgtggtttagagaaaaacttgtaaggtcagcctttgaatttatatattcttatcagaatcaaaggcttttcaatgtttctatcttacatgtgctgaaaaagaattataatcaatacataccaccctaacaagcttgctggattttaaataaagtgaatatctggggggaaattaccagtttcctttctagcaaacatgtaatgctaaatgggcttcaagcatttccaaatagtaaaagacawtgcaagaattcatccacaaaaaaattccagtaacgttaatcagtctaatgttcttctgggtgcagggaatgcaaaatcctcccctgttcctaagggcagatgagaagaatgagaaatttcaaaactctgccaacttattcaatctttaatggcaagtcacaaaatgtgactgtcatacacacactttgttttttaacactcatgccattacctatttctcctaacaatataaaagaatgacagcaccacttgaaatgggcttttccaggcaaaatttcctttaaacttttccaggagagaacattgatataatgatcatatttaagcatatcacgaattaaaacaacttcttaagaaaccttctctatgattacggccgggtgtggtggctcacacctataatctcagcactttgggagacccaggcaggcagatcatttgaggtcaggagttcgagaccagcctggccaacatgacgaaaccccatctctactaaaaatacaaaaattagccaggcatggtggcacatgcctgtaatcccagctactggggaagctgaggtatgagaattgcctgaatcccagaggcggaggtggcagtgagccaagatcgtgccactacgctccagcctgggtgacagagcaagactctgtctattggaaaaaaaaaaaaaagcaaaaaaaaaaccttctctatgattattttggctagtatgctatcatttcagttgtttcttcttaatagtttcacttgatcatttcagttcttcaagtttccatcccatttccaaaattcattttgtcagatacccactgagtacattttctaatcattcatatcctcatgaacaccaacaatctggcctctattctggtcatcctacttaaagtgttctctctactctcaccatccctatcatcctcacaaattcaaatgctttttttcttggttctaattctttcaatggcatttgagtatttccttcatcatgaacattttaaaaccctgacttggccaggcatggtggctcatgcctgtaatcccagaaccttgggaggccaaggtgggtggatcacctgaggtcagaagttcaagaccagcctgctcaatgtggcaaaatcccctctctattaaaaacacaaaaaattagccaggcctggtggcaggagcctgtaatcccagctagtcggaaggctgaggcaaaggaattgcttgaacctgggaggtggaggttgcagtgagccgagatggagccactacactccagcctgggcgacaagagcaaaactctgtctcaaaaaaaaaaaacacaccttgacctttatgactctgagctcctgttgtccttctacatatacgacaattctcttccattggattctccaaattcaggtttctccacagttgtgtgcaaaatttcctccttcaaaaggttcactttggtttcattatcctgcttcttttccaccttgaccttttagcacctctctcattctagctgccaataatcaaaataagatattctgtcaatacctccaaataaacacagtcttgggcaagtaattgaatttctttggacttctccttatttttatgtcaattaagtgaattatccagaaaaagatgaaagagtaggaatttcagagccagaaagaagagcatgagcaaaatgacagcactgggaattctcacagcactggcaggacactgcggatagttgcctttctgagattaaacgcacattttgggaagctgtgtaaaacagcactgcatgggagaatgggctctagaagcagcatccaacaagtaagtactactcattttgagaaacgttacaggagactaacagtaacactgcaggaagattgggaactgaagagaatggggccaaggaaatagctcttaccatgataacccagttataaggggattaagactacctgctaaatgaagtctaaaatcaatctcccagcattcagtatctttccaactttttttcctggttttatctctcagtagtctcttgcaggaaatttctcttgcaacctagattactacctacttcccaaatcaagtatgtccacacagtcccaccactgactgcatgatcatccatccctgatctgttcctcctcccctccagccttgaaaagctatgccacttagaggtctagctaatgcccaaacttggtcataaagattttatgacctaatcattccaatccataacaattttattctttttaaaagcttactgggcaggtagcgtacaagttaacacttaactatttatcagtaaatgttaacttatcaattatattataaggtctctgaggacaatgattatgcttgaatttcttttgttgtttgtctaatcccagtatcattttatggcaaaatcagtacttaggtgttctgcacagtaccgcactcaaaaaccaagccaaactcattctggccactctgttgcagttgtgataagcggctcaggatattgagtggcactgcagttcaaggttctcctgttacccactgggtcatagtaagatctccctgaataccacactgtatagtataaatcaaggaaagtgaagaaaagccttctgccacccacctggtacaagacagttaggttttagagcaagggtcacaaattaacccacaggccatggctacgacatagaagtgttcttgcacagtgtttgtaaacaatatttatcattgctattacttaaaagatagtagtttttcatattaacaacaacatcaacaagaagccctgagattctgggctcctttttaataacatctggatatctggcaacaccagtcccaaattatcaaatggaaaacaactctgtagctgtatagcagctgctgcctttagatgaagcacatacatgctagttcactccagtccctaccatttcctattgtattgtatcaagtcagattcactccttttcagtacttgcctggctctgtgaatatctgcatttgctactaggtttggttagaaagcagactgactataagtaggtagccggctggccaatgtcaggctgaggaggctgctcctgcatcagataatctcagcacacctagatgctctcttccatgttagtgatctgcttagaccattgcatagttacatattcacaactctctgcctatcctaggctcctgaacaagtctagacaccctgaactgaattcctgctttctgcctctgtttggcagagtgacctgggctctgcactgattgtgccctgactgatcagtacagccacagtgacttcagaagaaggatgagaacttcatctcttgtataaacaacctattttagctttttcacactcaattaatttcgctgtagtgtcatgattcagattccacagtagaactaaatttcyacatgcaatccatcaggatgaatgggctcagtgtgtgatattaaataatgccaataaaagtccaagtacttcagtcatagtcaattggttatagccttacttctaacctgggctagggctcactgatttctagtttagagatactccaacaatttagcctacataaacaatatggtcttttcttacccaacaaaaaaaagttaatgttgattttctttgcacggttatatttgccatatccagtatcagcaggaaatagttgctatttaaccctccagttcagtgggataaaacaatttgcctccatatttttgtatgatgctactgaagggattcctagctctaggatttaacttcactgtattctgtataaaactggcttactattttaagtgaccaattcaaacacacatcatatttacaagtaagcctctcctatcccccaaaatactgtattcttagtttctaagcttcttgttcagagaataaaaatgttagtagacaattcaaaccttttctttagctacttttctatggagtatggttttacagaaaacagaagcaaaaacaaaaacacagccttcttagcatcatattgttaagttcactaattctcaggacaaaaataaagacaggaatacacatacagcacttttcaccacactctaagaaaattaagagcagcagcatctaatgactagctgttcgttaagagaaagtatgtaattataaaaccatctttctttggttcagtaactgtagagaatacttgcactttgatcatttctgtaatctcctctttatgctggggaccacgatttctccccataaacacaccagttgagaagttcaggggtacacaactgagcccagtggaacagacataagacagttggtctacgcctgatctgtagagtactaagtatggactgtttcctgctatacagaccacagaagaagaggatttgtatgaaatttctcatctggtctacatgagctcatgctggatttcaaccacctgcaaaatgagaatcctaataaatacagaaatatttttcgtgtttatgttagtgattcatctgaccctttgattaacctcaaccaaaagtgaaattcagactctgaaatcagacttcatcttcagaataaattcactctatcccctgtaagaaccacatatgtttacaatacaatattaagggaaatcatatcactgaatattgaatggctttttcattttaacataaaataattctattagtgggcaaaacaggcacacctggtaatatgaacttatgagtgaatgatggcctcatcacagtgtaatgaaatgtcattgtagcaaatcaatagggtatgcagtctaactccatactactcaatattttcaagttctaccttcccttttatttgtttgaaatgataaggtaaaactatattgatgctggtgaagagtatcctaaccctaggaattcaggaagtttatttttgtagttagactatcaattataggcctagtaattagatgaggagcatccaaatgcaaataatatgtaaagcagctcctaaggcaaacttcctttgaagagcataaccacatgttacaacaactttaggaatgtagatattaaaaccctcaacaagtattctggattgcttctggtgtgctggtaggtttctgtttctgtttttttggctgttgctttgtgttacacaagagtttctcctttttggtcattgttgttttactctttttgcatgaactttaaagatccagaaggacattagtgttgcaatgtagatattttatctatagaagagacatcatttcacagtaatgcaggggttaaacaacattactgttttggcaaatagattccacctttctcttaactgactggcaaggaaaataagarcagcatataaagttagaattcktaaaataaaaatatgataatttgatgctgaagagataaatatgagattatgagccaacaaacatttttttcctttgacccttcaagaatatgagcagaggcaacatcaatttcaaataaacaggaagactgctgaaactgataaggcacagtaaattaaaacaaagcactgtaactgtaaattgtggattatataaatcaggtactttcatatgctgttgaacttgcctctaaatgagctgaaagagagttttaactggaatacatggaggaggtcctgagtatatgctataagggtttcttagaagactgcttactagtctaatagagcatagtaattgccaaaatcaaattaattatgcttggttatcacaaatctaatatatatattttccacaacaggattgtagagaaactgatagaaattgatgatttccattcttatttggactttacaactcttgggtacaaaatggagaactagtcaactggaaactaaaaacgaaagtttaatgaagtacaaaaatcctatgttttacttagcgaaaaagaaaataattttcctctttagatggactgtatagaccaggaacagtggctcacacctataatcccaacattttgggagggtgaggtgggaggaccactgagaccctttctctacaaaaaacaaaaaattagcttggcacagtggtgcacgcctgtagtcccagttactcagaaagctgaggtgggaggatcacttgagcttggggtgagctatggtcacaccactactctccagcttgggtgacagagcaagaccatgtttccaaaaaaaaaaaagatggaatgtattaaaaaaaattccctaaccttttctatggtttatagtttatattctactaagtcatacttataaccattataaaaattaatatctaatattatttattgattagtataatatgcaagcaaacttgtacaaagattctgtcttttctctaggcagttatgaataccattaattctctgaacaacatcaaattaggaagatagaaatttttcttatgctagattgcaattaaagaaccacaagtacaaatacagcacagagggaggccagccaaatctttttgtttgtttgttttttatctgttgttttttgttttttgagatggagtctcactctatcacccaggctggagtgcagtggctcgatcttgggtcactgcaacctctgccacccaggttcaagcgattctcctgcctcagtctcccgagtagctgggattataggagcctgccaccatgcccggctaatatttgtctattttttttagtagagacagggtttcaccatgttggccaggctggtctcaaactcctgacctcaggtgatccgcccacttcagcctcccaaaaagctgggattacaggcatgagccaccgcgcccggccaagggccagaacctcgaaggcagtggctagggtgtttgcagaatggagtggtgactaatattgcatattaggtaatttatatgagagtctttcattccagtaacattattaaataaaagcgatttttcccaaagtttaattcacttataataattttattttaatatggaaaactcacttctaaatgactttcacagttactattttagcttttaggyagcaaaacagctcaatggaacttcatgtaagaaatatttttaatagaattcatcatctgaacaaaatgctgacaaaccartcatacaaatattgagttaaataattacttaaaaagctcacttatattctcatactgaaaatcatatatttttaccttgagaaggtatgtggggatattgctgaaatctacgggcagcttcaaaaggaaacgagctgaaaattcaccagtctgtaaaaagaaagttataataataagattaaaatcaaaaatagattatgaagtgacaattatagccaaggccacaagttcaacctgttcaaaatgcaggcatcttcaatttggttttcctaacgttaggcaagaaaagaaggttggaaaagtaggggaggatcagaaagagttcttaaattattagttactaaaaagcacaatttgagtttttaaaatctgcattttaaatgtacaataaaattataatttagcagaattgcctttttgtttcttaaaagtatgaaaagaatatatgaatgtatgattattatttttttaatcccaaacaataaagacagacctacccctttgattcatttgtttttattaaagcattcagaccacatcactaatatttataaaccacaaggctgatggcatacaccaccatcctttctggatgtacatgcaaaggtcaaacttctacctagcagtgggtattcaaaataagtttctcatctcctgaaagtccactatatcattatcattaactgatgtttttcataactccctccatgaactaatctctataggaaagaggtacggaggtttggcgatttaaaacatttaactaagctataaataatagcttctatttgctaaaacagaaaactcatttaaaagaaaaacgtctgcctctcaatttttatgacaggaaagcctagggaatcacttttttttttttttaactttgtcatagtctagaggaggagttttcaaactagatcatgcagagatctagaggtgctagagaacctctgcaaaggtaacaaagatgcgtcctgacctggtggaatcctcggtcttccatcctgtctcactgcaagtgtgcagctcagcctggtattttgacatggtgtgttttacttagacatatttgaaaaaagaactccagaaatgatccagaactactcagagtggatgtctatccttttaatattgtaactaccaaagagttcccgctctttaaaaaatgagcagcacaaactcccctaaacacatcttaaaacatagcaagcgtttacaaatatttgtatgagtgggtggatgaatgcacctaggcacacatgcatagcactttagacagtttcaccacagcctccactccattctacaaacaccctagcaagtggtttcaaggttctggcccttgcccgggcatggtggctcatgcctgtaatcccagcactttgggaggccaatgcaggcagatcacccacggtcaggacatcgagaccagcctggccaacatggtaaaaccccatctccactaaagaatacaaaaattagccgggcgtggtggcacgtgcctgtagtcccagctactcgggaggctgaggcaggagaatcacttgaacctgggaggcagagtttgcagtgagccaatattgcaccattgcactccagcctcggcaacaagagcgaaactccgtctcaaaaaacaaaaaaggttatggccctaattttaaaactctgatctaaaccttaaaaatacagacagaaatatattgagctctgaagataataataataactaatatctgcctaaatgttgtttgttttaccgctcacagcatcttttaacttacaccaatctctggctaaggacagagcatttcttcattaccataagcctaaccctgtgacagacaaggcggaaatgagaattgaatggacagaatcaaagctgaggcaagccagagagagtgatagaagccactgtgccaccaggaatgccaatggtgagaaaaaggatggatgctcagagctgagtagctattctcagtattgaacgccattatgtgcaggctactcacaactcaacacttgggagaatacttaagagccactaaggatctacaaatagctcatcatggtgggtgggagaaggtttgtgagatcctattataattcttgccttctgttacagtccaagattaccaaaaggtgtggttttggtattatgctgagctcctagatgactctaaaactaacatactctggtaagtgtggttctttggatcaagacacagctaaacctaaaaaggtctgtttttaagtacaaggggtcatactttgaaaggggtaagtgtagaggcaacaataacagcatagagttaaatgggagcttataaaagggacacctagcccagtgagaatctgggagtgtagaaggaaagacagaaaagtcttcccttagcactgtgtacagtgccacagaagaaggaccactcataaaagaatacatgctccaggccaggcacattggctcatgcctgtaataccagcactttgcaaggccaaggcaggcggatcacaaggtcaggagttcgagaccagcctggccaatatggtgaaaccccgtctctactaaaaatacaaaaattagccaggcatggtggcatgtgcctgtaatcccagctactggggcggctgaggcatgagaatcccttgaaccaggaggaggcggaggttgcaatrtgccaagatcacaccactgcactctagcctgggcgacagagcaagactccgtctaaaaaaaaaaaaaaaacatgctcccaacaactgtccacattctctttctcctatataattaatttttcccttctttactcaatcactttcatcagcatataaacatcattttttttatttttttgagacggagtctcactctgtcccccaggctggagtgcagtggcgcgatctcagctcactgcaagctccacctcctgggttcacgccattctcctgcctcagcctcccgagtagctgggactacaggcgcccgccaccacgcccggctaattttttgtattttcagtagagacggggtttcaccatgttagccaggatggtctttatctcctgacctcgtgatcggcccatctcggccttataaacatcatttttaaaatgtttccattcacttcatatccttcttcagctcccatttcatttctctgttttactttaaaaaataatcacctgtaaaaagttaatctatatttgaggtctacatttcctcttttattattttctcttaagccctcaccagtcagcctttccctaccaccactccaccaaaacagttcctcaaggtcaccaatgacctccccattgccaaattcaatgatcatttctcggtctttatcttagtgttctaccagcagcatttgacacagctgatcactcctttcctggaacattctttacttggtttccagagtcccagtttctctacttcactggctctccctctggtctcctcaatccttgaacattggagattggggtatgcctgggcttaactctaagacccttttctttatttacatgcccagatgatctcattcaggctcatgactttaaataatgtatatgctgatgactcccaacttgtgtatcttcatcccagacctttttttaaattcaaatttcatttatccaactcctataaacaaaactaaattcctgattttgtgctcttctcttgatatttattcctcatttcagtaaatggcaattccattctttcagtcacgcaggccaaaaacctagagtcatttttgacttctatctttccctctcacctcacattcaaagtggcggcaaaatcttgttaactctcccttcaaaatatatcctgagtctcccttcaaaatattgacttttggactctcccttcaaaatatatcctgagtccaaccacttttcaccacctctctaaccacctgatctgaaccacctttatctctacgcctggacaactgcaattgcccctaactctgtcagcccttgttcacctgcagtttattctcatgacaataggcagagtgattctttcaacatgtcacttggattctaatcctcgtttgctcaaaactaccaaatggtcaggatttagctcctttacagagtaatttgacaagttaacaattgagcaaagatggaaagagggtaagaaacaaaccatgtggaactgaaggaaaaacaccccagagaacaagtataaaaagggttgatgcaggcgtgtgcctgtgttcaggggatggcaaaaaggtcggggttacaggagcaaataagcactaacacggatcaaagtcacccagaaactctctcctccatggtatgagcaatttctaaacccctggaggatgtgcaacaatcattcataaaattagtgaataagaaaatggctactacatctatgtggaacaactgtgaagttattcctggggatgttgaggcaagcttttaaaaagtaccatgagattcaaagagtttggggaagggaattggagggatgatgataaaccaaactcaagtcatttcttcattttcagtttataaagcaaaccacctaccaataaataaataaccatttctgcctactagtgtaaaatgtcaacctgtaacctgtaaattaaaatgcaatttgaaaacttttaaactcagaggtgtgtatatatatatgcctgattttacatatacatacataaataaacaacaacaaaagtgaaatgtaggattttaaaagttaaaataactcttgtacatataaggtaataggaaagataattacatatttagcacttggactcatttgaactgctagttattttagtccatgcactgcattttagctcttttgccctattttagcttgtacaatgtatttttattctaccagctattttagacccacattcttttaaaaactcttagatgatccctactttattccttctcaaaatgttgatcctagaattaatacaaatttgtgtttattggcaacaggctgatttacacaactaatgtcatactgaaagaaatgttggtcccaggactaatataaatttttgtttatcagcaacaggctgatttacacaactaaattcataataaaagaaacaatactatgaagggaatttgggaaaccataaaaagcactttatgattgccaactttcaagcctatcatacattccttattttgccattggaagaacaaagaaaactcagcacttgtttctgacagcactggaaatgttgaacgctaagactcaagaattcagtttttcggccgggcgcggtggctcacgcctgtaatcccagcactttgggaggccgaggcgggcggatcacgaggtcaggagatcgagaccatcccggctaaaacggtgaaaccccgtctctactaaaaatacaaaaaattagccgggcgtagtggcgggcgcctgtagtcccagctactctggaggctgaggcaggagaatggcgtgaacccgggaggcggagcttgcagtgagccgagatcccgccactgcactccagcctgggcgacagagcgagactccgtctcaaaaaaaaaaaaaaaaaaaaaaagaattcagtttttcattctggcactgattttccttatgacctataagctaatcatcttctgtgaaactgagtacatgataattttaaaacaatcttaatgtaaaattaagttataaactgtaaatgaagagcaaaacaagtgaaaaatccttgttctacctcagataatgacttttcatgtggttttatatttgaatttccaacagctattcaagcaatttatggtcactcagttgtaatgtcaaagattgctttcacagcaatctttcctgtaagctgaaaatgagacatttagatgccgccaagtgaacagaataatttgattttttttttttgtcagtccttggtcaaaatcttctcttggatagatgcagaaaattatctaacctatgactgttaaaatgtcagcctttctgccaactgtcttaatggcaatttccccagcattagcaataaatatgtgcatctttccttttttcaagttatagtacgttggcaagcaacttaaactaacaagactctgagttttggcaatttattaagtctaagctttgcttttggtaatcacagctgtgacagttttcttctccttttagaagtgacaggtagacattttgtgcagaatggagtccaagttcaggttgttctgtaagggaaaattttacttcctttcttagaggcacttcccttgtcaacaaacaagcttttatctgaaattgactgctcttaccacttagacagctaaaagctaagaaacactcaagtgattataactttagctgggtgacaaactggtaaggctgattcttcaaatggactctgaaaaccagtgagcctaaatctggagattgttccttagcacatgcatacatatacactaaatgtgaaaaggaaagtcaaagttagtctaactagaattttataatttacaaaatgttttctaagatatgtcatttaattatcccaaaaccctgcttggtagatacaattcatttatacttagaaatgaaaaaactgaggcctagaacagtcaagaaacttgcctacagttattgagagagtaacaaagagtcacagagctcaacctcaagactcaaggtgtattcatccattcacgagtatgtattaagggcctaaaatgtgtcaggcactccgctaggcatctagtgagtaaaagagacaggaccactgcccttttggagcttatagtctagtaggtgagtcagatatcaatcaaaataatcactcctatcaattataacctgtgtggagaaatgggaatacttaaacactgttagtgggaatgtaagttagttcaggcaggtggaaagcagtttgaagatttctcatagaactaaaaatagaactaccatttgatccagcaattctactactgggtacatacccaaaggaaaataaatcgctctaccaaaaggacacctccacttatatgtttattatagcactgttcacaataacaaagacatggaaactacctaggtgcccatcagtggtgaactggatttttaaaatgtggtacatatacaccatagaatacaacacagaaattaaaaaagaacaaaatcatgtcctctgcagcaacatggatatagctggaggtcattatcctaaggaaattaatgcagaaacagaaaaccatataccacatgttctcacttataagtgggagctaaacactgagcacacacacacataacgatgggaacaacagacactggggactccagaaggagggaggaaagaaaggggacaagagctgaaaaacttcctattgagtactatgttcactatttgggtggcaagatcaatagaaaccaaaaccttaacatcacacaacataaccctgtaataaccctgtacgtgtaccccctgaatgtaaaatacaaaataaataaaataaattataacctgtgataaatgctatcaaagggcacagtgctctgagagcaaattccaggaggaaatgaaccatctagggttgggggctcattacttggagggaattttttttaaagctaagtcaaaagaccacatggaaaaataaataacaccaggcaggaaaagtctaaagaagaaaagcagtgagagggaactgtacataaagcataatttttctctggttacttaagattttctctttatgtctggttatcagtatttttactataatgttttgttttagtttttccttgcatttatcccagatggggtttgttgagcttcttgaatctgtaaatttctgtctttcaccatatttggaaatgtgttattttgtcaaatactttcctgccttctccctttctcttccccttctaggactcccgtttcttatatattaaacattttgatactatcccataatatcaaggctctgctttcccttcttccaagtatcaatgtccatccagtatctgcctgctttgatcactctctagtgttttcaggcaaatggctctatattttgctcggagctctgagctgttgtgaagagttaggtcaacaggagctacttggccgtgacaaaaagtgcaacttgacagaaatctacaaatattttaatatactgttgacaatactgtggagaaacaaccactttcatatattgctgctggtttaataaacctgtataaactttatggaagttactttgacaataaaattatgaacacataatctttgatccagtaattccacttctaattatttatcttacagacatacctgaacacatgcaaagtgacatatatacaagattatttattacagtattgtttgtaatagcaaaagattagaagcaaacaatatccaataatagagttcagatgtaataataattcaattatacaatgtaataatatacaattgtaaaaaaagaatgagggagttctatatatgtttatacagaaaaaatctctgagctatattgagttaaaaggaagatccaaaacagtgcataatatacgttaccatttgcataaaaagggggaatatatattagtatttgcttatatatgtacaaactaactctgaaaatctatactagaaaaaatttatattagtgcttacctggacaggaggaaagtggtatgatttgggtggacaaaggacaaagatgggagggagacttttcactatattactttacatagactttgatttttgaataatatgaataccttatccattcgaaaaaattttaaggaatttaaaaaaaactaaaagcgtatataataaaatgtccacaattcatgcattattcattcattcattcattgaacaaatatttactgagcacatactgtgccaagtactaggctagataatggagaacttaagacaaaacagtctatgtgtcctcaaggaacttaaagtctattttgactagactggcaattaaacaaaatagtacgacatggtaagtgttttgacagagatattcacaggacgctttggaagtaatttaatcgggacactcagtttccagtgacagaactccaattcaaactaatttgaacaaacaaaagagaatttattgaaaggatatgagggatctcatgaaacctaaggataaaaacatagcatggcctcagttccaaggattctaatacccacagaattttctcttagtctcttgtctctgctgtctctgtacttcattttcctttctatttgccagcttctgattcttttgaccagatgttattagaaaaaagttcccagatttacatgttacagaccaattactcatacagagaccaatctcactccctcagtactaactccaaattcccagggaagaattctgtttggcttaggttaagcctccctgatctaatcaacacatttccacagttctttgaagtaaataagttaatggtaccatgaattcttgaaaataattgaaaaactaggaaactcttttctgaggaaggaaacagcttgcatcatttgtacatttccgaaaacaattttttaaacaccttaagagttttcgtacagaatacttgaaatgtaggattctttttgtcttttgccttttagtacatgaaaaaaaggcattaaaacccgcctcagctggtccttggacaacacttgtccatttccttcatggcgataacactgtgcaaggagtgcaccctacatctaaatggccaccaaagagatggggcaatgcacccatcagttcagaacaaatgagtggcctcacaaagataagtaagggggcgcaattagagtccttcctcacatgctgttctgaaaagtataggcaaaggaaatggaaaggatttcctttgtgtttcgtatgcttcctgaaaataagatcttttccacttgatgcatcctgctgctgaaagtaacttgaatttcctactgatacctctactatttaaaaaacagtaacagagttcctttggaatatcagtatgattttaaaagttataatctacacctttaatattttgaggtataaagtaatttaggtatccacacactactttttattaataaggttaaaaaccagaaatataagctattgtaagcaagatcttaagtatttccattgacatgcaagtcaaaattcagtacaacaaattccattacaaagacaattaaaaagggagacactgtcatggttcatttattttacataatgtccaactcctaacagttccgtgtggttaaaaacaaaactaaacaaatatggtcaattccttggagtatactgtagcatatctgaccgccacactacacccttttcaaaggagccaccacatgttaatccccatgtcaaatgccatcaggacataactcccaagcagcaaaaattaaagggagattataggtgaaggtccctgcatgccctgctatatatggctgactggcatgaccagagcacctactacatcctcatgccagtaggggaaaggccatccacttccaggctccccagatatttttatctttctcttagcaactcttgccctcctctcctatcacgctagaccagtgctgtctgaaagaaaaataatgcaaagtacaaatgtgagccatatatataatttaagattatttaacattttctaatagtcacaatttaaaaggcaaaaaaagayaggtgaaaagctaataatacatcccaatatatctaaaatattagcatttccacatgcaatcaacataaaaatcattaatgagtttttttgtactaattcttcaaactctggtgtgtatttcccacgtgcacacatctcagttcagactagccacatttcaaatgctcgatagtcacatgtttgactagaagctcctgtattggacagcatagttctagacattttcccattaacgttaatcccgacattaaggtaaacactccctgccacaaatacctaaagacctacgtaagctgccaaataccataaacctgaaagattcctcacaagcagattgataaatgtcagcgggttaatgggaatgaccatgagacagcctcttttagccaatatcttttttctttttcctccaaaaactgtctaaacctattgcctttccttcctcttctccacctctctgcctaattctctgaaatctgttttcccatcctcagaagtccatcagaactgctcctggtaagataagcaacactctctttttctgattttcacttttaccttgctctctacactttatctgcaccttggaggtcacagcctctattggtcacatatggtaactttatgattaacagcattttgagagatcctacaggaacaatcattgaagcggcacttattgagcacctgttataataacttacaacaagaatataccaaaaaaagctaatagtaataataacactttgtattacttgactccatatttacttaactctctgtttcccacacaagatctaatttaatctttgtgtcaaggtccagacaacaatgtagttatctccaggaaagtgacacatggaaaaacctagagtcacacaaaaagaacgggtggcagaatgaaaacccaaagctcctgccccctagatcactctccctctccaacacatcttcaaatggcctctgtgtagaggagctcacactcaaacattgctcagatactttccctttgcacatgatattgcagcacgatgacatgagggaagcttaagacattaactcaagtgaggagataccataaaatggctcctttcttttctccacaatatttttaatgttgccagagcttaatggataagccaaagatttttaaaaccttactaggatttgggtcagatacaagcaaaaaaggtaaytgtctcacatccccattataaaagcataaatcattattaaggaaaaaatatgttgcttaaaaaactgttttctctcacagatcacccattgatgatttttatatgtaaactatatggttttggaatacctcaaaacttacatttcatatctcaaaaaaaaaaacactttaatcaaaatgttaggtatgataagccaactttaagttctggaaatcaaaacaaatcaaaataaaattcacaaatttgcttattgtgctttgttgcaattaataaacactgtgtttgaatatctgtcctctccaaaactcatgctgaaatttaacccccaatgtggcagtattaagaggtggggcctttcatgggttactgggttaatggattcatgggttatcataagaggggaactggcggctttacaagaagagagagattgacctaagcgagcatgctagcatgcttagccctctcgccatgtgatgccttgcaccatctcaggactctgcacagagtccccaatatcaagaaggctcttatcagatgcagcctctcaacctaggacttctcaacttctataactgtaaggaataaattccttttctttataagttattagtttcgggtattctgttgtaagcaacagaaaatggactaagacacactggttcttctgatacacacatccatgacaaaaatgttaacaaggcaatataaaatagagataataaataataataatagtggcaatataaaatgaaaccttaggatttacccattgagaaaatgtatgatgtatctttttttgatatatcaaaacaggatatatactttcaatagcagttcttacattatgggaattcgtcactttaaaattatgatcttaaaaatagctctgctcaaacgggtagcagtagagatctttgtggtaatggaatatctgcatcttgatttcaatagtgattacaggaaattacgtgtgtgatgaagtggcacagaactatacacatacattgtaccaatgtcaatttcctggtttctgtatttttttatagttacagaaaatcgaaccactgggggaaactgagtgaaggatactcaggatctctactttgcaacttcctatatatctataattatttcaaaatgaaaatgtttacaaaatataaaataaatacacttttaaaaaatgactccgagcatgcaggcagaaaagtcttcttcattcttaacattaagcttgcatcccaatatgcatctgttttcacctgtttagagaaacaggggtttcctaaacattatagttttataattattattactatttcttaaacattataaaaccagcatagacaaggactacaatgtctaaaaatcattaaaagagatgagcaaagcaataaggagaaacaatttggtaaaaatacaacggtaaagaattagacaataaagaatgggttttttttggttaatgtttactttcaaatgtgtgcttgctcaaacttctaaatggaggttcagggggcagggagaaragtgtctgcatagggtggggagaatagtgtatttcaaattcgcagacttgtcggaagactgatagtaaatcagagcccttttcctcttctacatggtaacattttcctcatgccagctgatagtaaaaggaagaagcatatcaggtttttcaaagcctcatacttttagagcaggaatgtttttaagaatataaatgtatgtggcagaaagaaaaattcagtgatgacaacagtaaagaccatcctctctaacagatacagacctgcataatgcaaagggattaaataatcattcctagtcttagattctttatagcaagcatttatcagatggactacttggaccagaaaaaactaaaatacttgaatttccattcagatcaggaagaacctattgattcttataatgtttcatttagagaatatactattttcatgttttaattaaaaaatatccatttatttcatacaaaaatgtcctcatgctgcaaaatgccactaagacataatagatgtgttttactgatcagtargccagttgaatatatgcttacaattctattccccatatatgtcatgtccctaagttttccccagtcatacaacccactgaacatctctcttgagagagccatctacgtccaccttccttcagggtctagctcagttggccagtaaaggctttccttggttactcccttcctcagtgattgtctcttctgctgaatgctcacacagcctgtatattccatttgagatgtaatctatccagtattgttcaaattcctcttttagagatacagattaaaccttccaaattggattttaacagtctcaggagccaaggccatatctgatctactttatttttttttaacccaaaacctagcatagtagactttccataaatctattagtcccatactggctgagccctactaaagtgcatcttgttagtttggtgcagcattccagcacacaaaaataatttttaatgttgattctgtaatcttgcacaatagctatcttttcaagctctgtgctagcagaaaaaagaaatgcatactttgtatgggttcattcaagtccctaacaaaacccttaacaagacggggtcaaaggaaaagccctgtgacattccacgaaacacctgaggctggtaagagttatacccaaacttttaggtggaacgcttccacagatcccaacaactaagaaaggagcataagtcagtggaatcctaagagagaatgaccaagtgcctcgctgaaaatgagatcatctaagtttatgatactacccttccttaaagaagtaaactaagtttgtcatgacagtttcccagttacccaactatttttccaattgactactgcatttttattttaatgtttgcaaatcatctacttaaagatctgaacttaatttctttaaaaatctccaggatgttgttatttataacagtcttctaggatctttctgcttctctaaaatttctcaaagataatgtcccagagagcatatctgcaagtttctttagtaccctgaaacggtttcctttagagcttccagaaggcatgcagccttgccaaccccttgattttggccaagggagacccattttggacttccgccctccagaactatgacataataagtctgtgttgtcctaagccaccaagtttgtggtaatttttacagcagcaataggaaactaatacagtccctgattcaaaaaaatcttggctcaaaatcaagctcctttctttctgccagggtccagtgtttatctccagactcttggtctatatttttcctccattagcaggctgtcctttaatattcctgaaccctcatgccaagctctaatttgttcatccctcaagactcacttttataccctgtttcttgatcttccctgattccaactcatagttttacttctacagactcagctaccatttctactaggccttccctaggcctggtctgctgtaagctttgccttgttacaggattctcagtttctttacttcacttgaatccataaccattgccctaatgtttacaaactacttaacatcaaatcaaaataaactgagataagtgtagcagtagtaggttttgtaagtaaagaaaggaatatcggtaacattaaacagaaagtttaaaaaatactataaatacaaactatctgcttgaaatgaatttaaacttctacacctagatgaactacaactcaagtattagctgagccactgaataacattttgaaaattattaggtaacaaacggtgccataaaactggattatattcaaattcactattattattaaaaaagggggaatgagacaggaaggcaaattctaaaaaccaaagactggttagtttgacagcgattcctgttttcagatgagcctgtcagcactaaagacaacacatgttcaccaagaattaacctaacacccatttatgtaaggacaattaagttgattatttaataggaaaatgctggggatagaggctaaattaagttcaacaaagttttccttatgagccatataaacatattaacatttcaaaacaatccatagtttaagtctgaaccatgcactgttgatgggaatgtaaaatagtgcagcccttaaggaaacagtatggaaattcctcaaaaaattaaaaataggattatatataatctagcaatcccacttgtaggtatatatcccaaagaactcaaagcagaatctcaaagagatagttgcacacctatgttcaatgtagcatgattcacaatagccaagaggtagaagcaacccaaatgttcactgatggatgaatggataagtaaaatatggtaaatacactcaattgaacactatgcagccttaaaaaggaaggaaatcctatcacatgctacaacattgatgaacctcagacattatgctaagtgaaataagcagtcacaaaaaaacaaatactatacaattctacccatatgaagtatctaaaggagtcaaaaccatagaaacataaaatagtaaagtgactgccaagcgctggggggaggaggaattagtgtttaatggcttcctttgcaagatgaaaaagttctagagatctgttgcacaacaatgtgaatatacttaacactactgaactgcacacttaaaaatagtaaagacggcaaatgtagtgttatgtgtcttttactgaaatataaattcaagactttacaaaaggaaaaaaaccttgaactgaacaaacaacttgatttgtaataagaaaaattttagtcatgctgatttgaaggcattaatcatgtgtaaaaccttaaaatcataacctttaagaaaaagccgaagaggccaggcatggtggctcacatctataatcccagcactttgggaggccaaggcgggtagatcacctgaggtcatgaattcaagaccagcctgaccaatatagtgaaatcccgtctctactaaaaatacaaaaattagccgggcgtggtggcatgcacttgtagtcccagctactcaggaggctgagagaggagaattgcttgaacccaggaggcggaggttgcagtgagccgagagtacgccactgcactccagcctgggccacagagtgagacttcgtctcaaaaaaagaaaaaaaagaaaaagaaaaagctgaagaataaaagccggagtgttatttagcctaaaaaagacagggaaacctaaaagaattagcagagaagagcacctaaactttttctgtgcttaatgagagtttattcattcattcattcattcaaaaacgtttatggaataccaatgaagtggaagacactgttccaggcgtttgtgatttaccagtgaacaaaacaaagatccctgccctcatgagattttacattccaatgaagacagacacacaataaacataatcaataagtatggtaggctccctctaagtggctcccagcggtctctggtattcacattcctatgtaattctgcgtgtgggtggcggggaggggcggggggtgtaggtgtgttgggagggtgggatattggacctaacaaatagaatacagcaaaagtgatgggctgtcactttcaagattaggttataaaagactatgacttctatcttgctcacacactccttcttgctctcccctacttgcttgctctgaatcttgtgcactgccctgtagagaggcaaggagttgaaggcggcctccagacaacagccagcactgaactgaggccctccattcgatggcccatgaggaactgaactacgccaactattaaatgcatgcatttataatgactccatctccagtcgagccttgagatgaccagagccctagccaacacttcaagcacagcctgtgagagaccctgagacaaaggacctacccagattgctgccaaaaactatgataataaatgttattgtttgaagccactaagttttggaatgattattttacatagcaacatataactaatacattaattatatggcatgccaaaaggaaatgcaaaaaaaccatgtggagcaaagtaaaaaatagaggagaggtgcaagtcttttttaaaaaaatgtttaaacaatgtaaaaaacaatgtttaaaaggggtattaccaatacttacacacgaatgcttacagcagcattattcataaaagtcaaaaagtggaaacaacccaagtgtccattaattggtaaatggataaacaaaacgtagtatgtctattcaatggaatattattcagccataaaaagaaatgaagtactgatacatgccacaacatggatgaacctcaaacataggctaagtgaaagaagtcagtcacaaaaaccacatactgtatgattccaccataagaaatgttcagaaaagaaaactgatagaaacagaaagtagtttagtgattgactagggctggaggtgggaacaagattaactgtaagtggacatgagggatctcactggggtgatggaaccattctaaaactggataatggtggtggttgctcaaatcagccaacttattaaaaatcatttaactgtacacttaaaacaggtaaatttatgatatgtaaattatacctcaaaacggctactgggggtgttaacatggcatcattgagaacataacattagtagaagtttgaaggaagagtattagccatgtgcatatctgagggaaacatctctgacaacagagagcctatgcaaagacccttgggcaggagaatacctggtgtgcttgctgcacagcagggtgccagtgtggctggagctgaatttgaaagaggaaggtaggagatgaacagacaaaattaatgatggatggaagatggtggtgatgggaatcatacagagttttgttttttctttttttggggtttcttttatatatatatttatatatttttatatatatttatatatttatatatatatatttatatatattaatatatatttatatatatatttatatatattaatatatatttatatatatttatatatatctatatatatataaatatatatatctatatatataaatatatatttatatatatttatatatataaatatatatttatatattttttatataaatatatatttatatttttttatatatttatatagatatatatttatatataaatatatatttatataaaatttaagttgtgggatacatgtgaagaacgtgcaggtttgtttcataggtacacacatgccatggtggtttgctgcacccatcaacccatcatctacatcaggtatgtctcctaatggtatccctcccctagcctcctccccaccaacaggcaccggtgtgtgatgttccccttcctgtgtccatgtgttctcactgctcaactcccacttatgagtgagaatatgccatgtttggtttcctgttcctgtgttagtttgctgagaatcatggtttccagcttcatccatgtccctgcaagggacatgaactcatccttttttatggctgcatagtattccagggtgtatatgtgccacattttctttatccagtctatcactgataggcatttgggttggttccaagtctttgctattgtgaacagtgctgcaataaacatacgtgtacatgtgtctttatagtaaaatgatttataatcctttgggtatatatccagtaatgggattgctgagtcaaatggtatttctggttctagattcttgaggaatcaccacgctgtcttccacaatggttgaactaatttacactcccaccaacagtgtaaaagcattcctatttctccacaacctctccagcatctgttgtttcctgactttttaattatggccattctaactggtgtgagatggtatctcattgtgattttgatttgcatttctccatatagagttttttataccactggaaggactttggcttttaccatgagagaaaaaaagagaagtacataaggttctgggaagagaagtgataaggtctgacttgattttttaaaggatcatataattataagttgcaaaaagaaaatataaaaggcaccatgtaagctagctgcttccagagttactgacctctcttacctgactgggatattggagaagtcttccactcaaaggagggggaaacttgttagtgtctcaaaatgtggcctgcaagccacatacatcataacaacatggaggctggtagcacgtgcaggccctcaggctccacctctgactgctgaatatctggggctggggatgagactctgaatcttacaaacttcccaggtaatatctttgagaaacacaatgaactagacaaacattaaggtctctttaaactctaaattatgagaaacatataggctacctggaccatgtttatctaaagaaatgactaggatttacaaatggacatatgaattgattattttattatggatgaagtcatctttttttccattctcaaaaatccttacccagttgttttttttcccagcataaatttccatgttctctccatactgtggctcctccagtaatgtctggtattcaaacatgaggcgggagctctcccggaggcggctacattggaattggtgatattgttgcacaagttccttcaccacaagtaagagacattcaggatttgaaggattccaggaggcaagattctgtagaagtcgtaacaaataaaagaccagttaaaactgaaatttcatacaaatccagtatcacattcacacatcaatgtagaggaaaagagtaatagaaatctaagaggaacagactactcctccttagccatatacccagagatgaagttagagaaatcttttgatattggcaatttctcctgccttctaaaaaaatccttgcagaaaaattgagaaggaattccatcatgaataggcagaaaaagtgaagtgtaaagccgggtagtaacaaaacaagaaacctaaatatcctagaagaccataattttagccctggaagacttaatttgtttcttattcttttataattttaatttttttgatctctacctaaattcagcattatatgctaaagtaattcaactcagatccacagaccatctgtatctgtaataccagatataaataaacgctctgtaaacactagagcctcacagaaatataagcacaatggtgacggttaggcctgaaaaagataggcataaaatagagacatgggaaaatgtctgccaaatgcgcaaatctgaataaccacagttcatccgtcagtcactcctccaagtgaaaaaggatggttccaagaaaaaagcagctagttcagcttggaactcaatcacactcaggattttccttgagacaacgtacttaggtatgcagtagtcctccatgtgtactctcattgtgtcgcacagaatattgaaagcatgtgtactcaagggttatgactttataaaattcatagtttttgttacttcatcaaagacttttttttttttttgagatggagtctcgctctgtcgcccaggctggagtgcagtggtgcgatctcggctcactgcaagctccgcctcccgggttcacgccattctcttgcctcagtctcccgagtagctgggactacaggcgcccgccaccaggcccggctaattttttttgtatttttagtagagacggggtttcaccgtgttagccaggatggtctcgatctcctgacctcatgatccgcccgcctcggcctcccaaagtgctgggattagaggcgtgagccaccgtgcccggccaaagacattcttaagtgaactgtcgttgtttttttaactgagtatgtgtgacaacagagaataaaataaccatgagtatagcttgacgtctgctgtggttaatgccaagtcatcagttttgcccaccactgcttctgcaacgtaaatgcaaacattaacactgtaaaaaagatgccataatatcttaataagattatgaaaacagttttgactttgcagacccctgaaatggtctcagggatcctcagaggtctgcagaccacactttgagaaccatcaacactactttatattgccttaaggacaaaccaagcatagcttctaccaaaagaaaacaaagaaaaagtaaaggaatgcattttttaaaggaattactttgctctactgagtgagttgatttataggaactaaatgacaatggggaaattcataagtgttctttcatttataggaaaaacgggtcttaggatgttcagataaagatgatgaacagaggaaaaggtaagagcttcagcatcatacagtgaataagaggggtatcttgatatgaaagtgatttgataagtaaagtacaaagttttccctggcaaatctgttgacctcaatagccagaaactccttctgagctgttcaagactaaattcaaagtatcagtaggatataacagcaccgtatagaacttaaaatgatcctaacatagcttgctatgcatttccttcagagagcattgctaaacatttataagcaagaataaaatacaatatttcatttcttggtcaagtattccttaccagtcctcattccctactagagcaaaaagaaaagttagttgtcttgatttatattttttaaattctgtcatttctccttagttatttggcaagttacaggcctatatccaaacaatttttaaaaattataaaaacatataagttggcaacataccttaccaacttgaattcatttcaagtgattcaaacaaatggttaaagacataccaaccagtctccttccattaaaatataatttctttattgatctccttagccattcaaggcaaactcactggaaaacactcccaatcaaggatggtttagctatactaaacaagataaaaattcctctagtattgctacacgaccacttttacttgttaggtaatttgtggtttgaaccactttgcctagaaggggagaaaacagaagatatataaagttttagttactccctaagaatagggcatattttaaaaacaggtctggcaatacaaggcattggagctttccattctcttgagtaggagatacagaaaaatgcccaaagctccttcagggaaagaggaggaggaggcataagttagcaggcatctatgaaaaagagaaaaataagtgtttctctctctattcacaaagttcttcttctacatctttttggtaatgcttgaaggaagaaatctgaaatgaagatggtcacaaagagtaggcacagggcacatcacatattaacagagaaaagagcatacaaaaaaggattccaaaaatgaggaatgaaaaacgcattcagagaaagtgataaaacacagtcaaagaaaataaacaaaagcaaaagaaaattcactactattttataatagaaacttcattcattctcacaaaaacacctatgaaacagttcagggaaggtatcacgccaattctttttaaagactagttaactagagagattaaataactgctcacattcacgtgtaaacaataattgagactgtgtagaatgtaaatctgcctactcttcctccaatcagttaactaaaatatcagttttgaaccaacgaactggcacttgcctctttgtggtcatgagcgaactcatgaatagtggtaattttgaattgtttactttggctcccctgtctaggctgcctgacaggaccagtgctccaagttcatgtgacccctcaccttcccacatttctctctcgtaaatacactccatcacgtacctatgtgctcccatatcaatagctccgcagacttgaacaagcccaaccaatcctcagagctcctccttatcagagcttccttcttcagaaagacagtgaggaatagtagtttcaaggcctagctcaccctcaattccggttccacttatcaaaacccatagttttttggccacagtgccacaaatttagacatgcgcgaggatacctataaacggaaaacactgagaaacaatgtagtctgtccatgtctgtggggagataaaggaggaaactaagcaaatgaagaaatgagacttagaaccatctctgcttaaaaagggagggaaaaaaatcttccggggggaaaaaaattatttaatgaaattaatcttatgataaaaatgttcaactaataaaaggataaggtacaggaatacattagaaatataacaagaaaattatcaaaaacttcttactacaaaattttgcccaactctctagcatatcgataaaataaaaggaaattaaaagagactgacaatatatgaaaagtatgcaagcccattagtgttaaggaagtataattttcctaatttctcctttttaataaactaatttttcattgaaaaagtaatatatgcacacggtaaaacgaatattttttaaatggcataaaagaatgtaaagaacaatattaagtctccctccagcctatattatgagatcttctccctagagaagatactttcccccacacagggcctgcacacgacaccaatgtctgacccttcctaagttcctccacatgacccatggctctgccactctatgctgcctctcccactctttgaagctccaaacactgcttccatggtgcatgcttccctcagatcagtgtcttactttcaacttattatcctgatagtgcttcagctccacaaattgtttctggctcccatggaaccctctgatttggcctgtccctcacccagcatttcccacaagagaagaaagttgggcaaaaattatgagaaacaatgtttatatcttaaattagtcaagttctttttttcagcaaacagctaatgttggtgaagatataatttcatggaccttttacacaaggaattgtaaactcatacaagtagtttgtgtgtgtgtgtgtgtgtgtgtgtgtgtgtgtgtgtgtgtgtcagagagacagagagtcttagaaatgtttattctcaatgcctctagaaatcttatttctgggaatctagctaatctgcaaataactaaaaataacgggggggactttatagacagaaatacacatagagtcatttgtaatatcatgaaactgcaaacaatctaaatacctgataataagaactgttttaaaaactgttaaagtaattcaaataaataatctgcaactatgtttctatactattacagtatgtttatacaattatatatataatttataaacaattacaatagcacagaaacaattgcaataacacagaaaatacttttgttaaaacactaaatgaggagagatataaatctatatatacattatgattacaacttggctatccccatcccctcccaaccttccacagcaaaaaccatcttaacatggaaaatttattgggagaaatgttgataactgatatccatagttgggagctatttaaaaaagttttttgcttcttcctgtttttctgtattttccaaattttctgagtgtatatacatgcatatgtatgtatgcatatataagacatgcacatactttcataatggaaatataacttttaagaaaacataatagcatacttcacatcttttatttcacacttcacatatttcatttctgtttttcaatctcaaagtttaagaaattccatttgtcatttatacattttatgacgtcagactccaattgtctcttctacacaactaaaaaagttagccagtgccataaccgtctggaaaacaaatcttgcatcatttggccctaaacacgtatgcttcaagtaactttgaatttactatttcttaaattctgagccttgcagaacatttccagaaagctaatgcaacatgctaaagtgtagtggtcacagttgaagcagtttattgtgctttccttagccaaaactcttttgtgttgcattcatctaaatgcaaagtcttactaagcaaaaagaacaaatctggaggcatcacattacccgacttcaaactatactataaggccatagtcaccaaaacagcacgttactggtataaaaataggcacataggctaatggaacagaatagagaactcagaaataaagccaaatacttacagccatttgatcttcaacatggccaacaaaaacataaagtggggaaaggacaccctattcaacaaatggtgctgaaataactggcaagccacctgtagaagaatgaaactggatcctcagctcttaccttatatgaaaatcaactcaaggtggatgaaagacttaaatataagacctgaaaccataaagattctataagataacataggaaaaaccmttctagacattggcttaggcaaagacttcatgaccaagaatccaaaagcaaatgcaacaaaaacaaagataaatagatgggacttaattaaactaaaaagcttctgcacagcaaaagaaactatcagcagagtaaacagacaayccacagagtgggagaaaatcttcacaatctatacatctgacaaacaactaatatccagaatctacaaagaactcaaacatatcagcaagaaaaaaaaaaatctcattaagaagtgagacacgtgcacacctatgtttattgcagcactatttacaacagcaaagacttggaaccaatccaaatgcccatcaatgatagactggataaagaaaatgtggcatatatataccatggaatactatgcagccataaaacaggatgagttcatgtccttttcagggacatgggtgaatctggaagctatcattctcagaaagctaacagaggaacagaaaatcaaacactgcatgctctcactcataagtgggagttgaacaatgagaacatatggacacagggaggggaacttcacacactggggcctgtcaagggttggggggtaaggggagggagagcattaggacaaatatgtaatgcatgtggggcttaaaacctagatgatgggttgacagatgcagcaaaccaccctggttcatatatacctatataacaaacctgcacgtcctgcacatgtatcccagaacttaaagtaaaatgttttaaaaagtggactaaggacatgaatagacaattctcaaaagaagatatacaaatggccaacaagcatttggaaaaatgctaacatcactaattatcagagaaatgcaaatcaaaaccgtaacacaataccacttcagttctgcaagaatgaccaaaatcaaaaaataacagatggcgtggatgtggtgaaaagggaacacttttacattataaaagtaaaaaaagggaatgtaaactagtacaaccactatgcaaaacagtgtggagattccttaaagaactgaaagtagatctaccttttgatccagcaatcccactactaggtatccacccagaggaaaagaagtcattatatgaaaaagatacttacacatgcatgcttacagcagcacaatttgcaattgcaaaaatggggaaccagcccaaatattcatcaatcaacgagtggataaagaaaatgtgatatatatcatggaatactactcagccataaaaagtaatgaaataatggcattcgcaacaacctggatggaattggagactattattctaagtgaagtaactcaggaataaaaaaacaaacatcgtatgttctcactcacacgtgggagctaagctacgaggacacaaatgtataagaatgaggacacaaaggtataagaatgacgcattggactttggggactcaggaaagggtgaggatagcaagaaataaaagactacacgttgggcacagtgtacactgcgtgtgtgatggatgtaccaatctcagaaattgccactaaagaatttattcatataaccaaacaccacctgtttcccaaaacctactgaaatacaaaaattaaaaaatttttaaaaacctgtacacaaatgttcatagtagcatattcctaatagctaaaaagtacaaacaacccaaatgtccatcaaccaatgatgaataaatacaatgtgtacacacatacaatggaatatcattccacaataaaaatactgattcatgctatgacagggatcaaccttgaaacattaagctgtgcaagaagccagacctaaaggccacacattgtatgaatccatttatacaaaatgtctacaaaagccaaatctatagggacagactgtaaattagtggttgcctagggctggagacttgggggaaaatgaggactgctaatgcrtacacagtttctttttgggaatgattagaatgatctaaattcactatggtaattgatgactgcacgactctgtggatatactgaaacaactgaattttatacttcaaatggatgagttacatatcaattagatctcaataaagctgttgaaaaggaaaaaagtaaaaatctttctacaacttagtaatagtgcattaggtaatttctaattttaaacttctaatgtctataatcatgaataaattatacagaatatgcagaaaaaaataaaataaatgggaagtcttaggaaatcaccaacaacattttacatttctaacaaaactggaactgaacaagcatgattttttaaaatgtcactccatctgcagaataccaaggataacaacaaaaataaatttgctattgacctatttgtaagaggaccaagtattatcagcaataagtgtttacaccgtacattttgttaagtatgtataattcctctaatatatcatctaaaacaattgaaatgaaatcattttaaacatattttcctaatttcttcaaatataacaatttccaaattttgtaaagtcaagtggacataacatgaatttgaggatgggagaaagagaagctggattaagaaaaactaactttgggactattcagagcaagtctactccttcttccatgtaaatacccttcaaatatttatagtcatgtggctaacaaaaaaaggtaacacagcactgccaatcacatcccttatggttttaacttgcagattatattttgggattttgttcttgataaatttcaactattacgaacaaaatgaagtggagacaagaaagaatatcacagtagtacccttcaccactacaaattgtagcacactgatagaaataaatattggtaaggcaaaaaaattaaacagggtagttctgtgatcctccatggctttgttttcaaatattctaataattctcttcccccttgtaagcagagcctatagagtctgatgagattgttgctatgatgtttgaagctgttcattgcagtctaaaacacagtggattctgggatgtacagaagttaattagaaagaaatgcacctgcggcgggcccgcttcggccatctctccrgcccagtttccctcggcgtgcgactgtgtgctcagcccagcaccatgggcaagtgggacaaatgggtagcctatatgaacccaacagcaatggcgagatcaaggggtccaatccagtcttcagggccaaaaatacaggattatctgaatcgatcaaggcctacctgggaagaagtaaaagagcaactagaaaagaaaaagaaaggctccaagagtttggttgaatgtgaagaaaaaatgaatgagaactggaagaaagaactagaaaaacacagggggaaattgttaagtgcaagtgagagctcatccaaaaaaagacagagaaagaaaaaagaagaaatctggtaagtattcatcttcttcttcatcaagctctgattcttccagcagttcttctgattctgaagataagggtaagaaacacggaaaactgagaaagaaaaagaaccrttcacataaatcttctgaaaggtccatgtcagaaactgaatcagacagtaaggataatttaaaaaagaaaaagaagtcaaaagatgcaactgagaaagaaaaggacattaaaggactcagaaaaaagagaaagatatattctgaagataaacctttatcatctgagtccttgtcagaatcagagtatayggaggaggtacgagcaaaaaagaggaaaagcagtgaagaacgagaaaaagcaacagaaaaaaacaaaacagaaaaagaagcatgagaaaaacagtggaagaagaaaaagaagcctgctagttcaagtcctgactcaccataacattcagaaaaatcaggattcccttataaagaaagcacaatgtctgaggaaatttcaactgtgaaaactataacatatttactaaaatgcatgaattttcttgtttttagaattattcctggactattcagtagccactcagatgccactgtgtgaaagggccataaatgctgcctgctgcttgaacatctatttttttctcttccagtgcttgataactctggtagataatacactgcagttgtattagtggttaagatatttgggaataaaattaatacttttgactagaagtgtctaaagataaaccaacagaaattgaatctggatacatctttaagatgtgatcagaaatgactagatgactctagttaaaatttttgaaggagggattamattaatatttcaaaacccttactctgtagataaatgtattttaatttttcccctygtatacytttatttacctggggaaggagcttttagggttagggggtggtttgctatctctttagctagcagaatagtgtgcctttgatcctcacacatctgttttgtggacacagcagccatgcttcacaggaaggtcagagctggctaccagcagtcttgccctttactgagcttartgtcatccttggatgctgtcatatgctgctttgagtgaaccagagaaacagccatttgcagcatgagaaagacccaaaagctctgggatttacttccacttcaataataatgaatattttttagcattagaatgtgttatgtcatttgaattaattttgattacgctttggcttgggaaaggaattattttaaatagacactggtactttctgaacttgatagctaaggattctaaaatgcacattttatactaagttttaaccagtcaggaaaattttatgtaaccagtgatagtttattttttgtatgaattttgtttaggctgcaatgtttagtttttgttaactcctcactctcgctgttttaagttcattactatgtttaacaacctacttgccaagatatttagcatgtaaaatgcagggttttgatttaaaaaaaaaaaaaaaccagcttcatattgaagctgagacttaaccataaacaagttgagtggcaaaaaaaaaaaaagaaaaagaaagaaagaaatgcaaatatctgccatccaaatgaatagctaagtagacaccaataaatggccacttctgggattaatttgggctagtaaaagtattcctagaaacacagttaggttaagtcctcacatttacttaggaactgtgtctgtcaagtaaactgaatgtatgccggtaaaacatggtgatttgcgacttgtgtttgggggcttctggtggagccagaattagtctgaacagaaggcacttcaggctttctaaagcctgttttaaccagaacacctctgttgttctggtttttgtttgttttagtttggcttggttggagttttatcaaatatgttgttatttgaaaagaatctttttttggaaaaattgatctagtctaatacacagtgaatagttcagtgaaatcttaatgttacctccccccatcctgtatgtgaccctcatctcaataccagaagccctgctaagtggaatcagtaatcataacatggccatggaggaatggcataggatcttcacaaaaacgtgaagaaaagtatgtccctttgtttttttcctttcagtttttgtttttaagactttagccacaaattatcaaattagtcaacaaatatgcagctcatgcttggagtaaaagggatttatcttcttaaatcctacatatcttaacgataagcagagtggagctggcagttgctccagaaaaactcaactgttttggggagtttttgggagcagccatggaagccatggaagcttctgattgtggttctgcccctcctttatcttgagctctccaaggttctgacctgcctctcaaccaacaaccaacttcactgtgagccacgtgtacacacacacacgtgtgtgtgtgtgtgtgtgtgtgtgtgtgtgtgtgtaaragctttttttttttttttttttttttacttgctggacaaaatcaatcagaccattccctggcttacaaccaatgaaatcttctagctacttgkggtaatatgatcctgattctcatgtcaatacagaatatgacagttatatattcttgaggaggacatatgtcttgggcaaaatgcacaaatacctttgtagctgaaaaaccactttcccataaaagtttgtgataggactggtaagactcataatggagaaaaaacaaaataggaaattttaagtctgaacttttcaaaatgccattcagtaggcagcctcacccagttgctaggtaagccaaacttccaactaacagaggaattctagggcatgttcaaatatctaccaagagatgacctactggtggaatcttatcagaatttatcatctcaattttgtgccagggtgtcagaatctttggaggtggcatacttcacatgtctagtttcctccataggcaagtaagctttaaacctaaaacatgcaaaagtatcccaaaatgatagctaattataattatggctccatttataaaattcaaaagcctgtgatgtcccttcttgcccatcagaaattgctatatagattacctttcagttcctcttaaaagaaggtaaccagtatgcagccccactccatcttgaatttccacttcaaatgagtctctaggatcacccagcttaattccaacttgtgtttctttcttaagaatcggggatggataaatgggaggaaacaaaggtgggagagaagtggagagcgaagaaattttaaaccacatctcttgatctaatcttcctcatttattaagagaaagaaagtaggcaaattcctttctatcttggaaagtccctcaagtgggacaggaatgaaaagaataccctccaaaggaaaagaatcttaattagccatttttctcttaaaactgtaaccacgcagagaataaaaataatgtattttccaaaacacgcattagagaactaaggccaagaacactgaaattattgaacataagcaccgtgaagagtactagagtgactaacaactaaatatactctatttcttccataggtgttgtctttatcctcacaattttaaggtaatatcgtttaaatacaaaatcaaatctatttggggccaaaatgctcaagttttaaaccagtggtttctcaaaaatatatgtattaatattattaggacaaaatgtcaatgtaggctaaaatttgacttatgaatcctaaacattaaaactatttttgtggccccagcttggctgtggttctaaaatgaatgtcaccatttaccttagctattgatgccacacacctcaattaatgctaytcagacccagagaatgaaaggcaatggcagaaagggaattagcaaatatgatttctaacttaattcaaattgtttttcctggggaagtatttaaattttccaggttgctcgaatatcatccagggatgtgattttgaaggagacagcttgttactgtttttcctggctgtactacaagaaacaacagtgtgagcttattttaagttaatgtgtgcttctgtgtttctttacaagaaattaactgcaatcatttagttaaagcaaacactttgttagtgttacacttttcattagaaaatgtcttcaggaatctttcaaacttagagagttaagaatcccaattccgtccaaagattttaaacttggagcaaattatttaaatcacaatgaaagatcatttaagcttagtgaccctttgctggcactgaatattttatagccatagggaactcctatccattctcccagatcaagatagtaacwttttcctgtctcagtcggcaccagaccccacagtagattctgatttccttctgactatgataatcacaaacaaacccacaggaataggcagtatggaacaagaagagcaaacagtttcaaccaatttgttatttacaactggagaaacatctgcaggctctgacacctagtttctgatctctgccctagatgacttccctagtgagaataggcccctgggctacaatgatttatattatgtaactgtttctccacatcttagctgagctccctggactttagacctgcaatatttgccagaccctcttcctcttagtcgaaatcccagctataggcttttctggccagtgtcttaaaaccaccaatgtcctagtaacacaacttatgtgcaaatgggcaggtagaactctgaatgaaaacgagactaccccaggctcttcgggttataacagccacatgcagctataagagcaagaaagaaaaagcaaagcaaaatagacactcaactgaaggaaaggatatccacaaagcacaatacacgggatactaaagagctttcaatgtctttactcttctccctaaaaactctacctcttatccccagatccatataatatccttggtctaaacatacatttagtaaacatccattgtttcacgtccaacatccattcccctcttgctgataacaccaaaccaaattttgtgggggagacttcccttccccattctcaggcataagttttgagtgggaacctccagttctctataagctctataggtcctcactatctaaccccatcaacattgcctatgcacttagctcaatgtttgattcagccactggacacatatccagtcaaacccaatgagataaacaaagacatcagctgggactgctgagaaataaaggctttctttcttcctatgaaaggagaatataaagtctgaattggagtaacaattttttattcacaagggaaaagacttgtgaacctgtgtggatatggggactaaaagttaacacaatgggaggaagagcagagaagaaaagaaatgggaagaaaccaggtccttaaataacattatttcagccactggaccaagctttgtctgatgctcaattctggactgttaagttctctaagccaattaattctctttatagttaaagccagtttgaatcaggttcctgtcacttaaaaaaaatggaaataaagaataataagaaaataaaagagcactgacacaccacaacaccattatcacccttttacctctttaggggaaagatcagaggaagaggcacataagctcttactaggccatataactattcaagagcacttcaaccaaaagtatagatttggtttgggttttctgccagagacaaaaattgagtagcttcctacatttatctgcagaaaaatctacatagaggattaatctatttttactaacccaatgatgattataatgatttttcttaaggaaaaaataaataataaggaaaagaggaaaaacagaatctatatttttgtatactacaactcattcagtaaatttaagttaaaatggatctgaaagaggtatctgagatgttccccatcctagatcttttcaaacaccaataaggtatttgattcagtgggtaatcaagtgaaacttataaaaaagctaacagtcccattgaaggacataaaggagaaaaatgaacaactgttccagactaaataaggaccctttgattactgacatgtgtctttgattactgacatgcacacaatgagcagtaccccagtccttctttagcactgagcttagacaggaggccttcactggcttcacagtcccttaaacaggagatatttttacctttcctccacttgactggaacatattcagtatgtacaagctgtcctgtggtatcatatgaatgctggctccatgccacactggaaatgtgtgcctctggccagtaaacctttacatcttttgcacacattctctctccaggaggcttaaaatgggtccccagaaggcagccatggtgactgccttcaaaccatttatcaacttagcaatacacaatgattattgtttcatcagctgtcacttccttaaactactgccatccgtctctagcccctaaacccattcctcaccagttctttcaaaactgtggtgcctctcaaagtaaacttaaataaaagcatctgtttcaaatggtaccatccaaacagccttccctgggtctcaggataaataatcatgaagacatactctctccaatgaagtgcttcacgaaccttaacaaagcattaacatcccaagctaccaatttcgactgccatcaactcatcgtcaaacagactaggtttctttttattaataaagagcatttattaataattaatatttkaaaaatcccttaatagaaggctgccaatatgcaatcttcattaaccagggaaggctgatatttccctacaagtatatgaaccttttctacctactaccctagcttccacactggctatcatcagaataactgtggaagcatcttaaaaagacacagtatcagatccaaccctctgatacactgattaagtatgcctggggtgagacctgctccttggccctatacaatctattcatgattttggagtcaggttcaggcacccacatagcaggcaaaacccagaacacttacttttccgatgaattttctcattgtgattgaaggcccaaataatttcatataaactcgctagaccttcacatacaatccattgactaaacgatggctaaaagctccacccactagagctttccactagttgccccacacgtatcccaggaagttacaggttgtgtctccagacctctggtctacttctaacaatgaatatcacctggaatccagagctgcccatatccaggggggaagaacatcttcaacaatggagagccaacatcactcttgctcctttctgcttctcctatagtaatgaattttactaaacttgatcctttcatctgcctagaactgtaatatcatccaggctgtctgtgagatcccatcaccccaatttaatgtcactggtgccctggggggaaagtgccaaatagcttactcaatggtgtgatcattctcaaattggacatatttatttgtgtttaatttttaaatcatcatcttttctctcaaatgtttttgtgatggtttcattaagattaaggaattacggagcatttgcaaattgaccgcctcagcctgcagacatgctttctttgacccacacaaatttttatttgaaaatctttaaacaaagcatacacacttcagcaggtcacaatccccaccaattccaactgtttcatacatactttttcattcatttgtgttacctgggtacacttgactggctccttcagacatttgagttcgtagcccctgctacaagtaagattactgagattttagggcatctcctaaaaagactgtttatttcttcccatggtctcttcatttatggtagatgcatcaggtgtttattggtgtcatgtaagcaaaagaatagctgaagtttctcagtcattgaaaattaaagatgaaaagaaacctctcctatttattgcacccactaatgttcataagaaatcactgattgtctgggtaatacagttacttcatatcactgtctttctatgagattataaactatgggaggacaggaacagtattttattcatctctatgcaaatactgcattagacattatgggttattcaaaatgggcactcaaattatttttcaagtgaatgatcactactattcaattcattataaacaaaattaggtatattaaaggatccaaaacattttccagggtcaataaagatactggctactgggagccaagttaatctgtggttattagcagaagtagagaaaagaaaattggagagcaattctgaaaatacaatattgcaatatgactaattatagtcatcaatcacaaaaagtttgaacaatctgaaaaacagtatcttaaaagcattctaagacataatttctttccaaaggctatcacacttaaaataagaaagtaaaaatagttataaaaatgaaatgaaattattatggctcaatagacaaggtctaagggatacaaaatagcacattaaatcagttcccagttcataaaacctgtatgtgatgttgatcttcctgtttttcataaaccttataattgtgcttccagaaagctaccaagcatctgcctctatgtagctaattcttttaatcttggagctctaacaaggaaatagagagtatactgtgccaggatcactatcttctccagccaaaagcattatgtcttggagccaatttcctcttggtaaattttgatcaaatttcttccatttgcagcttccttagtactggtaatggctgcacatgtcacaggttgatatatatgtatatatgtttaacaatatacattataaatttaacgataatatgtacacctgtgcacatgagtaaatataagtctatgtatgcagccacacatatatatgcatccatagtagttcctgtctctttatgtgattctctgtgactaccattcaggctttcttaatccagtgaaaattctctggtaacaaacattactttggaactctgcattaatcaactctgctatacagctacaatataatgataattaaggttaataataatactgatgctataaagtctcttaaatgcttccaaaccatcaaaaaaaaagatcaaattatgttctacttttagtggaaggggtattttatttaaaaaatcaattattttaaaagaactggtggcccatatatagcttatatatttttatgagtctgaatattggattaatccatataccttatttccccacaattctcaatacagaagaatttctgtaatttttatatatgacacctaacattaatatacacacattaaatatatcgtatacagaggttacagattaaacagatcaccatatttttcaactacaatatataattccttaatccttcaagtgctaaactaaactgctaactctctagttgctcctgttattgtttaaaataaagcatacttagtatcattcaccttacttgatgaacaagggtcattcttataagaacagatagccactttttaaaaagagtgatatagttagggacgttttaggtgaataggctacctgtccttaaaataaatgacaccaggatactgtacctttagaatccttgttgcttttaatagttattttctacttgctatacacttatttgtctcattttgctaaaactaatgtcactgcaaattctaatcttcagtcaagcattatatacaattatctaaataaaatctaaagatgcctctatatgttgtgtataaaataaagcacatagtccttatttcagctatttcacaaaatttagaaaccaggatggtaggggaaaccagggttacttttggtttgtgactatgtaccaagtaatttaaggtacaagaaatttgggacatatatccaactaccaatttatatgaactgcagaggaagaaaggaacatgttaaactataccacagagatacaatcagcaaaatctagtctgtggtaattttctaggacaaatggccctgtttctgcagctataaattgcaaaaaaggggaaaaaaaagatggagaaaaccagtaacttaaaaagacttgacataacaatcacaatgcatagatcttaattcaaacaattaggaatttgaacaatgactggttatttgatgatgctagggaattactgtcaatttgtttagataagataatggtattttggttatgctttttaaaagatttatatttttgcatattatactgaaatatttacagatgaagtgtcataatatgtggggtttgcttcaaactacaatgctactaggcagtaagtgaataggagtatagatgaaacaagattatgacgtggcaattattgaaacgagatccatggggattcattatacaataccccaaaatagaaagtttttcaaataaggaaattctacagttgtaattaattttgttgttttgatttctgaaaattatacctaagaattataattggatttctaaaatggctacttacaaatttatagccatgacatgaagctaaaagttaaagaaggtatgcaattaatcttaattgtttaatctggcttaaaaatttatcaattttcaaaacacccttagtcctttattctaaatgttacaaacattttaaaatgcattgtttccttgaaaaagaaaattttcacagggcatgctgcaaaacagcacaaaaatttttatctcaaatttaataattacaaattaaaaagtccaaaaaatactaacaaaacataagaaatggacttaaagctctcttcaggaagtcaaaatccttagattaacagacagtatttcaattatttgtgtttagtattaaaaggttgacaatcactatgacagattttctaattcagtaaaacacagctaaggttgtctatgatgtattcactatgaactagacaagatacatacataaaataaatctatagctcattccaaaagtatttctattcagttctatttatatatcaataaaaatatataaactcaaaagtttgaaatagttatctcttttcccaacttgaaaatgctttttaatttaatctgtatagatttactgaatttggagtagaacctagatagtagttgaaagtaaaataaatggttaactagtacattaaattagttttaaattaaagtcaaatctcattgagacacattttgctttttaaaaataattcccagaggcgctaactaggctaaagttcatgttaaccttggaaacatcttcaaattactaaaataaataagtctttttaaaatgtatttttaagccaggcatggaagtgtggtcccagctactcaggaggctgaggtgggatcacctaagcccaggaagtcgaggcagcagtgagctgtgattgtgccgccacacttccagcctaggcaacagagaccccatatcttaaccaaaaaaaaaaaaaaagtatctttaaacacacaaattatatgtaattgttatgtcaattagtgtttgtgcaaattaattttttaacctcctaaagaaccacctcctttgattttaaaaagtgactgataacctctggtagactattttagatactataagtaattagctgtccttcttttgaaaattctataataatccagactttatttttcaatctggtttcttcataaatgttcttgaaacagattcaagaaactgtattcaatgtgttgaatgttttgttcataataatgttgtacttctatttttgtaatcctacctacttaaaaacattcttaaaacgtatacaaggtctactgagtcattgtcaattcaaggctagaaaccattctgtggttaaaggattacatcaaaccagtgtaagggctgagctggcgttttcctttacaggtttaaatatcttggctctccaaagcttgtgtgggggctgcagtttggcataaaattctcagcaggatgtagataatttctctgaaaaatgttttttaatggctaagtgttttttttttttttgctttttaaaaatgttggagaaaacatatattagaaccaggttcaaaatttatgagactcttcctctgtaatgtgcccattcttgtagataacccaagtacagcagagcaatcccaatcctaaagacttcattaagcacaaaacctcattgctatatgagttgaaagataagtacaaaaatcaaaacaaactgcttcaattacaaaggtaaacttagggcttctttgaaaatacatccatgtgctaagctctctctggtaatgattatatgttgtccttggtcattttggcctccacacctctggttttctttccatttttacattcaaatattactgtctttattccctaaaatggccttgtgagacaggtacttatcagttttatcaataaataaatacatagatcctgcataatccacctagtaatcaataaaactaaatctagagttcagatctgtctcgcccatgttcattttcaatacctgtagttctcgactctggctataacactagaattggctttgtttgtttgttgtttttgagacagggtctcactctgtcgctcaagctggagtgctgtggtacaatctcagctcactgcagcctcaacctcccaggctcaaacgattctcccactttagcctcccaagtagtgcaattacaggtgcgcaccaccatgcctggctaatttttgttttttgtagtgacaaggttttgccatgttgcccagccttagaattgactttctaaaaccactgatgcccaggttctaccccagactaaataaataaattgaaatctctgggagctaggatccagcaatcaatacattcctgatttccccatgaaataatcacagcaccacacagcaatacaagaagagaaatgtagaaagcaggatggcagacatggtcaacactaaattatctacttgcaaaacaaagctttaatgtcattttcttttttcaccctacagtcactcacttccccactcccaaatcagtaaacaccaagaagtcacataattctagtatttgcctacatgaagtatattgggaacataaatcctaataatcaccaaaatgtataaaacaattctagctaaaacaccctctagatgatttataattttatamcctctttagctactggctccctttattatattttgtggccgtttactcctttccgcatctctatcttccacctgagatttttgtctttcatctccctgaagaattagcaaaggtttgctaatgatgaagtctctgcttttgtttacttgaaaatggatttatttcacttaaattagtcaatmatctttttgctaggtataggattttaaacagttgtttagtttatcacattaaatatatcactaaactgtattctctctttcattaatgctattaagaagtcagctaacaatctaatggttgctcttttgttttctctggtttctttttttagatttttctccttgtctttggttttctgtaatttgccatgatgtgtctaggagtaaatttctttgtagatagccatcttaggattaagtggactacctgaatctgagtaattacattgattaatatttatatactgaatatatttagcttttttaaaaaaaactttattgcaaaatataacaaatatatggacaagttcacaaaacaaaaatgaataccttaattaataacaatcacaaaatcaacatctgtgaaacagatggagcacatgtacaaagctaagctcatcagcacattctattccccagagcaataatgttcacagatacaatgacctatatgaggaaagtcaagacaagtctcaattccaagactttgtgataccagactttcttttcttcggaacttggtgttgtgatgttcacctagaagtactaggagatactaggaagagcctaagagtaatatcagcgtgagcagaaggcagagcaaagccctgataacattgtttaagccctaaaactattcgcaccccaagctagttctacccctggtctttactgttatatgaatcaataaattccttttttttttttttttacctgtttgattgtattttctgtcacttgcatctcatcaagttctaactgctacaattcatcatgtgattgcctttcctgaagtaatttcttcttcatttgaactctgttattacctttctgatacagtttggacatttgtcccctccaaatctcatgttgaaatctaactcccaatgttggaggtggggcctggtgggaggtgtttggtgcataggggcgggtctatcctcatggtaatgagtgagttctcactctgaattcacatgagatctgattgtttgaagaagtgtagcacccccctcctctctctcttgctcctgctctcaccatgtgatacgcctacttcccctttgccttctgccatgattgtaagatccctgaggctctttccagaagcagatgccagcactatgtttcctgtacagcctgcagaactgtgagcccaaatagactacttttctttataaattactcagtcttacatactatttaatagcaacacaagaacacactttcttttctaccttgtatcacagttccatcctgccttatagcataactgtctgtagccatattttctccactactaaagtgtgagcatggagcacagtgcctaaatatgaggtattcaataaacaggtattgaagaaactgtgaatgcatcaatgaatcattcatttttgtatcccttgcacctagtgcaagccttaaatataatacaggctcaatacatgtttgtagtaggaattaactaacaaaaaggaataatatcacaggaaggcagacgtcagtacatacacaaatgggatmttaaaataatccttcctggtgactagaatgatccatgtggaagtagataagagttgaagacatcagtaaaatcatgtttcccttaatataggtacagatggctacatagacaaatatttatagatatgcacatttccttgctctgtgagctgaaaggacctaaataaaagcaatgacatcccagtagcaacaagcacatctggcactaagatcttggtttctaagacctttctccaataaaaaggacaagggttccttggagaaatggctgatactaagactggagcaggaaactgacaagatgagccaagatcatctcatagtgccagaaagtaagaaaatgccacaaaaaaacacaaacaaataaaaacatctataatgatgggggcatatcaaaggaatataggaaccaagtggaagaacttccagtggccaaagctggaagaatttgaagaacaaaataaataacatagtattggactgtaacccaaagtataaaataaatatctataagtccatactgatacaaataaatgattgaataaattaataaatggagagaatagacaaatcttccaggcagtagaattccaaataatttatgtagatactgccctcaaagagggcataactcccacttctgtgggttgcacacagtgagacccttccatagtaaaggataaaagggggaaagaaagagtagctttacagggtagcaaacactccctcaagccaagtgattaaggtcaacaatagtgcaaagtcatatcaatagtatgtggctatcaatatgacttgatatgtgatgaaaatggatttgtacctctgaagtctttctaccaaaagcccataaccatagcctaaacatgaaaaaaaatcagacaaatcccaactgagtgacattctataaaatacctggccagttactctgcaaaaccatcaaagttatcaaaaacaaggaaaatatgagaaactgtcacaaaaggaacccaaacagacatgaagactaaatgcaatgtggaatcctagatggtatcctagaatagaaaaaggacattaagaaaaaatttttaaaatcggaataaagtacggactttagttaataataatatatcattactggtttgtggacaaattgtcacaaatgtaccatagtaatataagatattaacaataggggaagctgaatgtggggcacttaggaactctctgctctctgtactgtcttggcagcaattctataaatctaaaacaaaaattctaaaattaaaactttattaaaagataaatagcccttccctcagaagatcctgtataccaaaagcacacaaagcaagctatttgtaagaacagcctttgaaacaagtgaagaatatgaaataattaatttaaagatcctgagggaatataatcagcaagcaactacacattctttttaaatgtataataaaagtctgactcctctgaaaaactaatgtatacacatgaagttcgtaactatttcaggaagcgtgcttaacagcaagtggctaaaaaggcattaaaaatttctgaaatccttagtaccataaagaaaaaaatattatcctcaaatcatgaacatctcacaaaagtttcaacgtcttggttaaatcatactaggaagaaggaaaacaaaacctaaggctgtggaagttttttaaaatcacagcttagactggcaatgaataatccttagcactgtattctaaaccccttacaattctacttcaacctacttttgtaaccgtattttctactatttgcctatgcaaactactccaagccaactggcttgctcagtgcttccaatatgccatccttggtatatgatgcttctctgtacttttgtcccctgtctacagtgccatccccccatctcttgccttctaaatcctactcctgcttgaagagtcagctagaacccttcttcttccataaagtctcagatcaccttaggtacaataagcactactttctactttatcagacttcttgtatcattaatgtggcactcagcatattcattcattaaaataaaaacaaaaaaaaaatcttagtgtgcctggtaccacaaatagatgttaggaaaactaaagacaagtaagataatagtctctgccttcaaggtgttctcacaaatgtacagaagacaaaaaggtaaacaagcaattactagacagaatacaatgctacaaaggtgtatataatgtgctatgataatatactgtactgtaatttgctacaatatttcccttttaatgtctaagtcctgattctccaattaaaccaaagtcctcttgaaaggttggttctctatcttctactcaatgctatacatatattagctaaaaacaattttgatgttactaaaaccttcctttctcccttactttcttaagagaaacaaaggtaaaagccttgttcacagacagtagtcttaaaataacgaattaatagctttttttagtaagttatcaaccataaccaactattagttattcacagtaaggggaaagatggttaagaattcacaagtaatcaccatttcatttagattcaagtggaactctctatgagtaacaaacaaaaataaagaaaaaggactggtttgagatacatcttttatcttcctgcagaggtgctagcaatcaggaacagatcaaaagaacagaaaccaattttaaaaggtgcttaagataaatctgtaatgtcttaggaaaaatgcttatgataatatataaagtaaaaaaaaaactgaaaaatgtagacaaacgtatgtccatgtggcataggcagaaaaacaccggaaataaaaatctactaaactgtgaatattcatctttaactcatctagggttatagactggtttttcttggtatttacttgtatttcgaatgctaataataataattattattaatattttttgtttaaatccagctctttgaagggagtgatggagagaagaggaggcgacaaagagcggatggatgacgagagacgaccaaccaaagacaatgggtaatcttcaaaactgattaaataactcctctggataagcatttttttttcttgagactgagtctcactctgtttcccaggctggagtgcagtggcatgatcttggatcactgcaacctccacctcccaggttcaaacgattctcctccctcagcctcctgagtagctggcattacaggtgcgcgccaccatgcccagctaatttttgtatttttagtagagacggggtttcaccatgttggtcaggcttgtctcaaactcctgacctcatgatccacccacctcagcctcccagcgtgctcagattacaggcctgagccaccatgcctggccctggataagcatattcttgaactgcaatggtttatactcaactccgtacctcattttcccaatagctgttttacaaattcaatagagtaaatcaaaactggcaacatctgctaaatgttatatttgccattggatttcaaaaaataacttggtttgcctttttttatttgtcttaggagagtgaatgtttttaatataccttgtttgtgctttcaaggtgctctgtttttctacaactgcacttttaaagccttgtttataacacatgctttcaaattatatgtgtatgcatatgtgtatatattaatactcttcttaatctataattagctataatagcaacacctttagaaaacagatgaaatcataaatcttaattttgaaccagggttcttctactgtcttcctttaggaagtatattttttaaaaaataacatcaactttcttcctacttcataaaatgtttccctggctgatgaaacagacatagtagaaatacagtagtttttagttcatcaacacacaaaccagttctccaccaaaatttctagtaattttctcatattctcttgggtcatttactgatgatgcatcctttgattacaactcaagagaaccagagatgccatgttaacaatgctttatttctaccttaggaatatatatattggaagtgaacacctaggttttcatataaaaggaagaagtacagttatcttcattttaataatttgttattgaacattttattaatatcaaacatttttattaattattgattaattttattaattctgyattcttaccaaggtgtaatacatgtacattgtattttatgatctgctgaagtcttttgtacttttgctttgaaagtaaattttaaaattatatattctcaaaatataatggagaggacttccaggtgggacgaagtagctctgtacagatcagcactctcaataagaacaactagaaagctaaataaaatatagaaatctatttgaaggcatttgctatctatggaagaaatgagaactgggaggctgagaatcaagaggagaaaacctcaaggagaggagctgatgtctgcagctgctcctaccctggggacatttgcaaatttagggtacrggagggaggctgagaatccaggctatgcacagtcacaaaactgctgctgaggcttagaggaaccattggagcttttggcagagtgttgagagacctcaaacatgcagccagctcctctcaagactttgatgaattctggcgtagcccaggtcagaagctaaaaattaagaaaacgcctctgaaaagcagagcaaagcaatcagcagtcttgtaagacaacatttagaatttgagatccacactgcttgtgtgtttaaatatttgacaaacgacagagaattctattctgaagtatgttgtgggccaaggcacttagaattgtttaggaacactggccactccaatctcccaagtaaaaccctgaagagcactatcccagaacagaagtgaaccagaagtaaacagactcttaccaaagccataaactagcttcgactcagcaaaaaccctgactggattaaagtgaccatccaatcacatcagcctatgtccctatcagaggggacagtaaaccctctctctggaagaagactgcgttatctggagcctctgtagttttttaactggaatgtctgacattcactcaaaactaccagaaacaccaaaaacagaaccacatgatggataaccaagaaaaaagcaaacgaaacacacacagaaaaatcaaaggatattccagatattaaaattagctcacatggactggaaaacaaatacaattaacacaagcaagaaagtggagaaagccatttagatatagatgaaaagataagttaaccagataattggaatttacagaaaataatcaaatagaattgtaaaactgaagaacatattctctaaaattaagaactcatgaggggccaggtgcagtggctcacgcctgtaatcccagcactttgggaggccgaggtgggcagatcatgaggtcaggagatggagaccatcctggctaacatggtgaaaccccatctctactaaaaatataaaaaaactagccaggtgtggtggcgggcgcctgtagtcccagctactcgggaggctgaggcaggagaatggcgtgaacccgggaggcggagcttgcagtgagccgagattgagccactccactctagcctgggcaacagagcaagactccatctaagaaaaacaaacaaacaaaaaagaactcatgaggatgggtttaataggaaaaataataaactggaagataagtttgccattatctagttgtgctattcattcatttattgcctctcatctcccaaagccattctgctttaccctgtttatgaagcgggggccagaccctgtaaacatttttcttctgccagtgggtgcagtgttcagcttgtcaacagagagtgatggaggaacagtgcaaggcacagcagagggaggagcttcttatcctggttctgtgtactttcctccttgctcccacggtgctgccagagccatgcagaagacctattagtgctcatcctccagcctgtttcactgaaaccagcccatttccactttgccagctctggcttaccagcacccagtaggccacctgcaccaattctggcccacagcaccccagtgaaggtcttcatcttcccgtagcctgcagccacaccctctccaacaaggaggtaggaatctcagctgtgacggggtgtgatgggggaaagggtcttcaaagtttattcctctcccttagctctagaatagctgctccctacaactgctagtcttgcattctttagagatctcctttacccctttaggtaagtaattctctatattaaattttccctattcaaattactgctatggtttctgtctcctgactggaccctaactgataaactaataaagttgagaaacctcaaactgtcctatcatctatactatatgacccagcaagtccacccttcaatacacagccatcaggaatggatacatgtgcattaaccaagacatgtacaagaatgttcacagtagcaatattcacaacagcaaaaaaactgaaaataacctaagtgtcaatcaatagtagaatggataaactgtggtatgctcatacaatagaatactatcagcaatgagcatgaacaacaaccaaagtaactacatggatgacactcacaaataaacattgagtgaaagaagacaagcacatagtttgatttcatttgtacgaagatcaaagagaggcaaaaataatgatgacatcataagtcagcatagtgtttactctgaggcaaggtggtcatagtgatggaacaggacatgagtgaggcttctggatgttggaaatatcatttcttgatctaggtgctacttacacaggtgtgtttaccttttggaaattcaccatgctatacacgtgatttatacactcttctgtataaatgttatttgttaataatagttacctaagagagatacattattcataaaaaatcaaataatatgtttccaagtccctggtacttaccacacatacatggatatggtaaagtgcccctctccatgttcccacagtactctgtacatatacctctatctccacacttgtcaccctgtgctataattctgcttatctgtcttgagcactatgttcagcttcagggctaaggacaagtgctttacaggtctcaaatgaggcaccaaatggagatttgaaaaatgagagaacattctattttaaaatatgttgtaggccaaggcacttaaaagtgtctaggcatcgagcaccatccatcgggatagcgtttttcaagtgtgtgacatgcagtccatttcagcttagtgcattctttgtatatattttgtgtatactggggatgggaactattttgcaaggacacattcagaagatgtccttctgtaggtagcacaatgaagagcacaggaggaaaagtgacaaggcattggtactcttacattctacgcaagcagaacagtcactgaaggactcatacaaccagtgaccaatacctgcagtagcattaggttcactaccctgaagatgcttgtcccaaacactaaattaccctcagcttcctcaaaccgggaagtcagatagcagaggtttccaacctactataattgcaacatgcttttctcatttaaatttatgatccacccttcctcctttatgcaacttcattttaagttaaagtgaattatcattattaccttgggggtaaagaatttcataatatcctttgagggagatgaacataccacagggtgttgcaaaacaaaggctgaaaatcatagtttcagaggttctgttaactgattttatttttatccctccaaatttctctaaattttttttctactttttaaaattttaatctaaagtgtattttctagtcctggaaagctgcaagtcccttaagggatacagaaccttaaaggaaatctgttcatctaacaaacatgtattgtatacccctacataccaggcactcttcaaattaccaggatatagcagtgaacaaattccactctctcctgaagctgccaatccagtgaaaagacaaggatgactcattatcccagtttgcctgggactgcccttttttaactctgaatgtcctgcatcccagaaaacccctcagtccagggcaaatcaaggcagttggtcaccctggcagagacagacaccaaacaagcaaccaaaaatcatcaaatgatgataagtgctttgaagaaaacagaccacaacaaagatgagaatgtactgaggagagtattgctattttgcatagggatgtcagggaaagcctctctgatataatgacacttcaagaaaggagagaacaagccattcaggtaagtgcaggaagggttacaggtagagtaaataaaaaatggtcaatagcaaatgaaaaggccctaaggtgggagtgtgtttagaatgtctgaggaatggcaaggatgcctctgtggctggaaagggctgagcaaggagcaaaagagcaaaagagaagaagttcaagttaaagaagcaattgggtgacagctatagcataacctacccatcacttaacttcttctagattattttaatcccaaaattccaacctacaataattttccttttttattacaatggagactccatcttaatttattgaacatcctctcttctcacatcacatattgtacgtgaaaaacagtatttaactaccccatagcattgcttttgtttcaattattccaacattttaattatatactacctgtatttgcttttagatatctacgtcttacctccctaaaatttattgatggattgattgagagacagggtactaggattacaagtcatgagccactgcacccagccacctccataaaatttagacttcttgaggtcaagttccatattgaacagtgttcaatgcacagtatacaagcaataaatactaatggatgtgactctttgtcttttgtttatttttatgctcagaataaagaactcttacaactgaacaataaaagacaatccaatttttaaatgggcaaaggatctgaatagacatttctccaaaggatatatacaaatagccaataggcacatgaaaagatgctcagtatcaccagccatcaaaaaaagcacaaatcaaaactacagtgcgataccacttcatttgtgggtatgagataccacttcatacccactaggatggctataataaaaaagacataatagcaagtgttgctgagaatgtggagaaactgaaacactcatacacttctggtaagaatgtaaaatgccacagccacttttgaaaacagtttggtatttcctcaaaaagttaaacatagagttaccatttgaccctgcaattccattcctagaaatatatccaagagaaataaaaatatccacacaacagtagttacaatagctaaaatacggcaacaacctgtaagtctatcaactgatgaatggataaataaaatgcagtatatgcacacgatgtaatcgtatttggcaataagaaaataaaacagtaatacatgcttcattgaaaacaatacgctaagtcaaagagatcagtaacaaaggacaacatattatatgattccatttatatgtaatgtccagaataggcaaatccatagagacaaaatgcagataagttgctactttgggtggtggtggatcagggtgggaatatagggaagtgactgctaataagtttaaggtttctttttgggattatgacaaggttctaaatttgtggtgatagatgcaagctgcacaattctgtgaacatactaaaaacaactgaattacacactttaggtgaattgtacggcatataaattgtctcaataaagctgttacttaaaaaaacttttgaactgtctccagaatggaaaataatacttcactggaaataatgttaagcaaaggcaaacagccttctgttggaaacattactataaaagatggattcaatcagtagttcccagtaacagctcagagaaatcataaaaatagcccagagaatttaataagttcttgggctccccaaaggatataattcagtaggtccagtaatctgtatttttaaaaggcttttcaatttattttaatgtatatctagaattgggaaccactgaaccattaatgtcctagctcaatgattgtatgagagtttacctttgctatctatgagatacctctctatctagtattttccatttatctgaaaatctcaagttccttaatggaactcacctccctaaatgaagagtctgagtttagaaagaggtggcctcattggatggatcacagcacgtcacatattcctattaaccttatgtgtgtcctttacttaagctacctcaaatcctttttttttccccagaaacgatttgatttaaataaattgaataaataaaagattatatatattacacatattctctaaaactacatttctcaaactgagacacattgaagagtcatttttttctcaaatatttataatttaatatatttttgttttaaaaatacaggtatattacagaatcaaatataaaattttcatgaatttttaagataaaacccagaaacttcaaagaaattccacacctgccacaggaactacttcagactacactcccaggttctaagggtatatactcatgcccttctgcaaggcatacttcaggaaaaatccaagaaatctaggcattctgttttccactccatgggtgatgaaatttgtattcccccttcattcagaaccatatgtagactagtcaggttattaatgattgtgctctgagcactacaggaaggggaaaaatgtctgaactgaatccaagaattaaaccaaaatctgttaacaagtgagtgaaaaatctttcagagacaagctacactcagagaaatgtctgctggggatcaggccttgtagttaacctgtctggtgttttaatcagacaacaataaccatcaagagcaaccttcagaactatttggacatcgcccaactagtggagggtatgctctggttgcttatctgggcttgctcagcccgctgatccatgaagaagccctgggtagtctacccaaggccgtagatgaactatcactaaggagaaggtgttcccctagatttgcaatctttcacttagatctagtgctttgattttttcggctattctttttcagctatattctcaaaacatttgtgataacttcactcagggactaaacatcttaagagtggtgttataatatcaggtctgacacagaattatataaatctaggtcaatttcctcaatattaaaatggaagattagaataaaatgaatcttaagatcctttctagcatttaaattctacacttacacaatacttgccaaatattaaagatatgtgctatgaattttaaatgcaatttcaaaaaaaaagaagttgtaaacatgacttttttattctttccattatgctgtttcttcttgcatcaccctagctcaaagccctttctccctccactgaatttttacaactatcctcaattctggtcttcgatctctccttattccattatattgaccacactgctattagatgattctcccttcatcatttccttcaatggctcctagcccagcattcaatgtgccccacagtcttctcccaatttacctttctaaccttgttgatcccttccttatattgacttacatttcagcaaacctgtcagtgccttctgaaatacattagacaaatcctagctacttccaatgtgcttatgtcattcccccaatgtgcttatgtcattcccccacctgaaatactctttgtcatacctcccacttttgttccattcttcaagaatgagtacaagtctcgcctcaactacaaagctttttctgaccacctttaaattcctgaggcacttagcctggaatacatctttggcatccagcatatgccaccctcctctgggcagacttaatacagaagaagtctgtggtgaaatctctgtgtcatttttttttccaggtttaagactctcagctttaatatggggtgaatacgtaacacacagcatctaaaggggccatattgaactcagatttttttaattaaaaaaattacagctgatgttcaattattagaaacttcaccacgaatccaccttactcttgccaacaatatttttacagctatgttctaatgtttaagacaatactttaggtttgggttactacttcctgtttaatacctttaaagggtggaagcagggcaagagttcaaagtaagtcatcaaaacttttaacaataaaacttgaataagacaaaaaatttccaggaaacgaaactaagagtatagttttgaacaactataaaacctcttctagtataggtatcataccaaactcaaatttgagaagaaataaaaagagacattttgtctggtcagaaccatttaaacaaaatggcatgtgtttttctccatccaccatgcaaaacacacaacttttttagtaagtacgtatgcttactaaagcatatgtgctccaacaagtaccaccaccctttccctaatggtgaatatttctgctttaattccagaaacattttatttcaactacaaagtttctggtgttgcttgataaagaacacttaatctggtctttacccttctgataacaatactgagatactgagataatgcggatacaagtccaaatttgccactttcacttctatataaaaacggctccttgaagagccaagaaacactctcctaacgagccctgtaatgaagtgttagtaaacattagaaaattgattgcaggcatgatatattatgttaaaacaaagaaaatattttcaacatgtctctttaaactgaagtaaaaatatttcaaccaatatgctagagactttcattaattcgaaataccctgaaactaaacagcaatgaaaaaaacctcttatttaactactatggcacataaagagttccatctatttcacaggacagagaaaagaggggtgggaaaaaaatgcagatgtgtgacaaatctatctgttaagcaactgctgaaagccaattttgttttcctttcaccaaagaaagatcattcaagcaagtctgcagtactcacctgcaaagctgaggggtctggcaggaattcagcatcttctccaaagataaaatcgggaggcagttctgggtattgggcattgaaaatgatatcccctgaaataaaagaaaatgacaggtcctttttatttcctttctaagtatgaatattctgaagactgtatcagaaaaacttctaaaagaaatttacattagtttaagaaaaccatttgaaaagcactttccagatgattaattcttcaaataaactgatatcttttttttttttttttttgagacagggtctcactttgtcatccagactggagtgcaacggtgtcatcttgactcactgcagcctcgacctcccaggctcaagcaattctcccatctcagccccccaaggagctgagcctacaggaacatgtcaccatgcccagataatttttgtatttttattagagatggggtttcgccatgttgtgcaggctggtctcgaactcctgagctcaagcgatcaacccacctcagcctcccaaagtgctgggattataggtgtgagccactatcccaggcctgctatcctttttcaatttaacatccacaacaagcaatcaaaaaagctttatctccaagtacactgtgaatgtaaatatccaaggagaaaagtagaagcagccacatccaaaatatgtactgattatttttacaggtaacattactgtccaatcactgcctgctaattaattagtaagcctttacgaagactgattctgtatagacacagtctttgccttgcagaaattaaacatacatacttttgtataatggaaagaacatatggcttatagttcacaaaaacttagatttatatccacaaggtctcctcattatttattagctcaagtgatcttgagcaagttttaacttctttagacttcagtttcttcatcagtaagaagtagatataatagtactaatgtcacagatttattgtgacgataaaaagagatggcatgcctagcagtgtccagcatatagtaagttctcaacatgtgataatggaagtattacttttgttttgaaacataagacaaatttacaaagtctcattagcaaatttagattgcaagttcttctacctgtttcttttctgaattcttctgtagctcccttttttcctctgctcatcccaagaatcagctcttatcattatgctaatactaacaagtagattagtttatcgacaatctaacacacatattgagttgtaatgtataaaaatatgtatacttgtgtacatgtataccacctctgtacacatacatacataacagctttatcaatccaatcatttttactgctcaaacagtatctataaaattttatccaaatgtaaacatttaaacttcagttctcatttgagtccttaaatatctatgtactaggcatttcaatgtcaaactcagcaagactaaaacatgatgatgactctcccttttctcactcctctcgttccctgattccatgctaaaacttcagtgtcatcttcaacctttcatacaccctgtatactcttagaaaataagtcatctcaatttttcctccaaaatgtcactcatatggatttttcctactgttaacagccccttccaggcccagatcacctagtccatacattcactcatccaccraataaatatttgaactttgccatagccactatgataggcattaaagatcaaacaaaaaaaaaaccctgctattaaaagctgacagactaaagaaactcaatcattatcataccttttaaaatgatctcctaatactagctgccctccagtccataatacatattatcaccaagtaaatattcttaatgtgctattttgtcccaaaacttcctaactcaagaaacttaaatgagtctctaatatcaaatggagtaaaagcaaacttttcaaactgatatccacccttctctttatctacaagcctgtcttttcttccagtcaatatgatctgctcaatgccctccaaatactatgacatcaaatactatatctctctccttgctcagttcttaccatcctttatgagcccactaaattgtctcttgtatgaagcctaccctaataaatccagaacacacagatcattgttacttctgaaattaaaatcctgactaattacgccattcactttagtatttagttgtaagtagtcttatattgttttattgctctattaattttaaaaaatcataataaacacaagctacctgtgagatactgtgacacgctgtgtcaatacaaagatatttattctcaaggagctcatgtttagtgagggatataagacatagacccagagccacaaatacacagcggtacaaggtgagtacatataattgatcttcctaattaaattgtaagcatccacagaacagacatgtttttatacttatttaatgtttctgacaggggaaagtacagcacaaatagaatatattcaataaacactcaataaattaaagaaattctattctctgaactgaacgtctaagtgctgaaaaaaatcttcagtgaagaataaggcatagcaacaaacatatgaaaaaatgctcaacatcacccattatcagggaaatgcaaatcaaaaccacaatacgattaccaccttactcatgcaagaatggccataatcaaaaaaatattaataatagatgttggcgcagatgtggtgaaaggggacacttttacactgctggtgggaatgtaaacttgtacaaccactatggaaaacagtgtggagattccttaaagaactaaaagtagaaataccatttgatccacaatcccaccactgggtatctacctggaggaaaaggagtcattatacaaaaaagatacttgcacacgcatgcttatagcagcacaattcacaattgcaaaactatggaaccagcccaaatgcccatcagtcaacaagcggataaagaaatcgtagctacacacacacacacacacacacacacacacacacacacacatcatggaatactactaagccataaaaagaaacaaaataatggcatttgcagcaacctggatggaattggagacgattattctaagtgaagtaactcaggaatggaaaaccaaacattgtatgctctcacacataagtgggagctaagctttgaagatgcaaaggcgtaagaatgacttaatggactttggggactcgagggaaagggtgggaggaggtgagggataaaagactacacactgagtacagtctacactactctggtgatgggtgcacctaaatctcagaaatcaccgctaaagaatttattcatgtaaccaaacaccacctgttccccaaaaacctactggaataaaaaataaaaataaaataaaatgtgagaaatgcaacacacaaaaaaaactaaaaataaaatatatttttatttaaaaaaagaagaagaagtcatagcaaagtcactcctggagcttctgtagggaagaaatttaaacaagaaaatgtatccttcagaagacaggtataaaattaaattatcaaaagtagtacaaccacctcctctcaccctagccactatcatcatctcagatgatcaattgtatctatgataaatcataaaattcaaaagtgctaactataaggcattaactcaagccttggctaaaaagcacaagtagagataatatgaatgtcctgattactcattctttcaaatatacacagcaagcatattctttaggaaggaacatactttagagatgtgtttttaaaagtcctatagttggcttactttagttactttaggaaaaaaaatcaaaaagttaacagagcaaagatatcaaagttttgaaaaatgccaatctaggatctattgtcccttgacattctaaaaataaataacatgctaaattccaataaaagaaattttatcacttttgctgctatagaagaatggctgcattttcaagttcacaaaggaacactgctagtaataaatatttccaaactggtaaacattgaaaaaatctacttaaaggaatatccattctggttgattctattcaacattatactggaggctctagcaagaacaatttggcaaaaaaaaaaaaaaaaaaggtacaaaatgtatctacattggaaaaaagcaaaactatctctatctacagatgacataaatcttgcatgtaaaaaatcccaatgaatccacacaaacaatgagaactaataaacagcttcagcaaggttgcaagatacaagataaatgtacaaaaatcaaccgcatttctgtacaacagtaattaacgatccaaaaataattttttaaaattccatttacaatgagatcaaaaagaacaaaatacttaggaataaacttaacaaaagaagtataagaaatgtacactagcaactacacaacattgtttgaagaaattaaaaaaggcctaaataaatggaaagacatctcatgtttgtcaactagaagacttactattgttaaaatggcaacacaacccaagttgatctgtagatcccatgcaatccctaccaaagccctagctggactctttgcagaaattgacaagccaatcctaaaaatcatatgaaaatggaagggatgcaaatagccaaagaaatatttaaaaataatttgcaggcgttctcaattataaaagttgttacaaagctacagcaatgaagacaatgtggtgctggaatatggataggaatacagatcaatggaacagaattcagagtccataaataaaccttcaaatttatggcctactgatttttgacaagggtgccaacacaattcaatggggcaaaaaagtattttcatcatctcacactcattagaagagctactatcaaacaaaaaaataacaagggtgggtgagaacatgaagaaattggaaccccttggaagtgctggtgggaatgtaaaatggtacagccactataggaaacacagtggtaattccacacaaaaaaattaaaaattaacatatgatccagaaatctacttctgagaatataccctaagtagctaaaaggagattatcagagatatttgcacacatctgttcacagcaacatgattcacaatagccaaagagtagaagcaacccaattgtccacaaacagatgaatggataaaccaaatgtgacatatatgtgtgtgtgtgtgtgtgtgtgtgtgtgtgtgtgtgtgtacacataatgaaatattattcagccttaaaaggagaaaaattttaaaacatgctacaacatgaatgaatattgacgacatcaagtaaaatagtcacaaaaagacaaatactataatgactccacttatacgaaacacctgaagtagtgtgtttcataaaagtacactactgaagtgtacacttaaaaatggttaatatggtaaattttgttaagtatattttatcccaattaaatgggttttttaagcatcttttcaacaaatggtgatgggacaactggaaagccacaggcaaaagaatgaagttgggcccctacctcatatcatgcaaaaattaactcaaaatgaatcaaagacctaagtgtaacagcaaaaaactacaagattcttcaaggaaacataagaataaatctttataactttgggctaggcaatgctttctcagacatgaaaccaaaatcaagcaacaacaacaaaaatagataaattaaacttcatcaaaattaaaaattttggccttcaaatgagactatctagaaagtgaagacaatccacagggagataattttgcaaatcacatagctaataaaggacttgtacccagaacaaagaaatctcacaagtcaacaatataaaggcaaataccccaattttaaaagggcaaagggtctgaacaggtatttctccaagaagatatacaaatgtcaaataaatacatagaaagatgttcaagatcattagccaacagggaagtgcaatcaaaatcacagtaagatagctcttaattacccacttggatggctataatcaaaaagacatataataataagtgtttatgaaaatatgaagaaactggaacacttatacactgctggtgtgaatgcaaaatggtgcagtcacttttgaaaacagtctggcagttcctcaagaggttaaacatagagctaccatctgaccctacaaatccactcgtaggtatacatatacccaacagaagtgaagacatgtccacacaaaaacttgcacattgtttgtaccagcattatgcacaatcgccaaaaagtggaaacaactaatgtccgtcaactgatgaatgaataaattgtgacattatacatgtaatggaatattattcaaatttgaaagaaagtactgatataatgctccaatgtggataaaccttgaaaacattaagctaagtgaaatgagccagacacaaaaggctacttattgtattattattgtatgaatctatttatatgaaatgtctagaatatgaaaattcatagagacagaaagtagattaatggttgccagacaatggggaacaggagaatgggaagcgactgctaactggtacaagctttctttttgtgatgataaatattttctgaaattagtgatggttgtacaactttgtgactatatttgtaaaaagccactgaattgtatactttagagggtaaactgcacggtatgtaattgtatctcaataaagctgtttttatttttaatctcatgcaaaaaattgtcccactttaaaaaaacctgatcttaaataaattacaaagtgtttactgaatagttgtgacacagttacttttataaataaaatcatattaaaaatgcaatgtgaagagtttctgcatttaaaagaactctgcaatgagccctttataaaagtaaagaatgctttttaagataaatacttgcaaagatctttatttttaaggaactttacaaaatgtgtctttttaatggacacgactggataatgttaaagacagactttttaaatttttaactattatagatatataatgctgtacttatttatggggtatatgtgatattttcatacaagcacataatgtataaaaatcaaattaaggaaattgagatatccatcaccccaagcacttatcatttctttgtgttaagaaaattccaattccactctttattttgaaatacacaataaattactgttaactatactcaccctattgtgctgccaaacactagatcttattacttctacagctgatttttcaataaattttaaggcaaccaaccagtatttgaatatataataaagttttttttttttaaggaaaagatatgtactaaaaggggaggaagtttactacattacatgtaataaaaacattatataaatatttttcaaaacaaagaagtaacttaaaatagctttcagaatctcacatagttatgttccagaatttctcaggctcctaccttcaacctcagagaactgtgaaacactttgcctcaatactgtacagcctctttgaaataaactgtggcattgttctcttgctatgcagaacagtcagtaaatcagtcaagaacatttattaaaaacccacaacgcacagatgtgcatactggacacctrgggagttatacaggaagtagaaaacatagtacctgacctcaaggcagagacagtagagaaaagaccaacacaaatcatatagaagagcaataacatcacatttcctttatttcaccctggagcagatgatatgaacacagagtacagattacctggacactgcttactccaacttttcataaaatggaagagtatgcaggagaacaaagaaataaaagcaggatcagaggtgctataaggcgaggtttaaaaaaaaggaagaagtgttacaaccacctaacaacaaaataagagtttcaagtcttatttttcattactccctgaaacttgccaggctataacagtgggagcaatgggsgcagaagttccttcctttcaaaatgcacatcaacagtgctttataatatgacacatacatgaaatcacagaaatgttaaatacaaagtagattttatttacacgcttgtgccttagcagctgacaatttttagaaggtatcagcaccatctcaggaaggctcacttaccagatatgcagagtggaccatatctcctactccctaattacagaaggaacacagcctgtccacaggatacttgccttattcctcaccagtgaaatattatcatactattttgtctatcagtttcaataactgccaggaaaacatagtttctaagaaacaattcaatactaatacaactaatacaatcactaatcattagagaaatacacatcaaaaccacgagataccatctaacatcagtcagaatggctattactaaaaagtcaaaaaataacaaaatgctggtgaggctgcacagaaaaggaaatgcttacacactgttggtgggaacataaactagttcagccactgtggaaagcagtttggagatttctcaaagaacttaaaatagagctaccattcaaccctgcaatcccattactgtgtatatacccaaaagaatataaatcattctatgaaaaaaacacatatactcatatgttcattgcagcactattcacaatagcaaagacttggaatcatcctagatgcccatcaagagtgaatctgataaagaaaatgtacataggccaggcgcagtggctcacacctgtaatctcagcactttgtgaggctgaggcagatggatcacctgaggtgaggagttcgagaccagcctggttaacatggcgaaaccacgtctctactaaacaaaaaaatacaaaaattggctgggcatggtggcgcatgcctgtagtctcagctacttgggaggctaaggcaggagaattgcttgaatccagggggtggaggttgcagtgagccgagattgtgccgctgcactccagcctgggcaacagagtaagactccatctcaaaaaaaaaaaaaagaaaaaaagaaaatgtggtacatatacaccatggaatactacacagccataaaaaagaatgagatcatgtcctttgcagcaatatggatgtagctggaggctattatcctaccaaactaaccaggaacagaaagccaaataccacatgttctcacttgtaagtggaagctaaacattggagtatacatggacacaaagaggggaataatagacactggggcctacttgagggtggagggtgagaggagggtgatggtcaaaaacctaccaatcgggtactttgctcactatctaggtgactaaatcttttgtacaccaaaccccagtgatatgcaatttacccacgtaacaaacctgcacatgtaaccccagaacctaaaatgaaacttgaaaaagaaaaaaagaaaaaggtaaatgactggttttctgccaatgatagattattcttatcagttgctgcattaaatgattactgactgaaactccaagtatggaagtgagagtcagacaagaactttgtggaaacgccagtttgaaggagatagtctcaacaaaaagtaagttcaagcaatagagtttgtgtccgtccatttttgcatcactataaagaactaaccgaggactggataatttataaaaagaggtttaattggctcacagttctgcaggctgtacaggaagcatggtgccagcatctgcttctggcaaagacctcagcaagcttacaatcatggcaggaggtgaagggagagcaggcacatcacaagatgagagtggcagtgagagcaagaggaggtgccacgctcttttaaacaaccagatctcacatgaagtcagagcaagaactctttcattatcacaaggacagcaccacaccattcatgagggatccacccccatgacccaaacacttcccactaggctcacctccaacactggaggtcacatttcaacatgatatttggaggtgacacatatccaaaccatttcagagctttacgaaaaactttgaagaggtgactcatttccaagagttagctctaacccttagtgtgtccttacactgaaatttaatatctctctgaaaattccatttgctggttctgagaactttatgggacaagtttaatttatctgtaatatcacagcccttcaattatttgaaggcagttctcgtgacctatctttcaaccccactaggagtcacctcttagacaggcttactatcccagtctccttcactattcctcatctgacttgtttcaatttccttcatcatttggctctctcctctctgaatatgtaccagtttgtctatagctctcttagaggataacacccagatctcaagataagattctaggtgtgttctaaagagcacagaaacaaatacaaaaatccatgccttaatttatgtattaaacttctattgataaatggcattgtaagttaaaatagcttttttggcagcctcatcagtagtgactcctattatgcttcttattaactaaaagccctaacatttttatgtatttaccactgctaagctacatatccctcttcttaactgggacaactaaattttagaatccattttgaaattttaaatttatctgtattatatttcagtatcgctagatttacctatttaaagtccatcatgatattcttagattctactccaattttgggttggcactcctaacttcaaattataaacatactggctaggcatccttctggaaacytccctttatgacaatttataaacaataaacaatcttgggtgcaataatttaaacaataatgtctaaccaataataatatgaacttaaacattcatcacaagtttgtcaaggaacttgtcaactgcctcagcaatgtaggctgttgtgcctacaaatgcaaggatgccactaattattccattgcacagcattcttttcatcttgagtggtagagtttaatttccaatatcaaggaaaaagactctaaggaattactacatctgagagttggcatatttacatgaattaggctctcaaacaaaatctgtagaacaaaggatggaagtagggggcagaggctaaacttaggtcatttaaatttgcctcctcttcttagaagacttccttctgccatatccctctcctagacttcggaccacacctaatccttctttgcacttctaatatctgaagcagtgctatgtaatagaaataataatgcaagccacatacataattttaaacttaccagtagccacattcaaacagtaaaaagaaaaaaggtgacataaaaattataaactattttttaactttatacacagtaaaattcatctttttctgtacacctataagagttgtataacatgcagagatttgtgtaaacatcaccaaaattaggatacagaacaattctatcactctccaatatgtcttcatgctatccctgtgtatttaaatattccgaccattccttattcctggaaacctctgacctgctcttggccccttcagttttgcatttttccagaatgccatataaatggaatcatgcagtatgtaaccttttgagaccagcttcttctttcacttagcataaggcatttgagactcaaattgctgcatgtatcaatagcttgctccttttttatagcctactagtatattccattgtacagatgtaccatagtttgtatatccatctacccaatgaaagacatgtaggtgatttccagtttgtgatgattatgaatgatgctgctacaaacatatatgtacatgttttgcgtgaatgtacatttatcatttctagataaatgtttaagactggattgctaggtcatatgatgaagtgtatctttaaccataaaacaaactgccaaccttttttcctgagtgactattacatttagcaaaccaacaacgcatgagagttccagtttctacacattcgtgccaacatttaatatggtcaattttgttattattgtcattgattttagtcattctaacaggtacatcatggcatctcataatgattttaatctgcattttcctaatgactaataaagttgagcatcttttcatgtgtttatttgctacctgtatatattccttggtggagtatctgttcagatctgttccccattttttttattgttgttggttttcttaatgttgacttttgaaagctacatattcttgaaatttgttctctgttagatacatgatttgcaaatattttctcttactgcttcttgtcctcctcttcctcttaacagtctcttcagcagagcaaaagttttaagcttcagtgaaatccaatttatcaacttttttcttttatggattatgtttctactgttgtatctaactcaatgcccagcccaagtcacaaagccttccttctatggttacttcttggatttttatggtttgaaattttccatttaagaatgtgattcaccaatttttgaacatggtttgaaatataagtcaaggtccttttttttgcatgtagatgtctacttgctgagaagactccttttgccattgaagtgcctttgcgtttttgtggaaaatcattgaccatatttatatggatctattattggactattttgttctattgatctatggctcttcttttgccaatatcacactgccttgataataagtcttcaaactgagtagtctgactcctccatttttattgttcttttccaaaattgttttggctattttaattctttgcttcccacgtaaattttaaaatcatcttgtcaatatctacccaatcctgctgggattttgatggggattacactaaatagtgtacattaatttagggaaaattgacttaggaaactaattaaaactaattagggaaaacatcttaactatgttgagtcttcccatccttgaatatattatatatctctgtatttattgaggtcttcttcaattcctttatctacatatagatactgaacataccttattagatttataactaagcatttttttggcaggaaggtattataattggtactattttttaactttctgtttctgattgttcattgctagtataaagaaataggattgattttcctatgctgatcttacatcctgtaaccttaaaaaactcgtaagttctaggattttttgaatatgcgttgggattttctacatagacaatcattatacgcaaattaggtagatttatctcttcctttccaatccatatgccttttatttctttttcttgacttcctgcaacttccagtactatgttatataggatttgggaaagtgaacatctttgcctcattctcagtcttagaagaaaagcattcagtctttcaccatgtatgatattaagctgtaggttctgggtagatgtcctttataagtttgaggctgaggaaattcccttttattcctatttagctaagagtatttattatgaacagattttaaattttagttttttctgcatccattgatatgatcatacagtttatcttgtattagtctgttaatatggagacttgcatagactgattttcaaatgttgaacttggctttcattcccagaataaaacctgcttgattatgatatattattttacttgtatacatacatagataatgtatgttgtatacatatatatgtatgtattttatatatgttgctaaattcaatttgctaatttttttcgaaagttttacttctttgttcaaatgagggatactggcctatagtttgtttgtttgttttcttctactttctttgactgattttgatatcagaaaaatgtcagcctcataaagtaagatagaaactgttgtatccttttcaatttctggatgatactgcataaaattggtgactttttgtcttaaatgtttggtagaattcacccaagataatctgggtctggcatttcatttgtgaaagatttttttttaactataaattcaatttatttaacagatataggattaatcagataatctatttctttctgagtgaatcttgatagtttatctctttcaaggaatgtgttcatttcacttaattgccaaatgaattggcataaagttaggttcagagtgaaagcactaaaccatcttctgtggacttgattcatcagaatagttttcaaagcctttaaatgttactctggttttcccaaagtacgcaccacccagaggctagtctgggcactgttctatgctgtagctcagttctcaaagactttgctatactgattctgtccggttccatgtgtgaagctcaaggataagcctgagacttcacacacagattaaaggatccttttctccagcccctcttctctgtgatttcccccgtactctgcctcccagtggcaccttttcttggtactctggcttgaaactgggagtttttccctccccatgtttttatatactttccattactgtgtcaatctggagaagaaaccccaaaagaaaagagtytaagaggctactgcaagagtcctgtttcatcactagagcttgcctgccttagggacagaagagttggtggggaaaaaaaaaaaaaagattacatcctgaagagtccccctttctatgtctttgacctgggagagggttttcattggagaattttctgtccttgcccagtgcatagtgccagggtccaggatgtcctaggatccaaaccaggagatatggaaagaaaagataaacaaattttttaaaacacaagaaaatgacctccatatgggttaatctttgagtttttaattcttcttagtatgtctgataattacttttcagagtcctcaagcagttcctatatgtattctttaggtactatggttttaaattataaccaatgagagagatagggtgcagggtttactcatttttaccgagaactggtaattaaagctaataattacgaccaggcacggtggctcatgactgtaatcctagcactttgggaggccgaggcgggcggatcatctgaggtcaggagttcaaaaccagcctggccaacatgatgaaatcccatctctactaaaaaatacaaaaatcatccaggtgtgggggtgcgcgcctgtagtcccagctactcggaaggctgagacaggagaatcacttgaacctgggaggtggaggttacagtgagtcgagatcgagccactgcactccagcctggcgacagcacaagactccatcaaaaaaaaaaaaaaagctaataattaaaataataataaattaaagttatgtaacctttatattttatttagccaagatatacaaaataacaccatttcaacatgtcatcaatataaaagttatcagtgagatattttatatttttaaatataaactttagcatctgatgtgtatttcacacttaacagcacatctcaattcagactagccacatttcaaagactccatcaccacatgtggctagcagcgactatattggacagcacagatctacaggaaacactgattaggaaagaaggaaacaaagggaatgaagggaaggtaagaaaggtcacttaattttccatgactatctccatgtaaaatgtcctccctgcctcattagataccacactctgttccttggcagttattacccgttgaaaaaagttctttcttatattgaaacagaaaatatagctacaaatcacttttacccactaacactagttctaccctaagcattattctacacgatagtccccaaaccatctgcagatgactgtcaggtcttcttttaatcttctcttctccaggttaaatatgcctagttctttcagtggttaataataagacaattttcaggaaattaagctacgtgattcttatgtgtatcagagataatatacatgttgttgattcttagaaaattagactaattcagaaaggggtattgtccatcttcagatgtaatatgttttaaatgaacttttaaccttgtatttttgttatacttatttcggtgcataaaacaacaatattttaagccaaatgctataaattagcattactttattgagcaataaatattctactgcagaaaattttagtcttagtgatcttctaatgcatattcacaaactgtttcattactgcaatttgttatcaactctttaataactacaatgcaagtgacactataaaaaagaaagtaagctttttcaacctttctatgattgttgtagttttaaaaagtagttcagaattaaatataattttaaaacaaatcagtaatgatccttgtcatgaaatagtaaaacattgaaaaaaaaaaacacatgggaaaatttagcaagtaagcttgatttttacatacccatatacacattcacacacccttgatttaggtgtagctcctagaacactatgtatttacatttatttttcttttaatgaaatatcgtagtgagatggatgttgtaaagttggtttaaacatacagaataagtagctttgtatttactgataagaaaaagagacattgccatttggaggaaacgatgaaaaaccctgagatgtgaagcaataggaaaaaaacagtaatgaattattctatacttgaacaagcttaagaaaaagaacatgtgactgtaaagattttggttaaactggcaggataaatcaagatgttttctcattctctaaagataaaattttcatttattaattcattcaatccctcaataaacatatacattatgttaagtactatcactgacagaaaaagagttaggagattctgccccaataaagcttgtagtattgattcaagatactaaaaacactgggcaaaatgtttttcagaacaggatacagtcccaaagtgtcacttcacagatcactaattcattataattgagaaaaggtatctttataatgagaaaaactggtagacaccaacttaatttaaacaagtggtcaagcagcagcaacaatggaagaaacatatcatgggccttgtggtaactgcactgagaagtatataacatcacttattttaaaagcttgacaaatatgtttaaactgaatacagccatgaagagaaaatcagataaaccaaactgtgggatatgttacaaaacaacagccccagactcttcaaaatcattaatcattaatgtcatgaataaccaaaaacaaaaagaaaagggtaagagaattgttctagattaaagaaaaaaatttaaaacattttttaagtgtgaccagtaaacataatgaatgatctttcactggatcacagatctggggaaaaaaaagctaaaaggatattaatggacaactgggtatatataaatatggaccacacataagatgctactgtaaccatgttacatttcttgagtaygatcatggcattgagattctataggagaaaaatgttcttttcttgggagatatgtagtgaagtacttaggggtgaagtatgaaaatatttgcaacttactttaaaatgactcaaagatttagagatagatactgtaaactatatatctatatcagcatacacatatacatgtgagtagagagagacttctaaaacatggcaaaatgttaacaactgatagattaaataaagggttgacagatgctcatagtacaatttgttccaatttttaaaaggcagatgttatcctttaaaataacaatttgagagaaaaatataacacaaagtaaaaatgtattagcatcacaagaaatgaacaaataacacaccatgcaaattctgaaaatacaggaattagtcaggatctaacagatgacttcattgaagaagtggcactgggactgggaattagmcaataaaactctaaaaaagttaaaaatacattaatatattcctttataaaaagtgaaaaaatatagcatatagactatataccaaaaaaattaaagaataaaaaggatttggaaatgaggatacaaagggaacatcatgagcaaaagcagagtagcaagaaactcagggtgtacctgagaagtgtagcagatgccatggtgacccaccatactcccttcgtcctcccacccagaggtcacctgcagctctgaattcctgtaaaacagagtttctaagccatgggactactgacatttggggatggataactctttgctgtagggggcaaccatatcaactgcggtatattaagcagcatccctggtctctacccactagatgccagccagtagcactttttccctcccccagttgtcactaccaaaaatgtccacagaatttaccaaatgctccttgcagagcaaaataacctcctcccccgtcccgagccccaacctcagtttgagaaagaaccactgccagaaatcgtggccatccagctccagtaactgcatctgtctgcataagggcattacctggcctagaaggtagcttggccagtatataaaaaggctggactacttggaagtgaatgacactaagaatgaaggatgagggtggatgtgtaaacaacttccttgcccttccctggcacaatactgaagtgactttcacatagctggggggttgtgagtgaaatttaaccccacttaacaacagcaataacctactcttcaatgcaccctattttggcttttctccctctctttctcttccccaccccctcactgtgcttccagagatcacctcctatattagtccgttttcatgctgctgataaagacatacccaagattgggcaatatacaaagcaaagaggtttaatggagaactcacagtttcatgtggctggggaagcctcacaatcatggcagaaggcaaggagaagcaagtcacatcttacatggatggcagcaggcaaacagagagcttgtgcagggaaactcccccttatagaaccatcagatctcatgagacttactcactatcacgagaacagcatgggaaagatctacccccacaattcaattacctcccactgtgtacctcccacaacatgtgggaattcaagatgagatttgggtgggaacacagacaagccatatcattccacccctgacccctcccaaatctcatgtcctcacatttcaaaaccagtcatgccttcccaacagttccccaaaggtttaactcattttggcatccaaagtctcatgtgatacaaggcaagtcccttctacctatgagcctataaaatcaaaagcaagttagttacttcctagataaaatgagggtacaggcattggrtaaatacacccaggtcatgctgatgcaagaggtggattcccatggtcttggacagctccacccctgtggctttgcagggtacagccgtcctcccagctgccttcacgggctggtgttgaatgtctgtggcttttctaggcacatggtgcaagctgtcagtggatctaccattctggggtctggaggatggtagccctcttctcacagctccactaggcggtgccccagtaggaactctgtgtgggggctccaaccccacatttcccttctgcactgccctagcagaggttctccatgagggccccactcctgcaggaaacttctgcctgggcatccaggcatttccatacaacttctgaaatctagacagaggttcccaaaccccaattcttgacttctgtgcactcgcaggctcaacaccacatggaagctgccaaggctcggggcttgcaccctctgaagccatggcccaagctctacattgttccctttcagccacagctgaagcaactggggcgcagggcaccaagtccctaggctgcacacagcacagggaccctgggcccagcccatgagaccacattttacccctaggcctctgggcctgtaatgggaggggctgctgtaaagacctctgacctgccctggagacattttccctactgtcttgaggatcaacattcggctcctcattacttatgtaaatttctgcagccagcttgaattttctcttcagaatatgggatttttttctatcacattgtcaggctgcaaattttccaaacttttatgctctgcttcccttataaaactgaatgctttcaacagcacccaagtcaccttttgaatgctttgctgcttagaaatttcttccgctggaaacctaaatcatctctctcaagttcaaatttccactaagctcaagggcaggggcaaaatgccgccaatctctttgctaaaacataacaagagtcacctttgctccagttcccaatgagttcctcatctccatctgaaaccacctcagcttggcttttattgtccatatcattatgagcattttggtcaaagccattcaacaagtctctaggaagttccaaagcgtcccacattttcctgtcttctgagcactccaaactgttccaatctctgcctgttacccagttccaaagtcacttccacattttcaagtatcttttcagcagcaccccactctactggtaccaatttactgtattagtccattttcaggctgctgataaagacatacctgagaccaggcaatttacaaaggaaagaggtttgaaggagaactcacagtgacatgtggctggggaagcctcacacaatcgtggcagaaggcaaggcggagcaagtcacatcttacaatggatagcagcaggaaaagagagagcttgtgcagggaaattcccccttatagaaccatcagatctcatgagacttattcagcatcacgagaacagcatggcaaagacatacccccatgattcaattacctcccacaagtccttcccacaacacatgggaattcaagatgagatctggggtggggacacagccaaaccgtatcatcttccagtgaagtatatgtactcaaatttttgtctcagggtcttctgtttcaggaaccaaacaaaggcaggaagcttggctgttcaatgaagaaatatatgtttctcctggagaaatgaaatttttgatatctattcatgaccctatgtgattttataaaatcatatctctgacagttctgcctgttaaatgacaaccccacaagaagagagcacttagtctgggccactaaagatcaatgccataagataaggctttggtatttctatttctatcctacaactagtaaaggaaggcagcaggtctgtgcccaaaaggcaaataaaggaacaaaacaaacaaacaaagctacttaatatagaggagaatggttcaagctattaaagctgcttgatgtaccaaattaatcaaacaaaaagcatagcctgagccctgggagagtctggtttggcaactcactacggccagccagacattttcgcagagtacagcaatttctcacaagagttacagctgatgaggggtgaggggacaaagactgaaaagactggcctgaggcccagagtttaaaaagtacaagatgagcctgaaacatctggtcatgccagaaagcaagaaactatcaaaggctttgggggtcagatcaacaagacctgaagagccatcatgcagaggctcctggtcaaagacgaatgaatttaagcatcagtaacaataactgtaatgaattaaaacacaccacattattttaaaccyaggagttaatgatatattaacaaatcaagttgtcttcagaagatgtgaaagatctacacattattttgaaaactggaaaataaagaaaaagaaagaatttatcctatccttcctaaaggaacctgtactcaggattaccaaatagttgatcaggaaaaactctttacacaagtattccaactaataaatgaagaagaaatgacagaatatcaccattttgcaacacttaacaaattaacggatctaagcaaagacgactgaaggttgccatattatatgcctctaatgaaagaatatgttacctgtgagatagtctttgccagaaaccaaaaccaaaacaaaacaaaacctgaacctgagtaagcctctacatcaaactaccacatcaaatgacaccacagaaatgaaatcatcaaaatcaaactgtggaaaactagagaacaaatggcccagcttctttacaaataaatataaaacaaagaagaaaaagaagacagaaaaaaataatgaagagaaggcaaagaaatgagaaccaagagaagaagaatatgaagaaaacaaggaggaggaaaaggagaaaaagacaaagaaaaaaaggaggaataagggaacaagataactgcaaataagagagctaaatgacatatcaacctattgcaatgtgcacacaatcagtatccacacaactgtaaagcacacacacattttacatatgtatgtttgtatatgtatgtacatatgtatacgtgtgtgtatatatatagcaaccaaaaaaattgaataatgactagtaataaaagatttaaggattagcattgattttttttaaagtgtgtcaatgatattaaagttgtttacaaagagagtccatagcttataaagacacatactgaatacttatggatgacacgatatgacgctcggaatttgcttcaaaattatttgggaaaaagctgatggaggacatatgaaatagaattgaccatgagttgatagctgtgaaactgtgtgataggtacataagagttcattataccattctctttacatttctaagtgtttgaaattttccatttcaaaaatatttttaagtgattttctccaagactccacatattgccaccaagatttgatttcacacggtaaaccaatataatttacgttgaaataattttcattcagcatacttacagagttggaaaaaaccttataatgaaggcagccagaaattttatcaccaaaaatgggacacccagagtgggaaaaaagggcattattaataattaaccaggacaacagacatagagagggatatggttaattgccctccatatcttattcagctcagtttctgacatagttgaactcacaattatcccttaaaacataccccatctccaataaggcagttatactatgtctatttcaatttctcctgtaacaaaaacctcattatttcccaaagcagttccttatattagaggacaacatcaattattaaaaactctctgcagagtgaaaatctgtttcctaataacttctacttggtagcattggttttattttctagaagaacagaatgtgatgagtagaaagaatccagaactgagaacagagaattggatctgctaagaaccaataaaatcatcttggacaatttataaaacctaaaacctatctaagcctccatttccacctctttctatctttaaaaaccagcactcttagcttcttcaagcagtgtgtaatgtgtcatgatttctgtcgaacacaccctaatgttgttcctacactgtgctgcccaaaagtcaatacaacactcatgtatggcctaccatattacaggcacagcacaacaacctcattccacactgtagacccaaagttttgctaatccagcacaagactgggttagcttttgcagtaattgcactacattattggttcatactatacatcgcagataattttttcatgtaactgctttcctctacttatacaactaattttggaaacctaaataatggatgtcttcatctgttttgtgttactatcacagaatacctgagactggggaatttatataaagaaaaaggtttatttagtgcacagttccacaggctgggaagttcaagtttgagcggtcaagtgtggtagcttctagtgagggcctcatgctgcatcgaaacatggcagagaaatggaagggaaagcaggtacatgagaagggaaaagggcaacacatgagaggttcattttataacaacccactctcttgggaactaatccattctcatgagaactaatctggtatcaagagacatacactaatccatccatcttcatgatctgatcacctcttaaaggtaccacctctcaacagcactacattgaagacaaagcctcaatatggcaaaccatattcaaaccatagcaatggactttactcttattacatcctgctgcttccaaaccaacgtactaacctactgggatagaatgaaattttgtcatatgtcacagtagctgtctctttaaacttgagtcctccacaagttgaacaagtatgttatatcactcagaaaaatgttgaataaaacagagtcaaaaatacaaccctagagtatttcatctgagattttccaatgattgttccatttactgcaaatctacttaactatattttggtataataacatatgaaacatctagaaagacatcagagggaaattgttaaattttctgctgaaatgatttgctatgtcagctgatctaccattaaaaaaccgttaagactagtttggtataacttgcttctatgtaaatccatgttggctactaaagatataacaggttttaaatgctctcagacaatttactgaatcctttaagaatatatccttccttcttttctttttcttttttttttttttttttttttttgagaaagagtctttctctgtcacccaggctggaatgcagtggtgcaatctcagctcaccgcaacctctgcctcccaggttcaagcaattctcctccctcagcctctggagtagctgggattacaagcatgcgccaacaagcccaggtaatttctgtatttttagtagacacggggttttgccatgttggccaggctggtctcgaactcctgacttcaggtgatccacccgcttcagcctcccaaagtgctgggattgcaggcgtgagccaccttgcctggcctctccttcttttctttaaatattgggacaacgatttccttcatctatagtctgctgccattatccacaatttcttcaaccagatgattactgtggtaattctagtaattccacttgtcaaaaagatcaacactataaaaggaattttggtatggttaattagttcaaataagaattctgctgagagctcctttcagtaccataaarctgtcaatgcaaataagaaaataaagttgttttgttcctasgacaaaaatattttttgaatgagcactgtaatgttgtctcgtggataatattctttttaatgatagtagctacatatgcatttaccaagaacactactaaagcaattgctacaataggtagtaaattagatgacatcaaatggtctttagctctaaaaacatatgcagttctttcagttcagttaattattaagatgacataaattctgacaaacccatgtttcttaagaggtactatagcaaaatagtagcttgaagagctaatattctattttaattaaatttgcttttgaccatatcaaatttctttctgatcccttctgtttcataaaataaaactgggtacttatttaaatcaaaagctacagttaaaatcttttgataacttcatttctaaatacattttaagtacatttgaaaatgaaaacccaattttttcactcacaaatgctcaaagagtttagctatacgtatctggtccactttattatcttgacctttaagtttccttccctcatatttcccacattaaagaaaaaccaccaggcacagtggctcacacctgtaatcccaccactttgggaggccaggaggatcccttgaagctaggagttagagaccaccctaggcaataaagcaatgccctgtctccataaaaaattaaaacattagccagatgcagtggcttacaccagtaatcccagaaacttgagaggctgaagccggaggattgctttaacccaggagtttgaggctgcagcaagctatgattcagtacattccagcctgggtgacacagagtgagatctcatttcttaaaaaaaagaaacaaacaaaaatttccaaatgattttagaaagtagttcaaaactgttgtttaacttatgaatcaaaaagatataattaaggggggccaggcatggtagcacacgcctgtaatctcactattttgggaggctgaggcakgataatcatttgagcccaggagtttgcgatcagcctggacaacatagtgagaccccatctctacaaaaaaaatttwaaaattagccagatgcgggggtgcatgcctgtagtcccagctactcaggaggctgagatgggaggatcacttgagcctaggaggtcaaggttacggtgagctatgattgcaccactgcactccagcctgggtgacagagtgagaccctctctctcaaaaaaaaaaaaaaaaaaaaagataattaagggaattagagatgtattaggccaggtaatagaagtgaatcacaaatccatattactgggtcaaggcatagaagatacaatcacatgctaactacagatactcctcaacttacaatggggttacctcccagtaagcccatcataagctgaaaatattgttaagtaaaaaatgcatttaataacctactgaacatcatagcttaacctagcctaccttaaatgtgctcagaacacttacattagcttataggtaggcaaaatcatctaacacaaagtctattttataataaagtgttgactatctcatgtaattgattgactactatactggaagtgaaaagcagaatggttgcatgggtactcaaagcatagtttctactgaatgtgtatcactttcgcaccaccgcaaagggaaaaaatcctaagttgaaccattgtaagtttgaggatcggaccgtctgttgtcttaaaaacacatatagcaaaataaagcacttaggactattctctacatctcaaagctgaaactgagcctttgtctcacataagcctgattaacttctcaccctgtcttcaccaatttctgcaggtgatttctgtcctcagaaacaaaaaaaaaataaccaaccacaagttgttactcctaaagtgtctaagagatggccacacaataatggaagtttttcagtttacttcccaatgccaactgaccaccaccttccccagctgatgtatggcagaaggcattagcatctgatagtgtgtttgcttcctattcagcaaagccattgcttatccttatttctcatcataagcagttgatttgctcttatctactaatactgagaagcaggttattattgtatgataataaagatgatatttatttcctaacatgtgaagtggaaaaagcattgggcttgggactcagaagtcctggacttgagttccaggtccctgatctcccagttatttgacctcaggctagtcacttaggctctgtggtcctgtcttatatgtaaagcaagacagccagccctcagaaagttgttggaagattaaaatgagatcattttaagtaaaactactttggaaaatacgaaatgttatatgactgtaaatatttctttctaattcctagctgagctacgcaaagtagaaacttaaggctgatgtggcacagctcgacacagacaagcaacacttgccaaaaaatcagtagaaataaccacagaatgctagctggggagaaaaaaaaaaccacaccaatctttctttgaattctgagttcattgtttaacaatgagtcttttgctgactgcacacacaggcacaaaccagagcactagcagcagaatcaaacttgcacacaaagggcaatcttggactatgccttatactttagctcccacaaaatagtgcttggaagtctgtgcaaaactccacccgccttcacaaactttgtgaaaatcaagtttattagcctgtggaattcatgaaaaaaactgaatactttctactgtcaaataactctgaaatgcccagtaactggataagaaagatgtaaaaaaaatggtatgaaggatcctttgagttcacacacgacagatctaaacaataagtctaacaatgaacaaaagcaagtccagtaatccacagaagatgaagtggggaaaaaaatctattgaaatgaatgaaaaattaagatgctgaaaaattaggatgaagcaatcagaattcttcaaaagtagacataaaaaatgcttttcagaagcaatgaatgaaaagactaaaaaataaaaataaaactatgaccagagtaaaaacggttaaagacacacaagctctagccaacattcactgaaagtacgaaaaaaaaaaatcaagcaaaagaaaatgagcagtttttcaaaagcaatagcatcaaaatggcaattttttctgatagtttaaatgtaagttgatgataacaaaggacaaagacagttgtgcctctgccaggaaaattacgcaagtcagacagaaggaaatcaagcagtgtctgtgacagcgagttatctacatgtattgcagttttcagggaagaagtagagaaagaagcaaacacaagtcacaacatctcagaagtgccaaggtcactccaacacagcaggaaaaaaaaaaacagaacattaagaaatattgaaatagaagcatgtgacagagattaaaagtgaaatatattagactcctgataacctaggagcaaattctatcttctgactagactacataaagattggatatatcacagttatcctgtcatgaaactactgttcttttatccagtaatagtattttaatgaggctctccagcatctctcttcatgaaacattaattaaaagattccaacaattaattaggtatcttatgtcactaaatggaaaactgtctgtctaaaacttgcaggattcctaggctcttaggaccatatttaaacaaggagcatgtaatccttcacagaaacaatacattgactcgcatgtggttggtgaccagattgctggatgctacagaaaacaattcttacttttrtagaagcaactctgccactcaattagcaactcatgctgagtcctcaatttggacaaaagctctctaaagcttcatagttagaactggagatttgttgccttcttstctcaagaaagcacttaaaatctaagtacccactctaaaggtggtgtccttccatttcacaaaactacaagtggctttgggttattcaaattcctcaagttatcttgagattcagaactcacgaacacagagccacattgagcccaaggcactcctctggaaaaaaccatctctccttcttctgcagggctcaaagtacttcacactgatagtgtatactgtgtgcaaattctcccaaggaaggcagaccactcacacttaatgacaaaatgccaagcctctgtctgtctttcctcacaagagtatttgttaggcaagaagctaaaggtcagtcatctataccatcttcaatactttccaccaagcagccaggcctttgtagaccttctacctcttggcaggtgagctctacttcaacttcataaaaaataaaaattaaaaaaaaactaaatatacatatatacatatatatgtgtgtgtatatataaacatatataagtttatgcatatatgtatatgtatatatgttatatatatacatttataaacatttatatgtatatataaaatatataaagcagccagtggaattcttgaaaaaactaaatgctgtttactgtcatcagttgtgaattcctcaccctttctcctcaatattcacccatttctttcctaatccttttgtcttttccttctccctctggagacttaacctctatatctctgctcttctccccatctcttccaccctcctacaggctcttgtccactcctattcttcagggtctacattccaattactactgccacctacaaaactaccccaaactcagtgcttaaaacaaccattttcttatgctcatagattctgtgggttagaaatataggcagaatgtagttgggtgattcttctgctcctcacagcattgactgagatcactcaatggtgttcagctggtagtgctcagtttgaaaggccgaacacaatttcactgacatttctgatgcctgggctgggaaacctccaagataaaaactgacaactgcagcacctacatgtggcctcttcatgtagtttggctacctgacagcatggcaacctcaatatagacagacttcttatgcagtggtgcagggctccaagcaaaagtattcctgctagagtaagatgaaagcctcattgccttttatgacccagccttgaaagtcatacggcataataagcatcatattctgttggccaaaataatcacaagcccacccagattcaagaggaggaaaattatacctggaggagtggtaaggtcatggtatagaagagcatgtggaatgggaaatgctgttgtggccatctttggaaaacacagtctgctacagtctcttacttaacttactacttccttttcatctaaaatcatgctctaccgaattcttttttaaaatgtctactcttagtgctgtctagagtaggcttagataaagaaataatgagatggtaattctaggcagagataaaagaagcaaaacttagagggtagaaagcaaattatgtgctcaaggaatgttgaagaatagcagatagtgttgaaaagtgagcttaaggacaggctatcaaggcaatctggtttagtagaaaatggggtaaagagaatgctggaaagattatgatggtgccaaaaaaaatggaggccatcaaatactgtacttcaaaatttggactgagtaggtcctcaatagtaactggtgcatagatgaatgaattaaagtactttgaaaattgtggatccttttctttctacaggagattgtcatccctgcaattgcctggcacttgttttacccaagtgtagtgagataatgttgcagaaaacagaaaaaggagaaacaggaagacaataaccaacatttttttagccagagaagaaacagttttgcaatttgctctacactgggatgaccaaagcgtctgatttcaacattaagtagcattcattccttagtcatgatatactttaggcatactgtcgagcaacacatcttgtgtctaaataatcatttcatgatttgcttatcagattcatcccaaggacagaatcaaaagctctgctaaaattgggataaattaaatttatcttttgcttccaatgtactatactcatcattctgtaataagaattgatctattaagaattgttttttacaaagcaaaattggttagtcctatactagtccaaatgttggcaaactacttttgtgattctttttctgagttctttctaaatatgtatgtcaacctgctctatataaccttcataattatcttttactttctttaatgcagaaactatgctgctgcttttcaaatctttagatacttccttatcccactggaagattcccaaaattacctagtgtccttccaattaagaatttccacataagacatcatcttttagtgcctttgtatcactcatttaataaacatttcctgattgtctactgtgtgggtcatcggcaacagatcttggaaatcacagaggattcttgctcctagaatttaacaatatattattttagagactaaagatttggtttgatagaaataatctggacatcaaattctttcatatctcaaatccaaaaatttcttccttcatgccatccttagcgcactatcaggatttggggtgtttctatgatgttattgcttgatacccataaatctgacataaatttggccttcaaaaagtttactatttttctataaagcagcacaacttatctttcctttcccttcatttatgttaggaaccagaacataaaagaaaccaagagctacattaataatcttgtttaactctacagaagatatggttttcgtaaagatgaaaagaagacaactcagaagtataaaagatctgtgccatcatagattattaagaataccatttaaaataattcatgcatgaggttgtatcctctttataaacaggttcctctcttaggtgaactggggtaaaggtaatcaccattctacaggaaaaaaaaaacatgttgccaaaatgtgacctgtgagtcataagaaaggaggaaaattgctcatttttctaaatctcacaacataggtcacccattatggaatgagaaatcagaaacactaaaacgatacttttattttaacattaaatagtccaaaaaaagtgctttaactatctctgttcgtatagtttgaaaatccagtgcaaatattcaagtcatacccaaggtaaatagtcttacccaatgctgatattaggaatagaaaaatctcaatgttaagggaataaaacacagagaagaaattaggccatgttactgtccttgacaatcaaagcctaaaacaaaataaaactaaaaattcccgtgtgactctgaagacaagcataacttcatttgcaatggggaggaaacttccactaatgcacatatctgtgttatggaaaaaccagacaagatttacaaatgatataaaagatcactcaagtttttgccctagaccaacaaaacgatcagagtaatttcaaattgctacctagtaactttagaatttgccaaagtttgaagttttttgttctttaaaggaagaaagcagcaatgagtaacaatagtgtgcttcctggccttaggaagagtgagacaggagctctccagctgcacttcctagcaaagtatgccagctgccttctgcaaactgagatcaaattgccaagaacttacaggagagcagttatgatggatgacctaaaatactgatctgttgcaaagaggatgtagtgcaaaccacacaggaactgacaggaaatcagcccttgggctggcaactacagattcaagaaggctaggaatcctggacctttgacagccaaatttcatcatcttcctttgtaggaagagttacatttctgagagagcagtctgaaaaatcttgtacaaagctttttggtgtctattactatttaataatactgccccctgcctgaaccactggtttcctcacatgtgttaaaagcccatcgaaggtcccagagcactacttgaccaaaaatcacatgtttgctggcacacaccttcattctctcagccacgagcccactgaatgccataaatgattcacaggctgtcatggtggtaagaagaaaaactaatatttggagttcaccaaatagtgagtcatatttctggaagaaaagaaagccttacaattggcaatgctttggcatgaaattttaaaaattgtttttaacattaatattaattcgacgaaagttggcaaaaagaaattgattgagaaacgtgatatttggtcggcttatgccacataaaagtccagttcatgctccaagaaaaaggatgagtaggatatctattacctatttctagacttgccttctgtactcactgctgccaagttactcattctcccacacaacactttccatactaattttgacccttaagaatcaaaaagaagtcttgccttctttgctcccaaatgccaaaatggaatcttttagtatttcacctttataaagggaatgtttgaaaacagccctctttggctgtgacatcagtgagttgctgaggcctccaagggccggaggaagcattcccagtccctcacagtgctgctgcactcctacggtgcaatctggcaatggccagcgaccaaatctttaaagctgttttatggtatttaacatatggtcataaattgctcagtgctctaaagaggggctaaatttgccgcccctattgatgagacatgttcttatttatttaaatttagtggcaagctggcatttctccagatggagaggtttaggcataagtacaaaggaagaactaactagaaatgagttgtaacttttctatacactgaatgcaaccccacaaactcaggcttctgtgcccaagtttgtgcaccgctatcaaacacagcttaccaaatagaaagacaataatatgaaaagactctaatttctaagggccaaggagggatgaaacaaattttattcagactggatacgaattttgtttttaatctccttctctttctcctcaggctagctctattcccacccatctctcttacctgtctctttattcccctcacaaattagatgtatctggtcttcatctgaaatcccacatctgcaaaactctctagaacttccttaatcttctggcattcaccttcttattttgccatatttttcattgtttattttttaatggttttaattttccatcactaaaaacatgatcatacttaaacattttgttcccttccttttacgagctagccctgtagccaaaggcagaaaaaaagaaatattttttttttttttggtgagatcgttggtaatgatattaatgtagatggtatcaaaagagaagtgtgggcccagtgcggtggttcatgcctataatcccagcactttgggaagccgaggagggaggatcacttgagcccaagaattcgaaaccagcctgggcaacatatagagactctgtcactacggtggttcatgcctgtaatcccagcactgtggtaggccaaggcaggaggatcacttgagcccaagaattcaagaccatcctgggcaacacaggtagaccctgtctctatacaaagtaaaaaaattagccaggcgaggagctcaggctcctcccaccccagctacttgggagcctggggtaggaggatctgcttgagcccaggagttcaaggctgcagtaagccatgattgtaacactgcactccagcctgggcgacagagcaagcctctgtctcaaagaaaattaaaaaataaaaaattagccagacatagtggcacacacctgtagtcctagctactcaggaggatcacctaaactcaggagttcgagtctgcagtgagccaagattataccactgcactccagcctgagcgacacagcaggaccttgtttcaaaaaaagagagagagagaagtgtgaagggtagagccactactggttttctttttcacgtgccaatatagaactggctaaagaatcaaaagttaattatcttgcctaactctggaatgtgaagaaagatttcaataaattggaggtttgacagcagcctgggaacagtattaaaagaattattctatgaagaattaggctgtttatatcagacagaagtcttgctttttaatttcaatacacaattgtttcccctgaagcagacctagtgaaaatcaacggagatcagtggtcggataatgctacatgaagcctgctatgcatcccaaactggtctggagtgcctgtaacatttggagcacccataatatgtcccaaaaggtcttatgccaacttctgtctcaaatatcccagagatgagaacagttcaatgcccttaagagccagaataataaagaaaaagaatagttcaaaacaaacataaatacattggtgccctctggatacttccattaagcacctagtttcctaaacacccttcattatgaggccaggccagaatttttaaatctctgctttaccaactctgaaaaagtatgtgtcctgtcttttctgatatgaagacagcattaccagtgccataaacttgcaaaaagggaatcactctgaaatacaaagataactaatagaaatgtaagcatttcttgacactatgtagactcatcaatccagcacacaataatcccattaaatgtaaatggtctaaacatcccaattgacaggcaaagactgtcagatttaaaagtaaaatccaattatatgctactcaaaagaaatctaaagacacaaataggttaaaaataaaacaatggaaaagatgtaccgtgtaaaattaatttcaaggcaaacaacatttccaaggacaaagagtgtcaattcaagaggacataacattcttaaatgtttacaaatttaataacagagcttcaaaataaatgaagcaaaaaatgacagaacagcaagaagaagtagacaaatccacaattatagtttgtgatttccatatccttcttccaataattgatagaagaatgatgcagaagctcaataaagatatggtacacatttaaacataaacccataattatagtcagagattgcagtatctctctttaaaaaactaaaatagggcgagggataaaagactacaaatagggtgcagcgtatactgctccagtgatgggtgcaccaaaatctcacaaatcaccactaaagaacttactcatgtaaacaaacatcacctgttccccaataacctacggaaaaataaaaaattgaaaaaattgaaaactaaaataacaaaaagaaaattagtaacaatagatcacatttgaacaactctattaaccaacttgacctaattgctattatggaacactctaccaaagaaaaatagaacacattcttttcagtgtacattgaacatgtactaaaataatctatatcctgggccataaaacaaatctcaatacatttaaaaggatgtaagtcatacaaagtatgttctctgaccacaataaacttaaattcaaattcaataaaagatccagaaaattttgtaaaccaaataacatatttctaaataactcataggtcaaaaaaaatctaagggaaattcagaacatgtgatgagtgaaaataaaaacacaacacagcaaaatttgtaggatacatctaaaacaccacttagctggaaatttatagcattaaacaccaatattaggaaaaaagaaagatctcaaatcaatgaccatgttaataaactaygaaaagaagagcaagtgaaagtaaaagaatatttaaaatctgaatggaaatcaataaaacagaaaacagaaatacaacagagaagatggatgaaaccaaaagctggttcttccacaacatgagtaaatgtttaccacttttttctttaccactagccagactggcaaagaaaacagttgcgggggagaaaggaatggccaagatcaggaaacacagaggtaacatcactacaaattttacacatttttttaaaagaataaaaaaaatttatgaaaaactttatgtcaatcaattcagcaacttagatgaaatggacaaattcctttaaagacacaaatcagcaacactcattcaagatgaagtagataatctgaatagatctaaatctattaagcaaatttaatttgtactttaaaaccttcccacaaagaaaactccaggcccagatggtttcactggcaaattctaccaaacatttaaggaagaaataatatgaattcttcacaaacctttgaaaaaaatgaagaaaagggttcacttagcaactcattctattctgaagccagctttactatgaggaaaaaaataggaaaaagcattcaaataaaactacaaaccaatatcattcatgaatataaatgaaaaactctaaaaaaactttagcaaattaaatccaacaatatagagaaaggacactacatcaaaacaatcagttcatcccaggaatgcaaggtagactgaatattcaaaattcaatgaatgaaaaccaccatattaataacattaaaagagaaaaaccacatgatcatctcaatagatgaagataagtatctgccaaaatctaacatccattgttgatttttttctgtggtagtcatttctacattaataactttattaattgctaatgaaaattagaactgttatgggttcttctgacaagatattttaaaatcttaaaatgccttttcttcactgaagccatctttagagttagttattgctttcatgttacctgtcatcttgacttcaacctgwtattttttgttctcaactctcaaattttaaaagtagcttcaagttaaggaaaggtcatttttccacagttgatttctctgaaaaacatccgtctcctgctggaagtctaggagtgaatctagaacttcagggccaactggaaattcattacgaacacttgcattggttaatcttatttatctccacaagccagaaaatgtacagtcctgaaaaaggtggtctctctgtgcacacatataatttttaaaaaggagagggcaacaggaaggggactgaggcttgatcaccaaaaaacagcacaatgaaaacaaacaatacggaataatgagcactagaattcaaattaccagatgttttaaagagatgggtgccagttttcaattcccttttcaacaccacactacaaaagaactatttttaaaaataaaaaagggttgagggaaaagaaaaaaattaaaagaatatctaaacagttgaatgaccttctgtttgttcctgataaacttaaatcacatcttcttcttccatccccagttcttttagagtatgattatcagcaattatctgaccttcaaagagaaacctcagtgaattcactggatgccctgtcttcgacaatatgattcttttttttttttttttgagacggaatctcactctgtcgcccaggttggagcgcagtggtgcgatctcggctcactgcaatctccgcctcccgggttcaagcgattctcctgcctcggcctcccaagtacctgggatcacaggcacccatcaccacgcctggctaattttttgtatttttagtagagacaggatttcaccatgttggccagcctggtctcaaactcctgacctcaggtgatccgcctgtctcggcctcccaaagtgctgggattacaggcgtaagccaccgctcccagccaacaatatgattctttgagtctcttaagatgtgctgtcattttcactgaagtaaatctcactgctatcctgtccagtgactttgagttcaatgtactcgccttccttcttattccccaagtcctaagttgaaggttttggctgctggtcagacatggtgacagtggcttcccctgagagtcttcgcacagcagcaggctggggtaggcagaccttagctcttggttttacaaatctgtctcccttccccacaggacaacactgtggctgaccattcctgattttaaaaaactaaacaaaacaaaaaatccccaactaactaggtataaaaggggacttcatcagtctgataaagggcatctctgaaaaatacatagccaacataatattaatacttaatggtgaaagacagaattattttcccctaaaatctggaacaaggcaagaatatctaatcttaaaacttttttttttattttttgaggtggagtctcactctgtcatccaggctggagtgcagtggcgtgatttcagctcactgcaacctccacctcccgggttcaagcaattctcctgcctcagcctcccaagtagctgggattacaggcatgcgccatcatgcctaagtgatttttgtatttttagtagagacagggttttgccatgttggccaggctggtctctaactcctgacctcaggtgatccacccacctcggcctcccaaagtactgtgattacaggcgtgagccaccacacccagccttaacacttttctaccaacaaaatattggagattctagtcagtgcactaaggcaggaaagaaagaaaaggcattcagattagacaggaaggactaaaactgtcattcacagatggcataattttctatgtaggaaatcttatggagtctacagacaaacttctgtaactcaaacctgagtttaccaaggatataacatcaatagataaaaaaaaaaatcaactgtatctctatatatcagcaataaacaatcagaaatttagaatttaaaaaatataattttcaacagcatcaaaatatattaaatatttaataaacaaaaagaagtgcaaaacctgtacatggaatactaataacatagaaaactaaaaaattgacaagatgattccaaattttatagagaaatgaaaaaaatctaacatttccaaaccattttggaaaaaaaaggaataaaaattggaggatatataccacctgatttccaaacttactatcaaactacagcaatcaaaactgtggtttcaatataaagttagatatatagacctacaggacagactagaaagttaagaaaaatgctcacacatatgtgggaaattaatttttgacaaaagtgcaagggcaatttaaaagagaaagagcattcttttcatcagatgatactagaatatgtggatgtccatactttttaaaaacctgtatcgtatacaaaaataaactcaaaatggatcacaaacctgaacataaaacctaaagctataaaacatttaaaagaaaacatagtacaaaaatctttgtggcatggaattaggcagtttcgttaagacaataaaaagacaagccacagtcagggagaaaatatttgcaaatcatacatctgataaaaaacttgtaacctaaatatatgaagaattctcaaaactcaatgataagaatccattttttaaaaaggcaaaaggtttgaacattttgctaaagacaatttatcacatataaagaaatgaaatgtataatagcagaaaaggatggccagaggagttgagtaggggaaaaagaagtatataatattgttaggttcttacatgataaatgaagtattatagtatttttaatggtagactgtgaaaagttaaagatatgtattctgaacactagaacagccatgggggaaaaaaatcaaacaatgacatatagctcagaagccaacagtagagacaaaataaaatcctaaaatattaattaatccaaaagaaggcagtaaaagaaatgaaaaacagatgacataacaattagaaaataaacagcaagatccagccatagtggcaatcaggttaaagattaaattacctaaacactccatttaaaaggtagacattttcaagcataaacaaagagcagaaaacaatgaaatatacaggagaataataaagaaaaatctatgaaataaaaagctggttatttaaaaaaaaataaaattgttaatcttctagctagattcatcaaggaaagcagagaaaagacacaatgtaccaatgtcagaaatgaaaggggaaatgagtacaggtcacacaggcagtaaaagaataaggaggaaatagatgaataacggtatgccaataatttcaacaacttggatgaaatgaacaaattccttaaaagacaaggctgtaaaaactcgcttaagaataatttaaaaacctgttagccctatatctgttaaagaaattgcatttatagttaaaaaccttccctctcgctcrctctctctcttgctctctctctctctcctctcttctcctctcctctcctctctcttctctcctctctcctctctctctcgcctctctttctctctctctctatctcgctccaggtccagatggcttcattggtgaattctaaccttctaagctttcaggaagaaataaaatcaatctttcacaaactcagaaaacagaggactgaatacttcccaacttattttataaacacagcattactctggtgccaaaaccaagcaaagaactaaaagtaaagaaaagaaatacagcatcaaatacagaaatgcaaagttctttaaaaagacatgagtgaatcaactccagtaatacatcagaaggatcatacataataatcaagcggaattaatctgcagaatgcaacagtggttcaacatttgaaaatcagtttatttatcatattaacagaataaaagaaataaaccaagtagacagagaaaaaaaattaacatatattaacattcttttcataataaaaactctcagcaaactaaaatagatgggaacttccttagattgataaaaaggcacctagaactgacaattacacctgatgaaagactaactaccttcttaagactgcgaataaggcaagaaggtctgacttcaccacttctacctgccactggctattaggtattgtctactgcactagatagtacaataaaacaagaatgagaaatataaattatatagattggaaaggaagatacaaaactatctttttcacaagcaaatgtgttgaagaaaatacctaaggaatctacaaaaaaattattagaattaataagtaaatttagggacatagcagcatcagcatacaaggttaaatataccaaaatcaattacatttcaatgagttcaggaaaacaaagttcaaaaaaaaaaaaaccacactactataaattggcatcagaaagtatgatatatttagaggtaaatttaacaaaattggattaagatatattcactgaaaactataaaatactgctcagagcaattaaaagtgacctaaataaatggagatgttagcatttttatctcttggaagactcagtgttaagatgttaattctctacaaactgatctacagattcccagcaggatttctgtaaacaattacaagctgattctaaaacttcyatggaaatgcaaaggacttagaatatccgaaacagctttgaaaaagaagttacaggacttatactaccttatttaaagacttcctataaagctacagtagtcaggatcgtgttgtattcacttaaggatagacatattaagggaatacaacataaagtccagaaatagacccacacttaaattgttaattaacaaatatatgatcaaaagtagctcaaaggccaggcatggtagctcatgcctgtaatctcagcaccttgggaggccaaggtggaaagatcactttaggccaggagttcgagaccagcctgggcaacacagtgaaaccccgtctctacaaaaataaaataaaaaataaaaattagccaggtatggtagtatgtgcctgtagtcccagctatttgggaggctgaggcaggaggggttgcttgagcccaggaggtcaaggttgcagtgagctatgattgctatgattgtgccactacactacaccacaggctttttattactgggtaataaagtgagaccctgtctttaaaaaaaaaaaaggtagctcaaaatggatcaacaatactaatgttggcaagaaaaaaaggtagctcaaaatggatcaacaataccaatactggcaagaatatagaaaaactaatggatcaacaataccaaatgttggcaagactgtaaaagaactagaacctcataaattgttagcaggaatgtaaaatagtgcaactactttggaaaacagtttagcccttaaaagttaagcatacactcagctaacaacacagtaatactactgctaggtatttacccaataaaaattaaaacacatctccagaaaaagacacgtacaaaaatgtaatggcaagtttattcataatagccaaaaaatagaaaaaaaaatccgaatgtccttcaatggatgaataaataaaaaactgtggtacagccatacaatgtagtgctatacagcaataaaaggaacaaagtactgatgtaacatggatgaatctcaaaaacataatgctgactgaaagaggccatataccaaaaactacataatatattattccatttatataaaattctaaacaggcaaaactgtttcagttttagagaaatgaaaaggctcagggttaagaggaaggtggtggaggggaccgatttgtgtgggtaaggaaatgttctatacctttagggaatggaaatgttctttatcttgactatggtgtggttttaagtgtttacaattgccaaaacacacagaactgtacacttaaagtgggtacattttattatatgtaaattacactacctcaataaaattgatattaaagagtgggatataaattctgacctaagagttattgtgtcgataaaataaaataatgcatgtaaataagcctaaccataaaatgcccaataagttaatttagtaatcatatcagtcatttttaataaactataatcagtaccaaagacagattatatataatacatagctataattaaactgactttataaatttaaattaataatattagttgctattcctaatatatttcttctaacccatgaattccaagaaaataaaatattctaaaactccaagacaaaggaatcctgaatatctaaggagagagaatgtctaatccagaaaattagcactctttacttgcctttcaatgagcattttgtagaacattcactaaatcaaaggtgacctgcctccacaattagcctctaaaaataccttaaatgctagataataacaatctttaagtaaatgaatctttttaaaagacaaaaataaaagtaaaattatgcctctcagcatgatgcaaaatactaagtccctagacagcatccaactttttacttagctcaactgttgcaagtcatagtaaaaatggttaactcctactctccttgcaagcattcttgcagactagaagagaactggtctagggagcctcctaaatagagagcacttccattagagtggcaggtttgtgagcgcgaatgaaaaaccaaatacatcacaagacaggctattttattattccttggtttgtcctgctaaagccaaaacagtgtggcaaaagcagaagcaggaaaggaaggcagggtatttgggaagtataatgggcaaatcagtcttgcagagcagctttctgacttggcttgttgttagctgagctctaactgggaggctggaatgtcacactgtgactggccttgaatgccaggctgagagattcagtccactaaaatactgaaggggaagtggaagcagaaagattacttggttaacattttccaaacagattattttaaatagtacaagaaattttaaataaaataacattgtcatcccaacaaaaatgccaacagctatagtcacaacggccagcttttggacctagcggccaaggttcaaaatgtatggtatgggcaaggtgcagtggctcacgcctgcaatcccaacactttgggaggccacagtggaaggatagcttgagcccagaagttcaagatcacctgggcaatgaagtgaaaccaaaaccccgtctctacaaaaaaatggtgatgcacacctatagtcccagctactcgggaggctgagggtggaggatcacttgagccagtgaggtcagagctgcagtgagctataatgcactccaggctgggccacaaagcaagaccctgtcttaataaataaataaataaataaataaataaataaataaataaattttttaagaaagaataagtaaaacagttattatcaggtgccctgccaacaatatttcacttagatggggttggtaggcaggctatgaaacaattaaagaacagcctattacattaagaaaccaaggccgggtgcaatggctcatgcctgtaatcccagcacttcaggaggctgaggcagatggactgcttgagcccaggagttcagatcagcctgggtaacgtggcataaacccatccctacaaaaaaaaaaaaaaatgcaaaaattagcgggtgtggtggtgtgcacctgtagtaccagatatctgggaggctgaggtggagggattgcttgagccagggaggcagaggttgctgtgagttgtgatcgcgccactgtgctccaggctgggtgacatggcgagaccctgtctcaaaaaaataaataaaataaaataaaataatagcacggtataacaaagcaaagaaagtgcaaaattcttatagatgagataaatcaataaagtctcaatatctatttcagctgatgcaacaacaaacttcgcaacaccactgggtcctccaggcgccatcagtttggttatcagtttctgtttgacagtcatccatgccaagccccacagtgtctctgcattgtgctacataagtaatgagcagcattctcagtttattaagctgattagctagaacaaattaatatgtaatagatcggagatggggaagcactgtgttaaaacacacacaagcacacacacacacaaaagcagcagccaaagcactcaaggagacatagatcaaaaatgaagttgaatttcaggtagattcattaaagtagaagctccagaacattatgtgcaatgtttctgtaaaaatctatgcatctgtttggccactatttaattaaatggtacattccatttaagtaacagttctgaaactgttctcattttgttttaatcattctcaaaaaatatatatttaaatttagtgatatagtatggaatccttaaaaatgaacagtaattttacactgcttctctgaggacatagaagataatatattattcgtatcacaattgatttttttctgactttttcctctgaaaggaaaagtgtatcaacttcaaaacctttgggtatttcttgacatgacttcttcactctgtcacaaacagctttgaaatatccatcattcctctcagatgataaacaactatattgctctttttttttttttgagacggagtcttgcactgtcacccaggctggtgtgcagtgccgcgatctcggctagctgcaacctccgcctcccaggttcaagtgattctcctgactgagcctcctgagaagctaggattacaggcacccgccaccacacccagctaatcttttgtatttttagtagaggcagggtttcactatgttggccaggcaactcctgaccttgtgatctgcccgcctcgacctcccaaagttctgggattacaggcgtgagccaccgcgcctggctgctctattgttaaagacaaaaaaatgtctacattttcatttggaaattctttagaaagaattcctgaaacagggtaatagatacctttctgggtatctgccaggctatgcttatcttatcttgtgttaaaactaacctctactaatcaggttgataatacatgacccagaaatcctggccatataacttgatcacaagtggtcacttggcccaagctgccaatcagatcctctctcccaggaatttaaactcaatgacaacctctctggtggccttgaattgagtcctcatgtaggggctcaggaagtcatttctacccaatgtggggagaaacagaagtcgggggttggttggggtggaggggcggttagaatacagtgacaatagaatatgttgcaggagaaagacacaaacatggacacagatgctgactggcgactatgtctaccagccttccagttcccggttctagtccctgagaacctggctgtcctttctgcccttgggcatcataggctttacttgattccttacaaagacaaataaattcttcaatttatgttagttccagtgggtttcttataataaaacagcccctgattaaaataaattgtttaaaccacagataatttcaaatgtaaaaccaatgttagcaaactgtttgatttactagccacagacttgctcaatataacttacaatatttcaataatctctcttcaaagctgcataaacagcattattcaaagaactggcagaattaagttctgtcacttcctatcaaacctcattgttgtcagatccaaagaatgaacacggctcattctttccacaaacatttattaaacctctctaaatgccagatactcaactagagattgggaataaagtatgagcaaacaggctcactctttgccctatttaaatacagtacacaaaaacacaaatggaataatttcttctagagttaattgctacagagtatgactaggatggctatatttacaaacaggtgtttatatgacactcatggctctttttatgtgaatagctgctatagctggaaaattttcagccacttcagttgcaccatcctagaccttaacgtgtatttcatttaaatcaatcttgatcactgaagattcacatttccaatatcatttaagtaatagaatatgttgcaggaggagttgtgtcttctgcaattgtgagattcaaggacttctctttacttaggatatcctttaacatttttcaatagaatcttatacaaattggcaactcttttrctggccaacaattgtctcttcacagtaaaagacctgaggaaacaataatatcattcctaatgtactataatcttctgatcttttttatttcaattatttaactttgaatggggataattctgtaagaatcaattagtgagtagaaatacgccctctctcatctctcattctcattctcattaactgcagtttcctttacttacaatgaaacagatttacagaagtactattttccaatacataaaatattttgaaaaataagtttagttacatgctattttcattaatctgcttgcagagggcagagtaaaatatataaagataaaattgattcagactccaaatctgcaaatgactgtacattcttcctgttttctgaattgttaagagcaatgttccaattacaaattccttgtataataaataacttctaaagatcaaatttctgttggcaaaaggctgatacaacagaatgccacattctttataacacatacttcaaccaacgaaaatctgaacactaaagattcattaatttatgcatgcatgcattcattctatttcttcaacaaatatttaattgaatatctttactgtgctagagactaaagatttaatttaataaacacaacagtctccatctctaactttattgagcttaagttatgaaataaaattactgtaagttctagtaaattactgaatactttgattcagcgttggttagaactatagtttaaactggccaagcgcggtggctcatgcctgtaatcctagcactttgggaggccgaggtgggcggatcactaggtcaagacatcgagaccatcctagccaacatggtgaaaccctgtctctactaaaaatacaaaaattagctgggcatggtggccagtgcctgtagtcccagctactcaggaggctgagacaggagaaacacttgaacccaggaggtggaggttgaagtgagccgagattgctacattgcactccagcctggtgctagagcaagacttggtctcaaataaataaataaataactatagtttaaaccatacaccacaagttttcaatgagatttaatgagaaactttagatttaaaaaattgtttatataaaaatgttaagactgcaaagcactgagttagccattaccctttgcttggaaacaaaaaggagaaggttagagaatatttatctattatttaccgtagaatataatttaaatctatacttactcattttcctcttacagtataattaggtttccttagaggtctgtttctttaaaaaggcaaagagctggccgagcacagtggctcacgtctgtaatctcagcactttgggaggctgaggcgggcggatcacaaggtcaggagttcgagaccagcctggccaatatggtgaaaccctgtctctactaaaaatacaaaaattagctgggtgttgtgacacgtgcctgtagtcccagctactcaggaggctgaggcaggagaatygcttgaacccaggaggcggaggttgcagtgagccgagaccgtgccactgcattctagcctgggggacagagcgagattctgtctcaaaaaaaaaaaaggcaaagaccttttctgtttgctgtgatagttatcttccaagagtctgtaaaactatataacctttcaattaagtgtgtttgtattagaatactacatttgttaaaatgtgtgttgctgagaagtgtttgttcatctaaagacgaatattatgttgattgtaggaggctgaattctatcacaaatattgtggtaattaaacactatgaccttactgatcttgtatacaatagatttaaggttgctaaaattaatggaaagcccagaaataaaaccacgcttctacagctaactgatttttgacaaaggtgccaagaacacacattggagaaaggacagtctcttcaataaatggtgttgggaaaactgcatatccacatgaagaggagtaacactagcccttacctttcatcatatacaaaaatcaactcaaaaaggattaaagagttaaacgtaagatcggaaactatgaaactactagaagaaaacataggagaaatgcctcgtcacaattggtctcagtaagaattttttggaaaagctctcaaaaatacagaaagcaaaagcaaaaatatatagattacatcaaactaagaagcttctgcacatcaaaggaaacaatcaacagactgcagagacaacctacagaatgggagaaaatatttgcaaattatacatctaacaagaggttaatatgtggaatatataaagaattcaagccactaaatagaagaaaataatccaattaaaaatgagtaaaagacctaaagagacayttttcaaaagacatataaatggtcaaccagtatatgaaaaaatgttcaacatcactaattatcaaggaaatgcaaatcaaaaccacaatgagatatcatctcactccagttacacaatggctacagtcagctctctatccgtgggttccacatccatgcgttcagcaaaccagttgatcaaaaatattcaaaaaacaggctgggtgcggtggctcatgcctgtaatcccagcactttgggaggccaaggcaggcagatctcgaggtcaggagtttgagaccagcctggccaacatggtgaaatcctgtctctaaaaacaaaaattcaaaaaacaaactgcatctgaactgaacatttacagacttttgtcattattccctgaacaataccatatcacagctatctacgtagaatttacattgtattaggcattataaggaatctaaagatgatttaaagtacaaacataaggcaaagacattctgggtttggttccagaccaatgcaataaagcgagtatcacaataaagcaaagtcatataaactttttggtttcccagtgcatataagagttatatttactatactatagtctattaagtgtataatagcattatgtctaaaataaaatgataatacctgattttattttttttaatttatttgttattattattatactttaagtttcagggtacatgtacacaatgtgcaggttagttacatatgtatacatgtgccatgctggtgtgctgcacccattaactcgtcatttagcattacgtatatctcctaatgctatccctcccccctgcccctaccccacaacagtccccagagtgtgatgttccccttcctgtgtccatgtgttctcattgttcaattcccacctatgagtgagaacatgcggtgtttggctttttgtccttgcgatagtttactgagaatgatgatttccagtttcatccatgtccctacaaaggacatgaactcatcatttcttgtggctgcatagtattccatggtgtatatgtgccacattttcttaatccaatctatcattgttggacatttgggttggttccaagtctttgctatggtgaatagtgccgcaataaacatacgtgtgcatgtgtctttatagcagcatgatttatagtcctttgggtatatatccagtaatgggatggctgggtcaaatggtatttctagttctagatccctggggaatcgccacactgtcttccacaatggttgaactagtttacagtcccaccaacagtgtaaaactgttcctatttctccacatcctctccagcacctgttgtttcctgactttttaatcattgccattctaactggtgtgagatgggataatacctgattttaaaatactgtattgcggccggayatggtggctcactcctgtaatcccagcactttgggaggcgaaggtgggtggatcacctgaggtcaggagttcaagaccagcctggctaatatggtgaagccccgtctctactaaaaatataaaaattaactgggtcatggtggtgtgcacctgtaatcccagctacttaggaggctgaggcagaagaatcgcctgaacctgggaaacagaagttgtagtgagctaagatcgcaccactgcacttcagcctgggagacagagcaagaccctgtctcaaaacaaaaataccaaaaaataaaaatacaaataagaataaaatactgaattgctaaaaaatgctaacaatgatgtcagcctccaccaagtcacaatctctttgctactgcagggtcctgccttgatgctgatggctcctgactgattacagtggtagttgctgaagggcggcatggctatggcaatttcttaaaataagacaacaatgaagtctgccacattaatcgacttttcccttcaggaaaaatttctctatagcacaagatactgtccgatagaattgtactcaacagtagaacttctttcaaaactggagtcaatcctctcaaaccctggcgaagctttatcaactaagtttatgaaatattctaaagcctttgttgtcatttcaacaatgttcatagcatcttaaccagaagtagattcgatctcaagaaactactttctttgcttatctgcaagaagcaaccttcttcatcagtaaaagttttaccatggcattgtagcaattcagtcacattctcaggatccacttctaattctagttctcttgctatttccaacacatctcaagtgacaaagtgcactgtcaatgagcaataatattttgaaaggaatcattttttctgagcagtagttctcaacagtggctttcagtaaaccgtgctgtaaacagatgattgttattctactgtagaacacaggcggagttagatttagcataattcttatgggccttaggattttcagaatgataaatgatccttggcttcaaattagtcactagctgcctttgtccctaatcagaaagtcagtctatcctttgaggccaggcattgccttcttaactatgacagtcctagacggcatcttcttccaacataagcctgttccatctacactaaaaatctgttgctaagtgtagcacttcatcaatgatcttagctagatctgaattacttactgcatcttctgtatgagcacttgctgcttcaccttgcacttctgtgtgatagaaatggcctcttttcttaaatctcatgaaccaacttctgctagcttcaaattttcttctgcaacttcttcacttctctcaatcttagaattgaagagaattaggacttgttcttgattaggctttggcttaagggaatcttgtggctggtttgatctttcattcaaacaaaaccttctccatatcagcaataattttttcacagtcttataattcatgtgtttactagagtagcacttctaatttccttcaagaaatttttctttgcattcacaacgtggttaactgtttggccaagaggcctagctttcagcctgtctcagctttcaacatgccttcctcactaaacttcatcatttctagcttttgatttaaagtgagaggtgtgggactcttcacttgaacacttagaggacactgcaaggttactaactggcctaatttcaatactgctgtgtctcagggaataaggaggcccaagaagagggagaaaggaaaaaggacgatcagtacagcaatcagaacatacacatttattgattaaattcactatcttatatgggtatgtatgttatggcatctcaacacaatgacaatagtaacattcaagagtcaacaatcacagatcaccataacagaataataatgaaaaagtatgtggaaacgcttcatgatttagaaagcaaaaatttttaagtttaaaaaaataataattaaaaagtttgaaatggtacaaaaattaccaaaatgtgacacaaaggcatgaaataagcacacgctttggggaaatggccctgataaacttgctcaacacaggattgccacaaaccatcaatcaatttcaaagaaaaaaaaaaatccttgttgaagcacaataaaatgaggtttgcctgtacacaggaagatgggcataggttatatgtgaatactatgcccttttatatcagggacttgcacaggacatcttggaaccaatcccccatggatattgagggataactgtattattaaaaggacaaaagatctgggcatggtggtgtgtgcctgtagtctcagctacttaggctgacgcaggaagaacacttgagcccaggagttcaagtccagcctgggcaacatagcaagactgtctcaaaaaaaaaaaaaacaaaaaaaacaagccaggcatagtggctcacgcctgtaatcccagcattttgggaggctgaagcaggcagatgatgaggtcaagagatcgagaccatcctggccaacatggtgaaaccctgtctctaaaatacaaaaattatccgggcgtggtggtgggcacctgtagttccaactactccggaggctgaggcaggagaattgcttgaacccgggaggtggaggttgcagtgagccaagatcacatatgtgtgtgtatatatatgtgtatgttatatatatacatatatacatacatatatatgtgttttttaaaaaaaaaactcatctttctaattctatgaacttttataaatatagtttccatgatcaattaccttttccttttatttggctgtgagctgcttaacactagaatcttgactcattttagcataagaattgccattatacaatgttcacttattatttatttattatagagcatactgtgggctaaattaagtccccaatgtataatgacgatatccaacaataatttgctagaatataattatgttatatgatgagtgacagtcctaatacactaatcacaaatgttattaaaggtttcccatgaagagcttatagtaatgagaggatatagggtaacagcaaatgcttcctaacataaacccatgctactagaaagatgcctgtgaagtcacattatttttgtctcaagactgtggactgaccacacacactcatttcttctctaagaccccctccaatccygttaaatgatagtgaatacagaaagataaaatcccaaacaacaggaagatgaagaggaagggaggagagtagttaatcagtagatgagaaagtttagcaaattgctagagacagaakgcagatggaagtgtagtacttgacaagatagggcagaggaaagctttgacctgtaataatktgaggaagaggctactgatgaggaggaagccatctgtcctagtaaacccataaaagtttctagttatccagtgtaaggggaggcaagaatgagacacagggctaagaacaggaagagtaagcaaaagctcctcacggaatagtctatatacgtaccccctgaaaatgacagggtgatcaggtatgtatgcccaggtattcaatgaagaaatagaacaaactatttgaggagagctagagcagttgactcacatctggcccatcattcatccacacattccataagccttgctcacctactcagaagtcccaatcactattttattgtctatcttaaacagaaatgaataccttttatttgaagaaaaactatagcataaaagagggaaaaaatatgataaacaaaaatataatccctagggaaaattaaaataattcagataacagaagaaaacattttttttgaatctctaaattttattctttgaaggawtttaaaggacctatattcataaaataagaacaagatgctgagaatgagaaacagtgcaagaaagagttcctagaaattaagatacctaattgtgactgtagtaataaaaaattatcggatgggctaaaggaaaacagaagggtagaaagaggaatagaatctgagcaagttatttgagaatgggtgccagcaagataagtaggtaacctgtttatcaagaaatcattctacaaaacatagaatctacgatacatagattctacaaaacaaggtcaaattcaaaaaagtaataaaggcaaatctcacagtgataattatgcaggaacaggcctccagagcaatcgttcaagcaatttataggcaaggcacagaagacaactacagatttagaacggacagtaagttaacaatcttgaaaatgcaaaaggaaaataaccaaagacaaaagctgggaggtgaaggaagaggaattgaaggaagggcaggggctaatatattcatctcataaaatgcagaggcaaaagacacagtatctatggttaatgtaaaactaaagaatatactaccctaagtattcaccattcttgcttagagattgtccttaagtaataacgaagctaactgtgtaccaggtaccaggtacttactaagaattcttaggggttattcattaactgtgtaatacaatgtctaaagtgatccattaaaaaaagtaagtaaaaatttttaagctacagggtaaccaacacaggaaccaataatggtgatataactacattaagaaggaaaagaaaacagagttaaggggcatagggaaaacaggctgatgcttcatgtatcagcgcaggaagtcaaaagataacaatgtctaaaactgataaggcaagaaacggaggcaaaagtatattatttaaagatatggagatcatccccagagagctaaactgaaaatttttagaatctgcaagtgattctctcaggaaactggactgggagagaagactactggtttcatgtatcaaaaaattccagtacttttacgtttttaaccacatgaattatttactttgatcatttcttttaaatttagttaataattttttcaaaaaaaaagtagtcgaatctgtcctactacttcagacaggtaaaattattttatattttaatggtttccagaaaatggtctaataatgcaaggctgacaagtcagcatgtccaacatttctcatttaatcttgcatttgataaattagtatcaagtgattctacagaatatagtactaagaatacaaaatactatacagagacatggcccctcctggcatgtaatggtaaaacacactggtccaatggtcaaaaagcggtttacccatctgttccatgtttaatatccatgtactttatttttctttttaggaataggaaaaaccttaataggctgttcaccacaagaataggttcaagagagaaaattcctggtgagattaccaacactaaccaaccaaagccactgtgatttccacactaggctagaggttcagtattggtaatagtgacagagaaaagctgatacagtctagagggctgctgtagctgatgggctaagtccaatgacagatcttccatactatccatccaagatcaataacttatggtccaggaactcaagccagcccacagacacattcagtttagcctgcataatattggccaactccatgtttttaattttgaaaaagtagcaacatctaaaactgacagaattcaggtaaaacttcagacgtccaccttctctcaataaatcagtaaaggtaactccccttaagtgacagggtgtcccagtttgccacacctagcctgtttccctcactatattaccaatctagcccttgtagaccgtttgtatctctgatccttgctataaaggagataacatgttgatatgcctaagccatgccaagagtttttgaggtaggactcttacacttcggtaacaacaggagataaatcagtgacaagtcgtggcgcagcggttccacaggggggttagcagcagtgatggacagcagccactcctacctaaaaactgtttcgaaatggccaggtattctaaagcagtggactctttattgagtattacgtaaaagccgcctatagagaaaaaaacacataaaaattaccgggcatgcctaaatattaggaatttctgtgcatgcctatttaaccacaacgtattccctgccaactgccttacttttaatcaaactagaattgaatggcagataagaaaagtggtaaatgctagtgaacaatatcttaggagataacaactaacagccrgaaatgaaaactaaagcacaaagtccaatagctgacactgtaacctacattttgagtaaaatagtcatcatttacttacactttaatgtctctccagcatatggtatgtgcagtttaaatcggtcacagttgggcccaggagtcaatgatgtgcagctttaaaaaatgcagaaacagaagaaagaaaagattttttaaaaacaaactttaaaaacccacatgtttatgatactaaacaaaacaggatctttatacaaaacagattaaaacactggcttacagaacaaaataaaagcctttaatagtcatggaagccaagacatgaagactcgtcctaaaacaaataattcatttatttcacaataaaacttacatgtgttctaacgacaaacatcaacagtgtgcttcaactacttttctcaaagaggcatatctcgacttttaaaattaggtatattatccaaaacacatgtctattcttatgccaagaactgtaaaataagaatagttttatgatcatattttaaatatggactcttagctttcattctgttagtacaaaaaagagcccacttttagcctttttctggtaccagatggttttctttccttccacaaaggttcagtgcttcctttagatttggcacaccataactttcatctgcaggaaagcacaatgcatactcaatttcaagtaaaatgcaaatttaaaaggtggggggtagttatccaggtctcaacagtttggtattttctttttgttttgtttttcaagacaaggtctcactctgtagcccaggctggagtgcattggtgcaatctctgctcactgcagcctcaatctctcaggctcaagctcctcccacttcagcttcccaagcagctgggaccacaggtgcacaccaccacacctggcttttttttttttttttttttaagagaggaggtctcactatgttacccagggtggtctcgaactcctgggctcaagtgatcctcctcccacctagcctcccaaagtgtcaggatcacaggcatgagccactgcacctggcctggtttttttttttttaatctattatttcacaaagttatacaatgtttcttgctcttcacagatctgctgtacaagataatttttatcttagaagtcataagttcaactgcataacagctgcatgggcttcataagttaataaaatattaatatgaagtcaattgagaaagtaatatgtcttcattttgttttaaaaagatgagagttttaatttacaaacgaaagcaaggaggctaattttctttcataattccaaaactggctgtgaagcaattctaaaaaagaacctataaaagtaatttaacggatggatgcatagttgaaataaatgtacaacttccctacatggcaacttggaagggcaagagtcatttaaaaataaattcaaaaaattttggctttaagtaactcagaccccacgttaaagatttactattacttttccccaaaacgatttgaatgtgaaaaagaaccagacagtggccaggcgcagtggctcacacctataatcccagcactttgggaggccaaggcaggcaaatcactggaggtcaggagttcaagaccagcctggccaacatggtgaaaccccatctttactaaaaattcaaaaattaggccaggcgcggtggctcacatctgtaatcccagccctttgggaggctgaggcaggcggatcacgaggtcacgagatggagaccatcctggccaacatggtgaaaccctgtctccactaaaaatacaaaaattagctgggcatggtggcacgcacctgtagtctcagctactcacttgggaggctaactcaggcgaattgcttgaacacgggaggcggaggttgcagtgagccgagatcctgccactgcactccagcctgggcacagagcaagactccatctcaaaaaataaaaaataaaaaaataaccaggcatggtggcaggcacctgtaatcccagctactcagaaggctgaggcaggagaatcgtttgaacctgggagrtggaggctgcagtgagccaagactgcaccactttgctccagcctgggtgacagagtgagactctgtatcaaaaaagaaaaaaaaaaaaaaaacagaaactttaacaagggtatgtttaacataaatcactaagttgattattcctcattatcttcaggggtcaataaaaataccagtttataaactaaacaactaagttgcaccagtaattgaatggtaacaaatttttatatttcacaggttttaagaatactttctcattttcctttcaatataaaaaaaatttctcagagtacattttagaggcatcatatttcccttttagtgtaatcttttctaccccacaacacagtagttattttaaaagactacagaaaacacataaattctagcattatgaagtacaatctaatgacggtaatgagcatcatgtcattatgagcatgctgttatgagccctataaccaacactaagatttttccttttctattgcattcaactgcaatgctttaaatttatgaaaaacaccattcacaatcaaggatctttttggggcttggggatcaaattatctaactatgcagcttaaagactgaagttattcgaagtacaggaaatcgtcaggattaacctgattccagtttgtttgaataactcactccttcttcaatgacaaattgtttttttcccgaatggttacactcattattgggccacactttttattatatactttaaccagaactggttaagtgtttttgtgccctgccatgtcaccttcctcccttactacatcaacagctggttccagcaacctcagtgtattaaaaggtacatttctaagggggataggaagagatttgttaaaggatacaaaattatagcaagataagaggaatacattctggtgtactataccactgtagatgactagagttaacaataataaatagtttcaaatagctagaaggaggatattgactgtttccatcacaaataaatgataaatgtttgagatgaggatatgctaattaccctgatcttattactatacactatatgtaacaaaacatcattatataccccataaatatgtacaattcctatgtgttgactaacaaattatagttttatgaaaaaaaaaatatttctctatctctgtgtttcattcactgatttttttcatttagataagatttatcaagcattgctctaggtgttaggattataggactgacgagacagagaagatctaccgtctcatggtacttaaattctagtgagggaagaagaaaacgataaacaagagacaaacacataaagatggtttaggattgctaaatgctatgaggaaaataaaacagggtgctgcactgaagcaagagctactttacactggaagatcaaagaggacctctggaggaggtgaaatccgaaaactgaataacacaaaggggcccaccatgccaagttctgggaaagagcattccaggcagagcaaacagctggtgcaaaggtgtgaaggcaggaacaagcttggtacatctggggaagaaatcttgatatatctgggcaatgcggctggagcacagtaaatgagggagagaagaacaaaagattaggacacagtaaatgagggagagaagggcaaaagattaggacacagtaaatgagggagagaggggcaaaaggaagggacagatcacactggacctgcaagtggttgcaattcattcagcttttatgccaagcacaaagcagggtttttagcagaagagtaaaaacatctatgtttttaaaagaccactttgcctactgtacagaaaaaaaaaaaaagaccacaagagataaaatgaacatagccagaccagggaggagaccattttagtcaacaaagatgatggtgcaaaaccaacatgcatttgtagatggtatcacctacttctctgctatctacagagatccttgcctgtccattttctagctctggtgcagtaataatgctgctgcttcagtaaacattcacttcacagtcttcagtgaggagacagtgttctgtgatgtgggagttgagcagagtgtagcccacctggcagataaggcccacactcaggcgcatgagagcaagaatggcgctggaaaggaacgaacagggtcacagagggcagagaccattcccctcagcctctcaccttcagtcatggagaggagtgtttcagggtgtggttatctacctggaatgggatgaggagctctgctgcccaaagtctctactatttaaggaaagacatcgctacatagctggctataaggaacagggattgcaaacctctaagggttgtaggaaggccagggcagctgggagcaatgtggatgagtcttgtgtttaccccccagggatgcttactggtctcaccaggtttctcagtcttcactgggactgaaaacccaatgcaggtaggataataataataataataaccactttagatctgaaaaaagaaagaaagatgatggatccttggactagggtaacagcagtggagatgagacaaatggatttattgaataagacttctaggaaaggagcatgtttagggaaaaggaaatggagagttcaaagtgtgagataataaccaaatcttctatggaaacagtcaggctaatgggtgggctagccaatctataagggccactaaaacatcacagaaaagatagaagaaaaatttacaaaacctcacctttgtgttttatgatattggaaagatcacttactttccaatatcataagtgggaatgggggacaggggtatgaagagtaatacttcccaaaagcacactcaagtcaaaattataatctccagttaggtgcagggattctgctttgctgagaggaatctacaaatgtgaggccaagagccaaagtgctcaagggaacagaggaaagctgccattagtaggtctctttctcctaagtggcactcagcttgtcttccaatgaaatgttgggcaaatcatttaagatatgttacattctatcttccttatattatctaggataaataggtgtataggaaacaagccagtgccatgtacctcaagtttcttctaagattaaactgtttcctcttcttaagttacctctgtctaaaattggtttggtcatgttctttaatttactgtgaaaattcaagttgcacaagaggagggtgctcgtttttctgttaatcaaaaaagagcataggggcagggcacagtggctcacgcctgtaatcccaacaactctgggaggctgaggcaggcagatcacctgaggtcaggagttcaagaccagcggggccaacatggtgaaaccccatctttagtaaaaatacaaaaattagccaggtgtggtgtgcatgcctgtagtcccagctactagggaggctgaggaaggagaatcgcttgagcccaagatacagaggttgcagtgagctgagatcatgcctctgcactccagcctgggcaacagagcgagactctgcctaaaaaaaaaaagagcatgggtttaaaagagctttcctctgttgccttgaggagtttgactcttggccccaaatctgtatattcctctcagcaaaacagaaggcctgcagctaactggagattaccattttgacttgattgtgcttttggggagtattacccactcccatccccacttcaagtaagtgatctttccaatgtcatatagcactaaggggagttttggtaaattctaaacccatggtaatgtttaaaaagctttaaaaatacatggaaatagtatgattccacttatggaaaaaggacacttgaaagtatgtatatctacacacatagacagatttcagaaggagagtaaccaaaatgtggccggatttgaaatgatttttacaagattcttctaattacttttctgcatttttttttaaattttttgaaacacggtcttgctgtcacccaagctggagtacagtggtgaaatcacagctcactgaagcttcaaactcccgagctcaggcgatcctcccacatcagcctcccaggtagctgggaccacaggcacatgccaccacacttggctaattttttgtatttttaatagaggcaaggtttcaccatgttgcccaggctggtctcaaactcctggaattaagtgatcctcctgcctcagcctcccaaagagctgggattataggcatgagccactgcacccatctgctttctgcattgttttgatttttataatgaacatgaactatgaactattttactattataatttttttaggagacagtgtcttgctctagagcccaggctggagtgcagtggcacaattataactcactgcagccttgaacatctgggctcaaggaatcctcccacctcagtctcccaagtagctgggactacaggtgcaccaccacactcagctaaatttttttttttctttttgagacagggtctcagggctttgcccaggctggtctcgaattcctgacctcaagcaatcttcccgcctcagcctcccaaagtctgggattataggcatgagccacggttttacacaattataaaatcttttaaggctaaatacaacccttttctatttgactaggaaaacttggctatgatggcctgattttatctttttcttttaaagtacttcactccttctcagaaggaaagaattcagggtgatatactgatgaacagtcttcaagtaaggcatatgaaagtctttatactgtgatatcacaaaacttcacatttctaacatttattatctttcacagtttctttgggtcggaatttgggaatggcttggctgggcagttctagcttaaggtctcccatgaagctgctgtcataaatcagtaacagataactaataaagcagggaaattcactcatctagaaagccatttccttatacaagtatgaaaaagctagtaaagaaaaagctactggctacattaaaattatatttatagaatggcaacttgtcctcacacatagttagagccaaggttgaaaaagccagtattccaaattgaatcacttttaatttaaaaattatttttaaatattttaaaattgctgacggttaagtataatttcaaatttgtctctcaactatatttcatcagtgttcactgtgtgtctggcactaagtgctaggaatatagcagtaacaagaacaaaaaacatatcttggtgttagagtacagaaaggattttggataaaaactatgctgtaaaaatatatcttttaccaatttcaaattacctaaatataccaggaatgcactattttaaagtttaacatgtgagtgaacaaagggagttaaactcacattatacagattatgaaagtgggaattatcaagcgggaattcttgatagcatcaaaggaggtagtttaatctagtactttattacagaaatggcagttaatcattgacgcaataaaatgctgagcgtaagaaccttcgcacattctcatctgttgagtctcttattttacatttaatcacatgactcccagtattatttgtctatttttctccttgtggcttgttttcccaaccagatcataagattctagtgtcaagcgctatgttatactcctttttaagtaagtcctagtatagcacctagcacagtgctaagtatccagcactgatgaaattttagcatattactaacactcataaactaagttcaagaactgtcattttacagatgatgacatcaaagagcaaagggtctcactggcactctgggattggaaaccacttacaggacacgctaaccatatcttagtctccatggcctaggcatctttaaatctccagtgtctagcactgatatccaggaggtgaacactccaacaactatgtaggaggataaaggtttgctgaatgaatgcatatatcttgactcctagtgttgtactcttttcatgattaaaaacaacaacaagaaaaaaagactgttgatttaactggaattgggatgatgtgctcatcctcacctccaagaaaggcaaaagtgtgattatttgtggaaggttttccctttgaagaactgtacacacaactcagaatttaaactttaagttattacctataattattatatttccacaataaacaaataacagcagctaatatttgtcgggcatttactaatgtggcaggcactattctaagctctttaattatattaaactatttaaacttacagcaaccttccaagataggtgctgttattaccccaatttacagatgagggcactgaggcacgtagatgcttatgtaacttgctagtgagtgacagagctgggatccaaacccaggatgtctgcctccatggcccactttcttaattactacattaaaccatctctcaataatttaagagaaaaccatcagattaatatcttatgattagtgaattataaatcataattagtggcttataaagatttataactataaatctcataattggtgaactataaatgttttcaacaaatgatattttattaagtacctagaaaaatgagaagtaaaagatgacaaaatattgccaaaaagaagttctattacatgcgttctaatgaaaagaaaattatttatcagtaataagtataaaaactgtaaacacataaatcaaggctacaagagagggaacaagcccccygtaacttgacacagactctacaatgatgacactgttcactgatttagcaaactatatatataaagtttaagtaaataatgaaaggtaaatttggatttgactcctctttaaattatcatttgttcctagttactgagatccgactcaaatgttaaggtttcactataaaaaaataaaagtaggcaaattttactatactttataggctttttagtgacagccaagaactaatctagattaacaaagctatatgaagatattctacaacctttaaaacattagcagttttaaaataatgcaaaatataagaaaatatattctttctggcttaatagggctaaccctgttttttgatacactgtctggaaaaaaataatgacttagaccatttctattcttcaagccacctaaaaagaacaaagtagatgagtccagggttccttccctgagtctacgtcagtttcctttaccctgactattaatttaccatttggcatgtgtcctacatagcttcctgttttcttgatagtgacgtttgtgctaaaccaacaatatttaacatcagctgagaaggaagtcttcaactttggcaacctaaaataacaagtgactctcaaataaaatatgctcaaagatcaataaccaccttttaaaaaaaagtcacatattacagtaaattactgttaactaatattaactacattttcatcttttagaatttattttctctgaattaaatctaacatagattactcaktttcaaaaattatcatggtttctagactggatgcagcagtaaagaagctggaagactgacaaagggtatcttaacatctatctaaataatctaaaacatgagcattttatctgcaaaggcatctgaactggttcatggaatcttacatattcagccttgaaagggctataattataccccatctgactggccagaccaaatccacaaggtcaagtcttagacctttttacaagcaaaaaggacaaattaaaatcggtaaaagaagacaaaattgcattcagatagattttctcggttgattttcaggggaatggggctatgcatttgatgacatatgatattcttgatacatcaagtacattctatctctaaagcctaaaaactatggctagaccctcctagaaaaaatgatacatttaattcttagcataggattccaaaatgccatcaccaaaataagtgactcagcccagaatgttttaaaaattacaaaattaaaatattcaagaaaatgtgtttgccagttcatgtggcgtcaactgttattctcagcttctatgccatatctccatttataaatgataaacttcaactctactttagagtaggaagtatttttaaatgttggtaggtgtccctataacaaaaatgtggtttaaattacaatatggtttcagtaggaatgatgggctcacatacagtttttaacagctaactaggatcgggaaaaaatcctttaactttttcagatagatgcttagcttattaattttcaacctttcttcttttctaatatgtgcatttaattaactctgctaagagaataagaggaaattgataggattatcttaataagtacaagtgtttgatgaaattaaacatccattcataattttaaaagctctctataaactgggataaaagggaacttccttaatgtgatcaaagctatctacaaaaaacttaaagcaacatcatacttaaaaacaaaacattaaaatttttttctttgagatagaggatgagacaagaataccaactctcatcactttaattcaacattgtactggaggtcttagccaggatggaggaaataaggagtataaaaattggaaaagaagaaacagaacttacttttttgcagaaaatgtgactgtgaacatagaaaattttgtaaatgttcatatgcactattggaatgaatatgtgggtttagcaaagttgttagagcatacatagaagtctattgtatttccatataccatcaactgtcagaaaataaaacttttagaaagatgccatctaaaataatatcaaatgatcaaatatatagaaataaatgttacaatagatgtgcaagatctctatgcagaaagctattattaagaagaaaataagtaaacaaataaatgaacagagatatcatgttcatggattaaaagactcataatgaggccgggcacagtggctcatgcctgtaatcttagcacgttagaaggccaagtcaggtggatcacttgagctcaaaagtttaagaccagcctgggcaacatggagaaaccctgtctctacaaaaaataccaaaaagttagtgggcatggtggcatgtgcctgtagtaccagctacttgggagtctgaggtgggaggatcgcctgagccagggaggtcgagactgcagtgagccatcatcacatcactgctctccagcctgagccacggagtgagaaaaaaaaagactcataatgaaaagttgtaagttctccctaaattgatctgcaatctgaaaggcagattctaaaatacaaatggaatgccaagaacctagaatagatcagatgatcttgaagaacaaaaacttgataggattatttacaataaacaaaaggtagaagcaatccaagtgtccatccatggatgaatggataaacaaaatgtagtactatacattatatatatatacaatactatacatatacacacacacacacacaatggaatggcatattatccagccttaaaaaggaaggaaattttgacacatgctacaacatggatacatcttgaggaccttatgctaagtgaaataagctggtcaaaaaaggacaaagactatatgattccacttacatgaggtatctaaagtagtcaaattcacagtcagagaaagtagaacagtagttgtaaggggctgaggagagagggaaataggaagctatagtttaatgggtacagagtttccgatggatagttgtaatgactgtactacaatgtaaatatacttaatgccacagaactgtatgcttaaaaatgattaaaatagtaaatttatgttacatgtattttaccacagtaagaaaaactttggtaggaaatttgcaatactggatttcaaaatttactataaatgttagtaattaaaatactcatgttggtacaaaaatagacaaaccagtaaaacagaataaagagttcagagacagaccctcacatttctggacacttaatttacgacaaaagcatttcttccattagtatctacatattttttcagatttctttttcaggtatggcaggtgaaaataccacaatataagtaatataaattatttttacagtgttgttaattttatctttatatcatttttagcttatattttatgtatgttttataatctataaatatatttttataagtaaatatgcatgtagcagaggtacacaataaaataatttggggtgtgctatagactgaatgttagtggcccctcaaaattcttattggaatctaatccccaatgtgttggtattaagaggtagggcctttgagagctgactaggtcataaaacggaggcctcataaataggattagcgtccttataaaagaggcctgagggagctcgtctgccccttttcccttctgccatgcaaggacacagagaaggcatcatctatgaggaaygggccctcaccagacacaatctaccagagccatgatcctggactttctagccatcagaactgtgagcaataaacttctgctgtttataaattaccaagtctaaggtattttgttatggcaacccaaactgactaagacagggtgcataatttaaaaaaacactttgggccgggcgtggtggctcacgcctataattccaccattttgggaggatgaggcgggcaaatcatgaggtcaagagatcaagaccatcctggccaacgtggtgaaaccccatctctactaaaaatacaaaaattagctgcgcgtggtggcacgtgcctgtagccccagccacttgggaggctgaggcaggaaaatcgcttgaacccaggaggcggaagttgcagtgagccgagatcgtgccactgcactccagcctggcaacagagcaagcctctgtcacaaaaaaaaaaaaaaaaaaaaaagtttggagtgattattgctataagagttacacaaaggattctctattctcaagaacttgtaatcagaagacaaaaatcaaactatgaaagtcacacaacacaatttaaataacaagtcaagacaacaatagatacaagtcacaaagcaattaacatgattaattgccaaattagtggttaaagaaaataaacacaataggagcgaagagagcagagaaaccacttttagcttgggtaaccaaggaaggttcactggaatacaactggcctctaagaatgcataggatctggccaagtgaggggaaggagaaatagttatgggcaattgtctttaagtaagggcaaaacctaagagacaggcactgctagactgaaaactctaagaagaaagagaatgcattaaaccctggatccctcagtgtccagcagcatacctgctggcacacaggaagtacctgaaagctatttcataaatactgcaagtgagcaaggtagagctggagtggacaaggtcaaacaagttacagaaatgtcctggactgtttgctatttcaactgtgggaatgctggtaattattactcatattagtaaatgttatataagagatccccagggccaaggccaacttaaataccattttcatacattcaatgtacagtgttattttataagaagtaatttttatactaaacactactaattttccaatgaaaatattcctgtaaacttttaggccactgtttttatgccttgatccaaaacatgtcctaaatgctgcctattctctgaactctggggctcatattttatattatttgcatactatttatctaaatcccatagacattcctgatccatatagggaaggcctaaggagtatttaccttggcatgctccaatagctctgattctcaagggaatgtactagcagagctttgatctcaccctgattagctctcatgctacatgctttatttatgtttgtatctcaacaatgcctcacacttacttggtgctcagtacatgcttaacctatctaaaaaaataaatttgaatgaatatggaaagcacaaaagcagagtaaaggaaagaatagatggaaaaccagtggagatggggagatagggagatggggagaagaaacaaaaagaaaatgaaaaagtagagagagagaattgtagtaggaaactgatgacagggtagagccaaaaatagagaattagataaagaagagtggggaagaaaggaaaaggaagaattaatagattctgaagtgtcattaaaggattccctttcctgttactgaaaagtgctttctaaagatagaaaaaaacgttttttatatcttcaaattcttatatttaaatgattatgaaaagacttagcatctgctatatgagcatatctggaactacagggtaatgggataagtgtgccatccacgtatttttggttgttaggtagtttgaaaggatttcgttcttagattgctgcttgagatgctactgttatacactataaattctaaagccttgtgcaagttaaataatctctctcgtcttcagtgttctcatttgtaaaataaggataacagtcatgctccagagagctgttatgaggatccactgacttggtgcacataaataaagtatttagaacagttcctggcacacagagagcacttgctgtcacgagtattcaaaagtacaaattgcaaaaccaaaaaataaggaggaggagagtctatctcaaacactattttccttaaaccctttacttcactggggcaataattttctgagctaaaaacctcaattgacctcctcacctcttcaccgggctacttcatttcttcattccacagacaaaaattctcatgggggtccaaccatgaaaagacttaatcagagcagtaaaataattttccagtgtcctaaagcaaatctaatggagcccatcatgcctctcatgttacacagcagaaatttacagggaaacaaagagaagaatatcaagatggggcatgtaaattggctgcagagcaagcagagactagacagagccatcagagaaacaaggacaggaagcatctagtctaggccagaggctttcaaacttttttgacacataataagaaatttttatatcaccattttatatcaccatcagtagagatatctgtacagagtaatattatatatgcatatgtgtacatatatctgtgtacgtgttcatatataaattgaaaacaaaattgttaagcaatgatacttagctttattacatgacgtgtacttttgttccattctcttctgttttttatgtaaatcaaggccctctaaaatgatttcataacacacctaaaggtcacagctatcagtggtttgtaacccacagctctgtccagtacaatctcacagaaggtagcttcctggaaaatgaagataaaaatactcaaccctacacttggtcaaaactattccttgaacacttcattcagttctaggtgttacactttaagaagtatagagactaactggatcacattcagaagaagccaaaaaagacagggaaggacacaaatccatgatagaagcaaaggctacatgttagcctacagaagaaagaactatcaaacatgatagctatcttcactaacatgcaggatcaattaagcttgttctatattgtgacaagagctagaagtggcaaggcaaagggtttcaggtcaatgtagaaaagcactatgtaacagtattagctgcccagggagctgtgttgggactcatggagcttccacatgactagagatacttacagacagcctgaacagtcacttggcagagaagcattagaaggggttcatagatcatatggttaacattagagtgtaatgctttccattcctgaaattctataattctggtgtagattaaaacaatgttatactttaatatgactactaaagctaacactagttctttattaagtttttaataagaaatgaattctaccatgaaccacatgaaacaaagttgaaatggtaaatgatattttcttgtaacaagagaatgtaacaaaaattggcaatgtgcctatcatagtcattaaaaatcttcatcagttacaattagagaaaaactgaagtgttacccaaatcactggcatagtgtttaagacgttcaacttagaaaatataactacattacagctttaagaagcaaacatcaaaaaaaggtgatctttaaaatgtacagaaataagagtgtttacaaaagaagattgtattataaacattctctccttgcccaaaagccattctttggtgtgtgtagattttatgtgcattttatacgtataaaatatacgtgtaaattctctccttacccaaaagccattctttggtgtgtgtatatatatgtaaagcatggacaaagtaacaatgtcctctgattttttactgatccaactaactgaaaatttgagttatcttcagaatagtttttatttgtataaccatctaccatayttgttttaaaaaacagtatctccaattatctaacatgtagttaggaattacttatcaataacatactactgttgcccctctgagatagaattcttaagaaggccaactcctggactgttagaatgcagaaatctttctagaatcgtgctattcaaagagagcaggtccatggaccagttctggtctgtaaattattactaatccataataagaaaagtacagaaaatgagataagaattttaaaacttttacagcaatgtgtaagaataaatctgatgaatctactaataaaagagtcaagccttgtatttcatgtctttttcatttcactcttctagcaattcatttttatattttacaaaagtatcagctggtgaccagctacattttttttaatctgttcttccatcaaagagtttgaaaaacacttttctgaagaatctttagatgctgaaggtccttggatatgaagataagctgctttactttgatgtcttctaatctccctattcatcttggttttcccacaacagtaacaaacattaatttatttctttccaagtgttcttttgatatctctactaagttgacagcaacatcaatatagttcactgcccaaaatttatcatcaggttatctgtctgactgctcagaacctgtaacactatttcatttccatccagatgtagctccaacatattcttggattcattccttgcaagaagatattaataaatttgacaagccagtttgaaggggtcatccaatcttgcaacatgactgctggcataatctgtggcagtctatcctttggaacttctaaaggtagtatggctcagttttaaatcccaggccttctaaagagaccatctaaagtaatggtctctcgcgtcctgaattcctgccaatctacctataattccaatcttccatttgaactatattggttctcagaatccttttctgacttacatactcttttaatttcttaagtaaatacatacaaagatagatataataaacatatttataaaaacctgccaatgacaattccaaaagatacttttatgatgcaaaaacatgataaatactattctttaaaaattaaatacattgtgctgtgctgtaagaaattatgccacaatgccaagaattatatcactagttttagttaagatttgcaaagtcattcaagcttccaaatcctcaataactttaataatggaaaaaaaaaaagaataaggagtctgcgaatgtaggtcaaaaagcaaatcagtgacagacttaaaataactatatgtgtttaatttctgccccagttccaacaatgaaattgtattccctttccataccctagtaattgttcagcattctttcccaaggtgggagactgagactccacaaccttggttcaatgtttgtatctcctaaggccagtttctggaattaggcatggttaaacaatgtgacagcacagaagaatggctcttttctttgagtggctaaaagcttgggggttagtgggtatagtgtaggcaaagtagtggtgtaggttttgtgaaaagaagaagaaaaggaaaaatacttggaggaggcacgtcctattcctattctatctcaacatgatctggtttttattttttattattagatttgtttcaaatcatataaatggctgctagtggaaaacagatcagatctagaacagttatgaagagtctagttaggactggttaggaaaagagatggagtgctgacagtactgagagagagaaatggatgaactacaggtcagacagcttctgagaggaactgatgaggcttgaagagagatttgcatttcaagaagtaatgataccttgaagtccatgctcaagattgtgataaggatttagtttcagtatctcattttatttaggagcccacagctgcacgcttgcctccatttttctctacccttccttttctataatcttttcttctcccctgatttcctcttcctaccttattgtcctttctctgtcttccttctttcccttcaaatccacccctttctttcttccctccctaaccttctcctttgcttacatacaatatggaactgaaagaattttaaaatatttattctatttatgaatagttcttaacttaaaatccagagggttcaaacatgtatacatattatacatttgcaaaaagacatgtaatagaatgttcacaatggcactattcaaaatggcactattcataatactagtgtattagtctgttcccacactactaataaagacatgtccaagactgggtagtttayaaaagaaagaggtttaattgactcacagttcagcatggctggggaggcctcaaggaacttacaatcacagcagaaggggaaacaaacacatccttcttcacgtggtggcagcaaggagaagtaccgagcaaaagggggaaaagccccttataaaatcatcagattgtgtgagaactcactatcacaagaacagcagcacgggggtaaccacccccaggattcaattaccttccaccgggtccctcccatgacaggtggggattatggaaactacaattcaagaagagatttgggtggaaacacacccaaaccatatcaattaggaactacccaaatgcccttcaaaagtacagtagataaaccgtggcatgttacacaatggaactctcattgctcagccagaaaaatgggtgatctacaactatctgcaacaatatagaatatcacaaacataacgctgaacaaacgaagcctcacacaaaatgccattttgtgcagtataaattccatttatatatatatttttaaaagtatattaacctattttgttagaagtcaggatagcagttatcctttcatgggaagaggggtcagtgactagatgggagcacaaagaggacgtacaaggtgctgataatgttctgggttttgggtgctagttacacaagtctgttcagcttgtgaaaattcaatgcattatatacttacttatgattcagtgtacttttctgaatgtatactatacctcaataaaaagtttttaaatttaaaaatcaattagtttaaacctttaatgtttaggggagggaagtagcaacaactaaccttttttgtttctctgatgctttctaatgacttttttcaacctaggagacaactgtgatacacccctgaacctggaaccatgacattactgtcagatccacagttttatacttattgtgccaggtcctatgctaggtggtggagacacagctgttatgccagataatggccttgtctcctctactaagggagacaggcctaacaaacaaacaataaataaaagcttgaaattggcaataggacagattctgatacagaaaagaacaagggagaactgttatagatggaatggcttagctatgcaaccctgaacaagtcacgcaacttacttgagtttcagttacctcatctgccttaagggattattagaaggattatatgcaacaaaacgtttcaaagcacttacattacaatgaaaaattattaatgataacagctattgttatattactgtccttcctgccaatatagagctgcttatgttaaccaatgtcatagcatgtcctatacactactaccataatcataacaatgagtgatattttataagtctctaattctcagtcaaaaggcttctactatgggagaagcaggtgcattggtaaatgggtgtcctttgccacagaaggagatactagtgatacaaaggtctggctcaatttcaccagagccttttctgacctttctagggaagaaagcacagaaagatgatgctaacagaggggcaggctagagaaatttaaccaactggagaacatacaagaagtacctcaaattttgtcaagtgaaacttttgcgcattaaaagacattatcaacagagtaaaaaggcaacctatggaatgggatgggatacttgcaaatcatacatctatctgagacggaactgatattcagaacccaaaaagaaatcatacaatgaataccaaaaaaaaacttttttaatgggcaaaagacttgaayagacatttctccaaagaagatatataaatggccaagaagtacatgaaaagatgctcaagcctgtaatcccagcactttaagaggccaaagtgggaggactgcttgagcccaggagttcgagatcaatctgggtgacatagcaagaccctatctctacaaaaaataaacaaatcacccaggtatggtggcacatgcctgtggtcccagctactcaagaggctgaggtgggaggattgcttgagcccaggaggtggaggctgcacagtgagctgtgattgccccactgcactccagcctgggtgacagagtgagactctgtctcaaaaaaaataataacaataataataaagaaaagatgctgaacatcagtaaacattagggaaatacaaaccaaaaccactgtgagataccactacacacccattaggattactactatgaaaacaaaaacaaaaacaaagaaaaacagaaagtaataagtgttggtgttgaggaggatgtggagaaattaaaacccttgtgtcttgctggtgggaatataaaacagtgcagcctctgtggacaacagtatagcacacagccataaaaaaagaaggaaatcacatcctttgcagcaacatagatgcagctgcaggccattatcctaagtgaattaacacagaaacaaaaaatcaaatactgcatgttctcacttataagtggaagctaaacactgggtagacatggacctaaacatgggaacaatagacactagggactccaagagaggggaggaaaggagggagccaagggttgaaaaactacctactggggccgagcacagaggctcacgcctgtaatccagcactttgagaggccaaggtgggtggatggcttgagtccaagagttcgagaccagcctgggcaacatggcgcaaccccatttcgaaaaaaaatacaaaaaattagccaggtgtggtagtatgtgctttagtcccagctactcaggagacttgatgtgagaggattgcttgagcccaggaggttgaggctgcagtgagctgtggtcatatcactgcactccaaactggatgacagagtgagacccgtgagaccatagctcaaaaaaaaaaattgtttttaaaaaaagagaacctacctattgagtactatactcactacccatgtgacaggttcaattctaccccaaacctcagcatcacacaatatacccttgtaacaaacttgcatatgtatccactgaatctaaaataaaagttgaaattatttttaaaaacagaaagaaaacagtatagcggttcctcaaaaaattaaacagaattatcatatgatctagcaattctacttctgggtatatacgcaaaaaactgaaaacagggactttaaacaggtatttgtacacccatattaatagcattattcacagtagccaaagatagaagcaacccaagtgtctatcaatagatgaatggataaacaaagtgtgatatatacatacattgaaatactatctagcctttaaaagtaaattctgacactacaacacggatgaaccttgaagatattatgctaagtgaagaaagccagtcacaaaagggtaaatactgcatgactcacttacatcaagtgaggtacctaaagtagtcacattcagagacagataccagaatggtggctgccagtagctgggggaaaagagaaatggaagttgttgtttaatggtagagagtttcagcttgcaagatgaaaaaagttttggagatatacgtctccaaatgccacatttgtgatgtacttaatgccaaagatgtgtacacttaaaaataatgaaaattgtaaatttatgttatgtatattttaccacattataaaacataatgtgccaagcccaaaattgacccaacatgttaattactgaatcacaaaaattttaaaataatgttttttaaatgaaaaattcaggagtccacagatgaaaaaaaatcattctgagggcattacacctacttaaaagcggaacatcaaaatgctctccaaaacttccacttgattcaaggtttgttatcaataaattggcaagagcaaaggttgagataaaaaatcttctcggaaaacaaaaaaaaaaaagatgtatttttcaaaaagtcaagagaagcaaggtcagtgggataaacttaactttcataacatgccattagaaagataaccaaattactgaggaaatgtggccctgagatggaagattacaaaattaattctcaagcaacacggcaccaaaaaataaaactattcaagtaacatggcagctgaaaagaggctgttctacatttctatgcaagcataaggagacttttaacatatgagtgatggtataagaataattaatttggagccctaaaacaaatgtatatgcatattaacctgtactaaaaaaaaccctcacctgtcttccaaactcaaagcattttgtaaatttgtcatcctaataaaacaaaaactaatccaaaaatactatctaaaaattgtacacaatagaggggacaaaagacaacagtggaagtgattttttttttcctttgaacaatgtaaagtggagccaggaatagactagatgaattttctacccacttttctttacacattagactggctacctcccttcacttcttcccctacatcaacctccataccaaatgaagtcaccctaaagtgaagtcattggagggcatgaaaagcccaagatcagaaccacctaaaatctcagaccccaatttatcctggcacttactaccccagactctggaagcctagccaaagttcccaaagtgatttcagacttcattgggttaaggccaacaycaccacttacaatcttaagcacaaaatacaaaaggccataaaacaccatatgcaagagcactttgtaatgttaaaaggctcataaactgtttaattaaaattatttatattactgtattatactattatgatcacaaaaagtctagacaggcagctaactacccagggtagaaaagaatatgggctgggatatgaggagtaagaggaacctgtgtttccttctggttagcaatcccaaggaatacttcctgatggacatcctgccctcagtaaaacacttaaaatatcaacaccatgcactgttcactgagtttccagatgttctggtacctagataaacacccaaagttccagccaaacttcttgcacatctatgaccccacacactgcccacactagcagagttcaacagcccaccgcttatgcccttcatcctcagacagaactccctgcattatctatcttaagaggcttcttcacccctctgttaacaactgttgcatgtatccgctcaagacaatcagtgttcaatctctaatgactgttaaaaactcttaagttctatctgctaaaacagctggcatcttcatgcccattcatttttcaacctaatcaaatattctaagtttcatccacctgcagggtcagaggaagccatggtgatttttctcctacctccgtagatttgcaaaaagcaatgaacaaggaaagaaggctgtctcagaatcaaaaatctctggatctcccatccatttctgctacatgatttctctgagttttgttagatgagagtgagctcctgttttgctctgcttgcctgggtcttattcaatagttcctgttatactgcttgcatggacactctttatagactccctgattctaaaataacaatgtgacaacaataacacagtgaaataataatatatcataccacatattatttattatatataacaacatacaataatatcacccaccataacgtgaacattatgaccaagcactactgtaagtgctttatatgaattatctcatttcacccccataactacttaataaggtcattaatgccatccccatttaagagaaaactgaagcaccgaaaggttatgagacctatcaaaggtcattaagctgtaagcagagttaggatacaaactcagacctcactgactgaaaaacccacatgcttaccatcacattatcctgccacacaacccctctaaagatggcttcctgtgttccaacccctatccaatctgacttccagcttctgcccacacctgaccctccccagccaaatcttgctttattttatttcttctggtcctggctatttttcttttctccaaagtcatcttaagtgttctgataaaagattgttgaactattgagtaaattttcccatgtatcttctgattctacctcaatctaacttctgtgtttgctttcatatatgccaataaacaactgaattcctacacaatagcagctaaatgataaaacatctagtaataaagttaacagtaagcacgcagtatggaagaactgctttaattgtattgactgctttctaggtctgccatatagctattattttaggtcttcccttcctgtattgaatcacttattttcttgttttaccttcttgctttgttggagcatatattccactagcatcctaagaaagggagaaaaggatataaattttttgagttcttgaaagtctgaaaatgtctagttttaaatttgattgataatttgggcaggtacagaagttggcccaacagacatattgtcatagtttcatgaatgcagtattttctcttatttttataaggatattaattatagctttaaaaaaattcttctgtaccttgcattgtctctgttttgctctctgtctttcatgttgatggctttcctcagactgatgattcctggctgtgcatttctgttaaagaatgcatctctaacatgaaaatttgaagccctttatacatgggtgttgtcaacgactgagcttcactgtagtgttatcaggcagcattctggcctttttattggaggactgccagattgattatctggaggtctttctctgggaccataaaataaaatgtgcccatatggatgcatatattcctatgtatcagcaaaattttaattactgggccaagaagtatgcaaatttaagacttttgatgtatagtagtccccccttatctatggttttgctttctgtgatttcagttacccttggcctaccctgacccttggtcaagaaaacgcaatgtttggtctgaaaatactaaatggaaaattccagaaacaattcataagttttaaattgcatgctgttctgagattgttctcacaccttccaactctgtcccgcctaggacatgactcatccctctgtccagcataactgtctacactacccacccgttagtcacttagtcgctgtcttggtgatcagatcaactgccttggtacagcagtgcttgacttcaagtaatccttattttactgaataaagtgcttcgggaaagcacaagagtagtgatgctggcaattcagatacactaacgacaagccataaagtgcttcctttaaggaaaaaggtaaatgttcttgacttaataaggaattaaaaaaaaatatgctgatgttgctaagacctaacataagaacaaatcttctatccatgaaattgtgaagaaggaaaaagaaatttgtgctagttttgctttgcacctcaaattgcaaaaataacagctacagcgtgtgctacgtgctcagttgaaacagaaaaggcattaaatttgtgggtggaagacaccaacataaacgtgttctgactgacggcaacagagttccatcagaggtttcaggcatctactaggggaggtcttggaacatatcccctaatgagaaggggggactagtatattcatctatttcatgattcaacttaaatctcagttcctcagagagagcttctctaaccttcaattctcaatttgcctctcatcagggtaatctctcttcatttctctttctcaattaattaaaaagaagtttttttgttaactaaattatggtatgtttcctaatgaaacagtatacaactatttaaatgaggttacaaaaacgtatgtagaacacagggttaagcaagacaatttttaagaattagaacaagatggaaggggggaatttgtcctactggctatcatgacatttcacaagactgtaatagttaagaaagtatggaactggcacaaggacagtgaggctgactgaccaaaacagaaagcctggcaacaggcccatgtgtgatataaacttgacatccatgggcaaggatggccttctcaataaatgaggctaggtcaaccaattatccatacggtggggggggtgggggagacaatatctctatctcactccatattacagaaaaaataaattcccatttaaagaccaaaaaaggaaacaggaaaactttaaaattcgtaaagaaagatgtgtgacttttggataggcccagatttcttaaaactctctttctctctctctctctctctctcacacacacacacacacacaaacacacacacgtgcacacaggcacatatattcaaatctaaaaaagaaaatactgtagaatataacttcatcaaaatcaaaactcttggatgtcaggggcactaaaataagaatatatgccacagactttgtgcagatatttgtaatacatgtaattaccaaaagatcagtatccaaaatacacaaagaatgctttaaaatctatagaaatatacaaacaatccacttaaaagacgaacaaaggatatcccaaaggaagaaatctgaattgccaataagcatattaaaagacttttcaccacaatgagataccaggtcgcatctcatcagcttggcaaaaatataagtttgacaatatcaagtactggtgaggctacagaatagtagaaactcatttctgatggaaggaaaatgattcaatctggcaatatctaataaaatagaagatgtatacatcttaagagctagtaattctatttctaggaatatacctttgatgggtagctttcaaagttttgatcatcacacatattttcattatgacccagtatacacatacttacttatttaaccgaaatgaaaattcacaaaacagtgcttattcttactgtgacacattttgagagtttccattttgttctcattcattttttaatgttgggtgactcactcaattgattttacaaccactaatgggtaaatacactcagtttaaaaaactgtcccagaaaatattctcatacatattttcttgtgcacatgtgagagaatgttcactgtggcattctttgtcaaaaaaataatttaaacagtgtaacagtcaatcagcagaagaatgaatttaaaattaagggcatattcacacaatggaatacaaaatatcagcacaaaggaaagaaccaaacctgtaaatatcaacacagataaatctcattaactttatactaagtaaaatgggcaagatatagatgaatatatatagtatatcatttgtacaaactttttaaacacgcaaaataatactgttgaggaatatatttatgtataatgaatacataaagtatgaagacaggcgtggggaaaaaggggaatgagatcagggaaaagtacagaaaagttaagtgaacaactaaatctaaattattaaaaactgcccatcttcagacgagattgggcgcaatcaaggtggtatggccatagacaaaaattaaactattgcctcccagggcagcagcttccttccagacacaaggctaatgaagattcagattgccagttagagagactcatgcagccaaactgagatcagtcttcaaagcttacagcactcatcctttaaaagtgttctgtctatttagtaatcaagtacttacactgagtatctatttttaactaagtaatgaaattcagaacatggacaaaaaaatgcaataggtagttgtgggcggatgagatgtcacagcagatgccccaaacacagccatgtgccagtgaggttgagtcactgcaatatgctgaaaaaagatactgaggctcagctgccacaggttgcagtgagccctctctgctttcctcactgttgtatttgccaggcatcattccagaatgctgaacagacacttagacattttcaagattagaaaaatcactaaaaatgacaaaatatggcatcttacaaatagcacatgcttgtgatcaaattaacacagagcaaagaactaataaacagtaagctcatggaataattctctaaaattaataatttggtcccttcagatctcagtctgtattttacctgcaagagtaaatccagtattagataatacactttactataatttccttttttttttttttttttttgagacagagtctcactctgtcgcccaggctggagtgcagtggtgcaatctcggctcactgcaagctccacctcccgggttcacgccattctcctgcctcagcctcccgagtagctgggactataggcacccgctaccatgcccggctaattttttgtatttttagtagagacggggtttcaccgtgttagccaggatgacctcgatctcctgaccttgtgatatgcccgcctcggcctcccaaagtgctgggattacaggcgtgagccaccgcgcccggcctactataatttcaaaaatgtcaactcatttcagggaatgtcattaaaaagaattatgcataacagaaagtaagcaatacactatcaggccaataaaaatccttccaaaccacaagaacaaaccactctgatacccaaaacaagtagtttctcaaggaaaacatctaactcattcattcatccattcaaatcctacttactacattacatgtgaaaagtacgaagatagatcttaaggaggtataaacataaattaaacaagaacttggcccttaagatactgatgggtctagcaatggagtttagaaacatacacagtcttattaagtaaggtagaaaaatctagataacataagagaaatatatatgaattgctatttaaaaaaaaaaaaaagaaatcttgcttcgattaggttcttgcctatttctcctatgaaccagatctagaatatagataacttagaccttatctcttcaaggccaactggctacatgtaataagactggttcttgtgacctttaaaaattgtctccttgttttatacttttatttatactgtgtcctatagggtatacctcttcgagttaatagaaattagacatgtagatcctaccactcataactgtgtctgctgaagatctaaaagaaaggaatgccaaaagtgacacaccaaaaagaagccattcttttccctaactctgtcattgttttgttacagaaacgagaaattcacacttcggctgatggaaggattgaagaaggaattgttaatgaacttctaaagaacttccctgaatctttcagacaagtactacataaaaggcatcaataatgttccagattaacaaggtctttcacatcattttatgaatgtgggtagaggtatttttatttcttttttgaagctaacgaaagtaaattccatacatattaaatgtcattaaatgccatatcacatatttttcaggcagttaatccagaaaaagctaggactaggccaggcacagtggctcacgcctgtaatcccagcactttgggaggccaaggtgggtagatcacctgaggtcaggagtttgacaccaacctagccaagatgatgaaaccccatctytactaaaaatacaaaaaattagccaggcatggtggcggacgctgtagctactcaggaggctgaggcagtagaatcgcttgaacccagaaggcagaggttgaggagccaagatcgcgccattgccctccagcctgggcaacaagagcgaaactctgtcacgaaaaaaaaaaaaaacactaggactagtggattcatttcaaatttgtcatcagatcccactatttgcacttaaatcttcaactaaacattcaggaatttgagaacacccaaaagggaatctgtgaaaaagaagcaacaagactttatgctgaaaaacgtaactggtttctcaggatactgatagaaagagtaagaatttcaggttgatatcactttacatataccagtcaccagtccactagccatcaggcccctgtcaggtcttcattacctctgaaaagaatgtctgtgacatgctaaaaaagaaagatttatttctatgtcctatatattcaggtcaatgaacattcctggttgatgggttggttttattttttttctttatttttgtttagagaaggggtctagctatgttgcctaggctggtctcaaactcctgggctcaagtgatccacctgtctcagcctcccaagtagctgggactacaagcatgtaccactgtgcccagctcaggttgtttggttttttttttttaatgacagctttactgagatgtaatttacataccataaaatcactgtgaagtgtgcaatttgatcattcttcatctattcccaaagctatgcaaccttcaccactatctaattttacaacatttttgttactccaaaaagaaatccctcactcaagcagtcacttctgattcccccagcctctggcacccactaatttactttctgtctctatggattagcctattctagacacgtcacataaacggaatcacatactatgtgaccttttgtaatgagcttctctcacttagcacaatgttttcaaggttcatcatgttgtactatgaatcagtacttcactactttttatggttaaataatattctatttttgatatgccaaatttgtttatccattcatcacctgatggacatttgagttgtttttgcaggacttttgacctgcaaaaacctcagtcatctaatctgattgttcattttatggataaaaaattgagatccagtgagaaaatgggaactgcctctggctacacagacttaagactatcaatggacatctgaaatgccttcttttctccaagctcaccccattccaataaaagaagaaaatccttaatgtgtttgttcctagcaataaaatgcaagataggctaggtccagaagacctgaggtgggaaggaaaagaaaataggattaggcacaatcttgatgaaccaaaggaacttatgaaaagaccaacagttttaaaccttcaaaaacacagaaaaaaagagatgagcacaatgcagacataaagatgttatttttaatcaaagaaggaaagaaacatgaaagtgtgggaaaacctgaagagttactctgaaatatccagtgatccatttgaaaatctttttattctcagacccagaagaaaaatatactgatttaaagatcccagaaagaggaaatcaaagtcaaaaccacaaactgagaagaaatgagcacagtaaaggaagtacatcactctactttctgcaggccaaaaattacagtgagggaaactggaaaataccctcttgagatctgatcttgatgacttcaattacagatggagtccatctaaagaaagcattttgtaatttaggaggctccaatctttatctagattgtctataataatgtggaaattcagactgaatgaatcctatatacagtctctatttcagaatccccacttcctaccaccatttataagctggggaagtctgtctgagcaccaggcctgctgcttgactaaatggcaaaaattctaaaccagtaaaaatcaacaaaaaaaaaccctaaaaagtcactttccaatccctggcttatctaaggatgagagttgatttataaatcccctaatgtgtatagttaacttttagaagaaaaaaaaaaaagttaaaactgtcttctgatcaactccaccagagttctttctaccaaatcctcttgcctcaacaaaaaagcagctaacctaacactagcaaaatggctagtaaatagtaaatgctccataagtatttgattaatgaaattgaagataatatcagatgttttcaaaagcatcctactattccaaagaagtgtcttagttttttatcttaccactaaagaacgttaactcagtattcttatacccaagtctttagcttggtcaaacaacagcaaggtgtgtagatggcaaaaggcaaaacagtctaacaaggagaaagcagaaagagaatcaagaatacaacatttctgcttttactgctgctgccaccactgctaacacccctccaaacccagcactgcatggttgtctcagagtccatcctgttacccaaatgatcccacagcaacctcatggcaccatcatgaatggagacacacaagggcaccattcactgtgacaagacactgacatgcacattgctttgcctcctgccagactacgggatgcagagagggtgcagaccgaggaccttgaaaaatcagcttcatgtgacatcatggtggacatgtgtgaaaagtactacccacagagacactgatatgaccatcaccagagatctttcacagagaccacgagctccctgtcacctgggaagcaatggcggacccagctgagcaatgtggacccagttgggcacaagctgctccagacccagctgggcacaagctgctggcccagttgctggagcctagtgaagaggaaaatatggtgtgcatcctctatgacaagatgtacaagaacttcatggaggaggtggacacaatagataatgagacctaccagtggaagaaggggaaactttgacataccctagccactagcctgaatgctggctcaacttaatcccacctggaaccagcccaaccaaggtagggttcaagtgtgtgatggatctaactcttagagaagagtttctgcagagactaggcttctattggtacatctggctgccagactggggcctggggccctggcccagtgattccaggtgcacctaagtggagagagatgggaaatggcaaaagtggatgcccttgaaaggaacaactctaccacctggaatctaggctgcccctaccccagccatcatctttgttatctatactgaccagactagacaatagtagtacagtgtgtgcctgaggagccccactcattctaaagctagctgcccctgctcaagccacggtggcttcttcaggacgccctgtaccaggtcagtgagattcctggctgcatctttgtccatatcaacagcttcatttgtggatgccatatccaagaaggtaccttgagcatggcccctgcaaacttgccctagtgtccaatacctatgcttcccacaaatcccagagtccagtgaaatttcctccatcttaaaaaaaaaggcaacatttctagtaagaaaggactcaaaaatgatggggatatgtcaaaaggacccaaaagccacttgatagcactcccaatgacaaaaagctggagcaactgaccaacaaaataaatgataataatatttaatttataacccacagaggaaaatacatacctaaaaattcatactggcataagtaaataactgaataaataaataactgaaggagaaggaagagtgtttctttacagtagaattcaaattaataaacggggaggaatgagaaaaagagaaaaagcacacttagacaagcaccagagtagtaatagttataggcaagaatcatccatggatgctgaaattaatggacaaaaggatgatgagaaaccgggtattggcaaagtctcaaagcatcactcagcaaaatacagtacttaactaattacaaggagaaaaatcagttaactttatagtgatcacttaaccaagttatcaaagttaacttagtagtaaaaaggcatatggatatcatatattccctgatctgatgcattgaggatggtacaacaacacatctgtactacacttgggaaaaaaacatatttttcactctaatgaaaagaaaacattagacaaacccatgtggatgcacattttacaaaataagtagccagtactctttaaaagtgtcaaggtcatgataggcaaagaaaaattgaggaactgtcactgttggggagactaaggagacatgatgattggatcctggaacaaaaaaggcattaatggaaagactggcaaaattcaaataagacctgtagaacaattaacaatattataacaatgctaatttcctgtagtatttttgtagctttttggtaaatctaaatttgtttcaggaaaaaaaaaatctgttttttaatgcaacatttctaggtgtgagatcttgctgtttcaaccccattgtgagaaatgacccattttggctagctattataatattcacattaagagagtttaccaaatggtatcagattcagaatatgtttgttgctggactgcagcaaacacaataagaaaacaagccaatgaatgaaaaacacacttttaaaactctgacggcatgctcttcacaaagaaaaaacagaaaaaaagacatgaacattctagtcataaaacaatggtccacaacacaaataaaataacctgaaacataaaatgtcaagaactgaacaaaaccaactgaatcaacatatgatgagatgatgacttggtgggtttctgtggcagtcaatttttatgagtctggtaaggaagggctgtcattaggtaaaggttgaattggttctggtacattgactgaattcattctggtacatacccagattttaagtcagttatcctcaaacagtttgtagcatccagtcccacttttccattccggaccacgctagatatgaaaggggagagcattggagatattcggttcaaggccacttctggggacattttaacttgacttgtaaatcaccactgaaagcagaaggaaagaataatgatcagggcttacaaatggactagatacaacactctgcctgaaaactggacagcatacagcagttcctcttgcatgaataaataattcatttcccatctctagcgcagcctcttccaatgatcctccagaagaaaccacctcactgctgctcagctactcaggactgggactacatcactgcttttcaggaacagaaggaactcctgaaatacaattcccttttccttcccaaagctgatttctacactgccacactctactcaaagtggtcccactctatctcactcgttctaccttagctgagtccaaggagccctcgctaacaatcctctatcccaacacaaaaacacacacatcactgagttagcaatctctccctgtgtgtccccacaaggagtaaaaacttgatggataataccgtataaaactctacaacaggctgacctgcttgaagctattacttactagaaattatttactgctgatatatctttcttttttttttttttttttttgcgacagagtctcactctgttgccaggctggagtgcagtggcgcaatctcggctcactgcaaactccacctcccgggttcaagtgattctcctgcctcagccttccgagtagctgggactacaggcacatgccaccacgcccagctaatttttgtatttttagtagagacggggtttcatcaggttggccaggatggtctcaatctcttgacgtcatgatccacccaccatggcctcccaaagtgctgggattacaggcgtgagccaccgcacccggcctactgctgatacacctttcttaatacctttccgtccacagtgtagtataactacctgcttacgtgatctcttccctgcagggtctatgttttgaatccccagggtttaacagaaatacctggcacatgctaaacactcaataaacattttttaataaataaatgagtaaggggacaaaagttagagaaatatttcagtatggagagaagataatgtgccccctccccagaatttggtaggggaatagatataacaagatccaaggaagagatataacaaaaatctacttgacaattaaattatgaaaacatacatctatgcagctatcaagcaacacagactaacatggatcttaaggtatttgactttaaggcastaagtccttacacttaaaaccacaaaagtagaaccaatacatcatatctaaattatctggaaactcatagggctgggggagggagtacacgaattcttcttaatagatttctaaatgaaagcctcttccttcagaggaaaaagtcgattcaaatgatcgtttccttcctcaattttaaagaataatgccacatcaaaagaaaattaatttccagcaagttaccagtaaatgatgctctggttctagttttcatacattataccacatgaaaacttacaagtccttgctaaaataaatgttgaaaattaaaacctgtttcagtttattatttcagatagtaagtaataaatttatttgctaatttgatagctcaaaaaataagaacactttgaccctatatagtgatgacaaccagaagtatcttcgagattaacacctttatattcatacttcagttctaaaatcatcctttttgtaaatataaaacaagctcttcttctgaccgcttaacagatgaccgccccccgactagtctctcatttcaaagtaagactaaacatctaacactgtactaccaatcataaaaatcatgtacttttttaaacattttatcacttacaaggagcgtccatatatattactgcagttgatcttcacaagcctgaggtagtaaggaattttaattcccagtttgcagataatatgggtaattattataatttgattctgaacagtatactaatccacatcataattttgaagcctatttttttctattcgccaacatttccaccttcatgtctatgtcacaattcttgaagggatgcttatcaaagtcatatgctaagtacaaatatacctatcttataaaaaagcaaaagggtctcacctatattaccgaattgttcttctgtgtttttccccacagtacccattattactttatctcttgcttctacaaaagaaggaaacagaaccaacacattctagacacctatctacccattatcaggcattatattactcatctctatctgtaatttcatttacatttccccaactctgttccctgagaacaataattgttcccatttgacaagtggaagctaaagaaacttgacaaatagaaaattaaagctcagcaaaataaaataacttgttgaatgttggaagctggaggatcagaatccaaatccggattctccaagtccactatacccatctttctctcaaataaacattgataacttctatcaccaaagagaaaagcatcaaggtgattttgtaaagcgtatatcttataaaatgtgaacagacaaaaagtaaaaatttaaacaaatgattgctttaycactaaaaacaaactggactattgctgacctactgctgaacctggtctgagtgattcactagtcaaatgttaaagggaacagccttgctctagaagccaaaccatactaagtgacaacaatacattctaattcagcaacggtcgtgactttaggatgacacctgagggaatgaattctatttccagggcagccataatactatgttttaacagtgcaaggtttcacgcagtattaaaatctatttcaaccatgaggaggtgtgacttctctaaaaaaaaagggsggggggtggggagtggaacacaatgactccaaaatcagaagtcacttagccaaaaacactggtcctttggtgcagtgaaccgggtacatggacagggagtcaccaccggtagtaactcttacgcatggcagcactataatacaccccagatatacaaatatttacggtggtcagagtcccctgaatactactactgcaatttgtatttcctgattttgacgtattgcaaaaggaaaatgcaaaattacaatttttgcaagggtctgctaccccaaaataaagttacaaaaggtcctttgatgagaggcctggggattacaaagacgtctaaagcaccatccaggttcttgcaattaaaatgagatgacaaacacggaaacatgtgccctgctgacgtcatggaacggaaaggggtggcatcctgctgcgtcacgtcgacgtcatacagcgcacgagggaagttacactggggaagcaatttcccccaaggggcaacattcgagaaaaacaagttagctcagacccgaagaatgaccaccccactctaggggacgtcttaaaaagggacactctcccctcttccaaactgtatgattcccctcatcaggcaacaaggaactaatactcggggtttacaggaaccaggggatgggccagayatggagaaagagacgcctctggccttgggggctcgttcttgagggaatcagcgtgatggggatgagaagggcatctttggaacgggggccttctccataggaagaggaggcgagtcccctggccatatttaaaccacagttctccacgccacctgtgcgactcgggatccaacctccccgcaccagccccagtccaggtacctggaacttagtccgatcggtaaccggcgactacgtggggtacaggtacccgagcgcgcccccgacagacgcaccgacctgcgcgcgcgccgcgggcaggatgcgtgcgcactccccggacgtcccgccccgccccctctgcggccccgaagctgggcggcgtgcgcgcccccgcgccgcgccgagccgggcgctcggaaaggcgtccccgcggtgcctgacagttccttcctcagcgcctgccccgtgagtgacgaggagcgcggagtctcgccatatcaggagggccctgttacgtgaggctgtgcaccgagactattccaggaagaagaggggacacttggtgggcggggtgatttcgggcagtcaggtgggckacccgcgtaggcgtctgaaaggcccgcgtcgttagggagggcaggagtggcgtctctggttacggggtcgggcaaagggcagaggtcaccgtccaggttggacagcagcacctttgagcgatggcggcgtctggggaaccccagaggcagtggcaagaggaggtggcggcggtggtagtggtgggctcctgcatgaccgacctggtcaggttagtccggggccagttactcagtctgcggctcgggggaggaggcgtgccgtgcgctatgcgcccagtggagcttttgggcgctgggtctccagggatagacagtgctagctttgggtatgagctgcaggttttcgaagccttcagcctaccttcctggcatgaaagaacttgagtatataaaggtaaatctcaggrgaggggacgtaataggccagggtttagtgaaagctctaatattactcaaagcgctccccaaagacctgccctccaaagacttgcgcccccaaagacctttcttggcccggctgctgagcctttccccaaacgagccagggaactttgcccacgtcattttacctccgagaatgtgcctacctcacagggttgttgtgaggactaaatgaagtaaagtgttttgtcaagcgtaacattatccaaattgggtattattcgtctgagcttattgtataaaataatgagttgagcagaaatcaaaaagactgtcacctttcaccatgttgattgtcggcattactgcagtattttatatttacagcgtatttttcagcaagccaagtatgaatcaaaataaaaacataaacacagtatttacaacctctgaaaacgatgatcaaattatgatagaaaatatgccaaatgaaaattgttgagttaggtcagtaagattgagtagacagatccttctgatttttcttttttttaaattaaggtagcttttctgattacaaaagtaatgtatgttcactgtaaaattagtaataaattcagatattccaagaaaatcctaccactccaattactgcagttcagtcttttgatgaatatcttttcagttgtaatgctactttgtgttataaaaatgatcaggtatgctacagtaacacctcattcgtcctgaaatgttgcttttccaaagggtaatagagaacgtggaactaaacaaaaaggctttgggacaatcaaaataagtcaccaaattgctgcaccaaaccacctgtattctactcagaaaataggtctagggtcttcatgtaaccaatttaaccttaccttaaaatatttataagctgtgttaccaaatttccactgagattagaaaggtgggagttagagaagagactgctagaggcagttatagtgactgacgaaaacttgaggatgagtaggagactgtgtaacgagaagaagcaacaaaagaattttaaataccaatgacctttatttttccacaaatattagaactattctgtcagacactgtgccaagataaaaatactttcctttggtgacagagcataaaattgaatctagttggagacatttgttgaagaggcctgtacatctttttctagagcaagagtaagtaaacttttctgtaaagggccagatagtaaatattttaggctttgcaagccgtatgtggtcaaggtcacatttttttttaacaacattttttaaatgtaaaaaccattcttacctcccaagccttacaagaacatcctgcaggccatagtttgcagacatctgtgtagaaagaacattactgtgtttacaacacaatatagcaattgattttactggtgatgactcttttcaagaaaaggttatatggtacttactaaattttgtataaaaatagagcatgtatttcactttagaaaaagtttcatcaaaaattcataaagttgagttacataaaggaataaaccttcatctaaaatgattcattccatgggaaatccaccaagctaaatgtttaccatgattttatgtgtgaagtggcagaagagtaagaaaactaaagtggaccgggcgcagtggctcatacctgtaatcccagcactttgggaggccaaggtgggcagatcacctgagtgaggagtttcagaccagcccagcgaacatggtgaaaccccatctctactaaaaatacaaaaattagctgggcatggtagctggcgcctgtgattccagctactcaggaggctgaggcaggagaattgcttgaacctgggaggtggaggtagcagtgagctgagatcgcgccattgcactccagcttgggtgacaagagcaaaactccatctcaaaaaaaaaaagaaaagaaaagaaaattttctcatacatcctacctgaataaaagtgtcagggttaaaattcagagctacttccttgttaccaaactgagagctttctgtgaagcttgaccatcagatactaaaaataactatagtactttgtggggtggggtaggggagtggtgtcaaaggcccattttagcatccgtcagggttttaaagtcttatttcagagctagaaaaatttggaaattatttattctagtccttcagtttttagataaataaactgaagcccagagaagaatttctcctcttggccatattctttccttcataaaatatccaagtttcttctcttcacatgaatcagtaaaaattttactgatgattagcaaaatcactagtaaaaattttactgatgattagcaaaatcactagtaaaaattttactgatgattagcaaaatcattagtaaaatcatcagtaaaaaatcattagtaaaaactgtattcccatatagactctctctgctaattcccacagcttttcaacaaacttttcatgatctctcgttacttatgacactgaagatctttacaaaaatctgcgtataggattttcatttaaaaccctgcatctgtgataaacttgggtgcaacttttctagttacagttagtatcatgattatattagttatctactgctgctgtaacaaattaccaaatttaataattaacgcaagtttatttttttactgttctggaggtcagaagtctgatacaggtctcactgggctaaaatcaaggtgtcagcagggctgggctccattctggagactctagaggaggatctgttttctttccttttccaccttccagaggctgcccacatccttggctcatcgtggccccttcctccatcttcagagccagcaatggttgttcaggtctttctcacattacatcactctgatccccagtcttctggctccctcttctacattataagaactcttgtgattacattaggcacaaccagataattcagaataatctctttattttatggtgacttattaggaaccttaatttccccttgccacgtaacaacatattcacaaattctggggatttggatgtggacatactttgggagaggggagcagagagtatgttatttttgctaccacagtggttaagcttgaagtaaaaaatcctacaatatttagttctcagagactctttgaagcctatcattctatcctcacattttacaagtgagataaggaagagagcttcaatgacttactccaaatcacacagccagtaagtggttacttactggctagtaagtggctagtaaaggctactacccaggtctcccaatccttaacctttcttttttatttttttaaatatatattttctattttttattttgttaaagatgggctctcgctatattgcccaggctggtcttgaacccctgggctcaagcgatcctcctacttggtgtcccaaagtgctggggttacaggcgtgagccaccgtgcctggccccaattcgtacctttccattatatcattctacctctaactctgactagtgtttattgcccttttcatctacagtacatttgatagcttgtagtctgtacattcattgttaactttataaactgataaggaataacaactaaggatttataattttcaagtctaaagatagtatctttattactgtgccttattcctaaatttaactgtaactagcctggacacgcatgcctattctttagtatcacttcagaaataaaactgcttcaataactaagcccttttagatggcatccaagcccaacttactttatatattacattactgtgtgccagacactgctaattcaatcaatgaataaccttttttttcatttctaatttcagtcagctatgaatagtaagtcgtatgtagtaataatttttaaaaatcattagctcatacagcatggcaaacaattgaaattatttaatactcacttatatttttctcatcatcctcttccttcttgaacactcatctctaaagttacacattacaaagatacaaggaatcaaccctggtcttatgggatataaagtcaaagattttccaaagacagatttccacaacaaaacaacaatgtgtgaatatttttagacgttaggctcataggcctttgttaatcatgttttcattagtaaaccttattttttatgacctgtatcacccatttttttaattattcattcaagaaatatttattgaatttatactatgtgccaggcacttcctgatgtgcagaggatacagcagtgaaaacacagacaaaaatccctgcctcatgaagtttacattctagtaagacagtatcagtagaaataagttaattacatagtaagttaggtaaaagctaaggagaaaaattaaacatgtaaggagggatgggaataggaagtttagattactggcttcagaaagcctcactgaaaaggttatttagagtaaagacctaaaggaggaaagaaaacaagtcataatctgagggaagagcattccaggcagaaggaatagtgtactcaaaggccgtattcagtgaagaacatggagtccagtatggatgaagaagaaaaaaagagtcaggagacagcaatcagtgattaaaggacattgagtcatactttggatgagatgaaaagctagtggaggatttgagcaggggagtgacataatcttattttgattataataggatctctccaagggctatatgagaataaatagcatgaaggggaaggcaaatacagaagcagggacacaaattcagagtcaatcccaacaatctaggcaagaaatgatggtagcttgaaagcagtgaagtggagagaaagcatctttctattatatttttggggtagagttgacaggattagtggaagttgacctctatgaaaacgcagaagattgtatgcagagaaagttgggtgggagagggctgtatcaggagcacagagtggaattgggagggttgaggtacctactagatatcaaattgaggaggtgaagaaaatagatacaagagtttggatctcaaaggagaggtccaacccggagatataaatttcagagtcatcagtgtatcaatggtatttaaagccatgaggctggatgagatcactgagggtctgacctcctagggcactacaacatttaaaggataaatttttaataaaattgacttcctgtctctcttcaagtctctctgcagtcctaaaacttgctttgagacgtgcttaatacaaacctatgtttatatttccatagcaatagactctgatgtcaactaaaactctgtgttatctttttacatgctgccaattaaaagtgatggcttgagagataagactcgtgttcacccaagcatctaagcttaatcctgccaaatcaggaaatgagtgcctaattttcaaaaggtttaattggatagtggaataagtgaatttagaagcttttagatccaaagcggatgaagcattggacctagattacttaaaaaaaaaaagttatggccaggcatagtggtggctcaagcctataatcccagcactttgggaagccaagcgggtggatcgcttgagctcaggagttaagactagcctgggcaacatggcaaaacccggtctccgcaaaaaatacacaaattagctgggcgtagtggtgtgagcctgtagtcccagctactggggggctgaggtgggaggatcgctggagacccagaggttgaggctacagtgagcctcgattgtacactgtacttcagcctggacaacagagtgagaccctgttaaacataaaaaaataaaagagagttatactgtacctatcaaagtttgtatttgtttgacataatagagtactttgtaactgggacacaggttacagagtcaagaagcctcttggcttgtcatatttagaacagagaaatctcttttacagtcacattttcaaaaactaaaaaaggaatattgatccaaaaagtatcatgctttcccagtattcgaggaatataatatccttcattattctttctgcttcttaaattggtctgaaaagttgcttatcagttaccaatcatttattaaattagtattttgttaaacatagttgtgtcaactgtattccctaatatcaaaagtaatcattcatgggaaatttggtatgtccctttaatgaaaatatacattaaaaaattatggctgggtgcagtggctcatgcctgtaatcccagcactttgggaggccgatgtgggaggattgtttgaacccaggagtttaagaccagcctaggtaacagggtgatgagactctgtctcttaaaaaaaaaaaaaattgcatatgacaaagaaagagcacctactgtgtactattacaaagcagtccctttagcaatccattcctttgccagctct

SEQ ID NO: 96208 - DNA, 80024 bp, Homo sapiens
  misc_feature (1)...(80024): n = A,T,C or G
gcagtggggctctgatggggagatctgtactaaggaacctgatgctttataatagctcttaggcatcttgcttaggcttaaagaacctgacttgcaacctgtgaatcttagagaatttctaaatttgaatattatgtaacacttgattgctatgggccacttagctcatagtggttgtaaatttagcttcagtgtcatataacccattgctctgaaggtgattttttattttttttgtaaatgataaacataaggcaatattacttgcagatagtccttagaaggataagtatcagtttgaggggattataaacatcagtttgtgcttttttatccttaccatataataaatgagctatttcttttttaggccaaaaaatcattttactgggcaagaaaaacatctcattcctttgtcgtgaatatccttgctcaggctctttatgaattattttctgccacagatggtaagtgtagacactttttagtgaatattactcaattgcagatttttagcgtaggaaaggaataaacaagttagtgatttgtccagaaataaaaatgttacctgagtttgctaactcccaagttggtagttttttaaaattccattttgagcaatagttgtagttttagttttagtttggaaggtagtggaatttccttagacaacattaatagcaatgcctcagtaacatattcattattttgaattcctctggtgcagactagatcatgcttgtcctcacacacacaagactgtgatggaaggtgtttttggccatgtattaaaaggcaatgtagtctttttcttcctaacactagtttcaatttctttttaaagtagtattttataaaatgaatacaagctgttaatcttgtccctgttgaaaagcacaagtaacaatgcattcaccctttacttatttggattattttggtgcttttgttactgtttccatattatacagaggtcacggtcaatgtatatattagagaaaacacaacttagcagaagcagtgttagaaatggaggaaaagaggccaggcgaaatgattcatgcctgtaatcccagcacttcaggaggccaaggcaggaggatcgcttaaagccaggagtttcacaccaacctggacaataaagcaagaccccatctctacaaaaaattaaaagatcagcaaggcatggtggcgtgtgcctgtagtcccagctatttgggactatatagctcactacagtgagctatatatagtgagctatatgaagtgccactgcactcagcctgggcaacagagtgagacttcatcttctaaaacaaacaaacaaaaaattaaaagaaatggaggagaaaaggcaactgtgccacctcctcaccacagcagtgtacacatcagtttaatagtaggttaatgaaactaggcttttcagttttcaagaataaatactgactcatatgccactactctagtatatttgcaacatagctatttgtatgatctggctgaggccctagtgataagtgctgtggttataattacaaaagatgatacaataaaaatgctttctgtagcctctataaccattaactcttcctaaggaaaaaaaacaaaacaaaaaccccaccaatctcactggttatgatttttccaaacaaatttctcttgctaaattggcatagaagttaaaatggctggttgggcaaatgaaagtaactaagtttagagttttgggcaaataaaaagaactaagtttagagttttgggcaaataaaaagaactaaatttaagagtttttctgagctcttctttctaagcttttctaacttcttgagttcttaacattatgaatttaaatctaccaacaaaacaacattttttaaaagttacaagattggaggaggaaagacctttattggagcaaaagtttacctgttgcatcctttactttttaaaatctgttgtaaagaaaaatctgggcatacctgaacagaacattgattctaaatggttaaaaaggttatcaattgattacactacattgtgagggttttatgagttactttgaaaggtattaaaaactttatagatataaggaattattatttatcgctactcacagctctcttcacttgataatttactgcttagttagagatactggttggacatcttagagactgggaatttggtttctagaattgtgttaaaaagagcttccaaagtattttgcatcacttaatgaattaacagcaaaatcaaggaagtaccttttaaacaactcttccaagacctaaatattagtagttatttactaacagaaaaaagtttattcatatttatattactctccataatgctgattatggaattcagaagaaatcctggttgttgaaattctaggactagatatttaaaaattatctgcaagatgtagcgtttgttatttctcattttttctgatatatcattagcatcctacataagtgtgtacacatatttgattattttacaattttattttagattccctgcatcaactaagaaaagcctgttttctttatttcaaacttggtggcgaatgtgttgcgggtcctgttgggctgctttctgtgtaagttgtgatggcacagaggatacaaacctgccagattttcttaggactgttcagttgatgaattactgcaaatctttcttccttacacattttgatattttattatctgttagtatcccaatgagaaggtggcccaaagaaatgaagaaacgcaatatttagtactgttttctttctagggaacagcagttaaaggtggtggtagaggaagctataacccttgattaaaatagaagcttgttttttgcctatggatttatccatatgttctggtctgtgggagccaggaataattgagaaattttaatttaagaattagtttcattgaagtacggggacttatacaacccagtattagttttgagcgtacagacatatgtggaactattcttggaaagtctacaaagtgaaatctatcgagttatttctcatttgcaaagtgatcctttgagtcatttctcataatctataatctgaatgttaatactgatatttttaaaagccctacatcccaacagaccaggccatctagatatttcagcgtggtgtctcaggatgagtaaacaaacagctaaaaatatatgacttatgtaaactagagttacaggagttactagcttttctgaaagggatatattctaagtattttttcttaaaaaaaaaaaaaggggggtggggggtttgctcctgccatcaaacttaacatgcagacatatttgtgacgtcctctaaaatgtagaatgtttcatacagaattatgatgcttgggtaaaaaaaagtaggatgtttgttgagcttcgtagattatatgtaattggaacctttggagtaaattttagtttctgagtcttaccaatatgtatttttttctattacagattgtctcctaaccctctagttttaattggacacttctttgctgttgcaatctatgccgtgtatttttgctttaagtcagaaccttggattacaaaacctcgagcccttctcagtagtggtgctgtattgtacaaagcgtgttctgtaatatttcctctaatttactcagaaatgaagtatatggttcattaagcttaaaggggaaccatttgtgaatgaatatttggaacttaccaagtcctaagagacttttggaagaggatatatatagcatagtaccataccacttataaagtggaaactcttggaccaagatttggattaatttgtttttgaagttttttgtatataaatatgtaaatacatgctttaatttgcaatttaaaatgaaggggttaaataagttagacatttaaaagaaatgattgttaccataaattagtgctaatgctgaggagaactacagtttttcttttgaatttagtatttgagatgagttgttgggacatgcaaataaaatgaagaatgaactttcgtgtctttttgtttcttgttgtgggctcgtttacatagcttcatgataatgaaaaagaaaaccaaagtgggatgaaaagtgcagagggaaacctgttctattaaataactggggaagttgccttaatgtcttgaccttgatttcctcatctatccagtgaagcaatttgataaggttattttctttaaaaaaaattacttatttatttatttattttattttggggctgtgactcagatttgaaccgaaaggttctttgctgagttctctgaaaatatcagattctgacaggaaaggcaatcaagggctttataagttccactgtatagcaacatttataaggcagcccaggatgacatcaagaaacagtgagtgaacaagtaagcacttgtaatacccggcataataccttaaaatccgttaggatttactgagtttatctatagtaaatttgaagagactatggatgttcaaagggtatcatcataaaagttcagtaaatctccaaataccatgaaagtaaattgttacttctgaaagagcagtaaaatataacctggcaaatgaagttactacttgagattctaacagggctaaaatataacttacaaagcttttacaataaaaatttcaatttttaagttttttcagttgaaaaaaattcttcactggccaaatcactagcaaaatcagtttcaaacatcactgccttgttttagtagagcatatggtggacccatttgcttggtttcgtaagattcccatctaactgaccctaaacttctattttctggttaaaaactcactttcccagatctggccttcttagcagttagttagctttctttttcgagaacaaagatctcacttcatgtggttattgttaacaagattacaaatgaaaaataacacgctatcgttgagatatagatgttcccacacaccgtctttgcagggggtgagacttccaagctccctacgtaccaagcaacagttctcttaaaattctgccctggcctcggtgccctcatggccaggattcgaggttacccttgttcgccactgagactcctttaaagtcctttctactatgatagtgaaataatcaaagcctgtaaagtcttttcttcccttcaatatcagaatttgaggccttctgacaaaagaaataaaatgagaaaaccgaaggaacctgagaaatcctttagtcctaattttacagatgatgccagtaggctggcttgggacaaggtgtagcttgtggcagaaccaggactcaaacttaccctcctgattgcaaatcagtacatcttcccccaccactagcaaaatgactgtcaaacagattttggcttctgggtttggtttggtttgttccttcctctccagagaaggacataaccatagagatttagggtggaaacatctttcttgctctcatccaagttgttgatacccaagttgccacagtaggatggcagtgatatggtgtggctctgtgtccccacccatatttcttcatagcagtgtgagaacagactaatagtggcagcttccttttcagggtaattttcatgcagaaatgatttaggatttcgagggagttaagcttatgggaaggctattaccaaaaaggactctggataatgatacggttgtggggacttggggcaggactcaggttgctgaggaagataccggaaggagcagctttgttaaggagtcctacagaaggaatgctgtggaccccctagggcatgtgggattggaagaggatgatgagacaccaagaaacttcaatggcacatgacacagattgtgtggccactacatttgctactagtctggctatcaccacgtgcctgccagcttgttgggggtgagctattatacctagcagagtcatctcttattccaaacagggttttttacagggtgaatacacagtttttgaatcataagcgagacgactttgggtactagtaatactattttactgaaaatctggagttgcacaaatagttctttagaacataaaactaaatggatttatacataacagttacattcagcatttaagagaggcagtacaaaaatgtgttctgcttttatctgatataaattgcatgtaataccatgatttaaacaatatcagttatattaactaatgccatgagatatatcttactcagaacgtctgatgtttcccataatagacagaaaaaatgcagttgtatgagcaactgagtttcttttcatcttcaaattcatttgtgatggtgggaagatctaaggacaatccttccattgaagaagtaggaaaaacagttacagcactgttctgaactcatcaaaaatgaaattaggcacatgtgcttcagcaacctgaaaaattaaagaattaaattattcatggtgttatagttgaacaattacaaaattttcatacgtaaaagaaaagatatccttggagcaaggtgaataatagaagaggagactcccrtgggcggacgactccttgaaacagcccctttctgcttgtggtgccccctagactagcgtctcatttcttggcactgctaacatttgaggggatgcagtacagctctcccgcctccaaatctgagcttcttggctcttaaaggtaccttgatctgcgaggaatgttcttgcctctgggaagtactgacaagtactcaggtcacctaatacacttcattaactgatgaccaacaaggaagaacaggatggctggcaagtgatggggttggagaggtaggggagggcaggaatgagaatgagataccaaggccagaaggggaagagcaggaaggccttcagaggcatgcattcctgaactgttcttgggcaaagccctgagaagactaaattgggctcagttgggtagaatgtagaggtaggtgatctccaagtgctggagatgagtattttttagaagcagtgtttaattttttttctgatcataaaggtataacctgctaatgagaggaaatttagcaaatgcagaagagtataaaaattatttttacagtgggtggagggcaaggggagggagagcattagtataaatacctaatacatgtgaggcttaaaacctaggctgggcgtggtggctcacgcctgtaatcctggcactttgggaggctgaggtgggtggatcatgaggtcaggagttcaagaccagcctgactaacatggagaaatcccatctctactgaaaataaaaaaatcagcagggcgtggtggtacgcatctgtaatcacagctactcaggaggctgaggcaggagaatcacttgaaccagggaggcggaggctgtagtgagcccagatctcactactgcactccagcctggcgacagatggcacatgtataatacctatgtaacaaacctgcacattctgcacgtgtagcccagagcttaaaatttaaaaaaatatttttttaatcttaatcccttaaagaaaataaaaactggcaacttttgtaatgaatttttccagtttacttacatatgcagacagacacacacacacacacacacacacaatcaaaattaggatcacataatattgtgtccttctctacctctgctaaatcttatattatgaacatccttgggcacatatcttggtaaacctttgcacatatatccagcaggtaaaattcctagcagtggaattgctgggatcagggtaagtatattacaaatgtttttttaaaatagataaagctaaattgccctcctcaaaggctgtcaatttacattccaattaatagcacttacaagtcccatttctccaaatgcttccgaataatgggggcccaacattttacctttcaccaacctgataagtggaaacagtaattttcgtatttggatttttgtcccttgaatccgaaggtttgtcatttctattttcttgaaaactgcctcttaatttcctttgcccttcccctgctttttttctattggcttggacatctttttcatactgaacttgaagatttgaagagcacactataaatcaagaaactagtcctttgttggtatttcctcttttgtcttttgttttttaactgagacactgacacagaattaattacattcagcatttataaaaaatcaagtctctaaatctttttctttatagtttcttcttttggttttatacttaggaatttctgagagctgatacatatttgcctaaaatttcggctaatttatttgtttcatatttcacactaaccctttatctgtaattaattttgataacataggagatgtaaaggggactaagttgctatttttttaactgtgtgaacttacatctattgactaatattccctttctctcttaatttgagatgctacttttccttatgtaccattgtatgcacagggtgtgtttctaggctacatattcttgctcattgttccttctatttagttgcataccagtagcaccctattttggtttctacagttttacagtgttttaatacttgatataatattttaatatcttttttttaaaaaaggacttgcctaagtcctatgacattttaaaaaatatattctttgaagttaaaaaagtacctgaaatcttgattgtaactgcagtaaacctataaactagatagaactattatctctgtaatattcgaggaccctcattcagaaacatggactttcaaattttatatttaaaatttttatagttttttaataaagtgttctttcatatttcttatagaggttattcttagctatatcattgccttgttatttctgtgaataggtcctttttcacactgtattttttaatcgattgatgtatttcatacatttattctgtagccagcttgttttctgatctctgtattattttgatagtttttcacatgattctattgggtattcaaggaagacagttatgcagcaatcccactactgggtaactacccagaggaaaagaagtcattattcaaaaaagatacctgcacatgcatgtttacagcagtacaatttacaattgcaaaatcgtggaaccaacctaagtgtccatcaatcaatgagtggataaagaaattgtgatatatacatacgatggaatgctacgcagccataaaaaagaatgaattaacagcatttgcagtgacccggatgagactggagattattcttacaagtgaartaactcaggaatggaaaaccaaacatcgtatattcctactgatatgtgggagctaagctatgaggacgcaaaggcataagaattatacaatggactttggggacttggagggaagaatgggaggggagtgaggataaaatactacaaatatggtgcagtgtatactgctcaggtgatgggtgcatcaaaatctcacaaatcaccactaaagaacttactcatgtaaccaaataccacctgtatcccaataacttatggaaaaatagaataaaaaaggaagacaattaatctcaaataatacagagtttgtcttctttccaatatgcattttattttcatttcatttcttattgtcttgcacctgtataacaaaagtagttgcaagagtctgtatagttgtcatgacactgtgacagtcctggctttaatgggaatgccactaacatttcactattatgtactgacattgctagttaattttaaaagttcatctttggctcatgttgtaagaaagtatctttgattcctaacctactaatttctaaaaatcaaatgattttcagtatctgctgaaagttgtatttttcagtatcaagctctccactttgagctaaaatttaacaaagtggaattactaatgagaaagggataggaaagaatgtcttggcaggtaaaaagtagtctgccatttttggaaacagtgctcatatatacatttagttgtggcatgaacttaactgtgcttgctgtgggaaccaggtcagtggagagagaaagaacaaaccaccatgattatttctttcctctggccacttaaggaatcyctcctggcttgcctatttcacttaactcctgaaccagatgagttgctgacaggagtacatggtggagaggaagaagaggcgggaggggcattgtgttaaactctgcaaggcaattcccatggtggaaaaggcaaggacatttcagagctgggggtagagcagtggcgagaggcgcagaggcatctactgtgaacgacctattgggcttcactcctgatgaatccagggccactattattagcatctttttacaactattaatattgttctttactatctatcacttaccctcctgggtagctttgtgtaccgaacataatcctccaggaacagaagggcacccacaacatctgcaggaatttcaggtatcttctggctgtgatagagaacagtttagatcaattaactgctttgcacatcataagcccttttggtcagaatcctgaaagactaaattaccaacagattacctaatgaagtcaaagatgaacaaaaacattgagcatgctcttaattcctgtcaagttgttaccttgctcatgtattttcaggagcccaccccatagggtaaatgtgagcttctctatacggtttccatgggcgtttacaacacgatccctgctatctatccagactcatctycctctgtttacatgattcaatacctagcaggtcccatactttcccatccctgcacacttttttttttttttttttgcgacagacttttcactcttgtagccaggctggagtgcagtggtatgatctcggctcactgcaacctccgcctcccgggttcaagtgattctccagcctcagcctcccgactggctgggattacagatgcacgccagcatgcctggctaattttttgtatttttagtagagacggggtttcaccatgttggccaggctggtcttgaactcctgacctcaggtgatccacccgccctggcctcccaaagtgttgggattacaggcgtgagccaccgcacctggcctgcacactgatttgaaagtaaacttctagacattgttcgagtctcagcttgggtacttctcctgtggaatcctccctgattctcctgggctgtcataatagttagcagcattctccaagcctcttaatttttcaatggtgtgctgggttcccatcaggagtataaactcctcgagggcctaggtcatatgttcatctttgtttctccagcatctggaaatgtgcttggcatgtactgcatatttgasggtatcaaataaatacagcatctagcaatttttcatatgggattttactcatgtattcattcattcagcaactacagtgccaagcactgttccagagctgggaatacagcaaagtacatgccaggctccttatagagctaacgttccttcttgtttacatcaaaaggagtttttaggtgttaaaacgatttccaattcctrtaccaattgrcattttctrattaacaaataacttttagtactattaatacattactggttaatttcgctgatgaactttgctttttgaatgggttaagaatgactgtacctggaaaaattctccctgctctcaatctttcaatctgtgaccagggctatatttgctctgcttggagcaagagaaaggaaggaattcccatgcgtcacaggttccttagattcctttgctctgctgaatcagaaagcctgacttacagctggtctcctgtagcctgatcaccaccctcagggttgccaataacatgctggactagagccacacttaagcctttactgccattagtgaaaaagaaagagaggaagaagaacctgtccaagttgacagctagggagctacaattgggacagccagttgtgtggaggttacttgctaatcacctccgcaccacctgaactggagtccttcccctcctctctgggagcctgggccagaggcgctgggtttttatgagcctactgctttccttgccaactgacctcacttcgtgattgttacaatttcatttttgagactttgagttctcctctatttttcaattgttaaaaaatcttgtttctgaagcaagtcttaacatctatcccaggaaaacaccagtgtttgttgttcgattcattaactaagaggaggaggagctggcctgactgcagctcacgggaaataacgacattggggtttagaaagaatgcaaaatcagtaggagccactggtatgcactggatgtcaagaaacccatcactgcaaagccgagatcacgccactgcactccaacctgggsgacagagcgactctttctcataaaaaaaaaaaaaaaaaaaaaaaaaaggactcatcactgcaattgtagctgctgtactgtccacagagggcccagaatgaagacgtgtaatactcctctgtgccaaggggagggctgtgcttggaatctcaatacaagtttgggaagccacattttaagatggtcaaaaacagactggaacacccagaaaaagtcactcactatggtgagcagcctctaaactgcaagacatcgggaacaggtggaaggggcttatctaaacattgagaagacctaagacaacagatggcatacaaaatcggaagtgatgttgcaaaggagggagactgcattattctgtatgatttcaaaaggtaggaaaaagctcagcgagtgaaacatccagagacacaggttctaataatcacaatcaggaactttctaatgagaacaagacttagccagyggactgtgctgcctggagaggtagcacaagccccctcggtgagagtgttccagcagtggctgcatgactacctgtcaaggatgtcctagagctcattcatgcacttagtgggaggtcaattaaatgacctcgaaaatcatttccagttttaggacttagtagtattttgtgtggacttagaagatcactttggttcgttttattttttttgagatggagtctcgctctgtcacccaggctggagtgcagtggcatgatctcagctcactgcacctctgaggcctcctgggttcaagcaatcctcctgcctcagcctcctgagtagctgggattacaggtggccaccactacatgtggttaatttttgtgtttttttagtagagatggggtttcaccatgttggccaggctggtcctgaactcctgacctcaagtaatctacccaaagtgttgggattacaggcttgagccactgtgcccagccgctttgattcgttttttacattatagtggcaaaaatgaccaagcaaacatgacagcaaaggttatktagccaggctgaccctttaggatagcagagaaggaggcacaggacccagcatctcatggaaataacttttttttctttatcccagaaaagccacatttaggggcaggggaaaagaactggcaggaattaaagttttataagcattgtatcaaatagcaactcttgtgaaatttgcttctctacatgcagacactgcccaggctttgacacactgatatgttctctgactcccactgaagtgagtggaatcatctcttggcagtggcccagcaggagtgcaggggctcgctgagattgaagagctgcatccaagagtgcagaggaacagggctgcactttcttccccatggtagttactattcatggtcctgagtcactcctggaaaatcamtgtgagtagaccggatggagttcccctggcagggtgactaaggatggacacacctgtaattgctctaaacaaggaggtatgccctgacttgctttacagagaagggtgagcaaccatttcccatctctattagggcgataagaggaatttggtaatgtgaggtttaagttagrttttgtgacaagaagtcccacgtagtcctggttggtcttctgtaccttgtacactgctccaccgtggagcagataaactggccaatcagygccaggaactgctcggtgtaccgggaatggaactgcttcagcagagtgagcagtcccaggacaagyggtggccaatcaaccgggtcggtcggttttcggcagaccattcctgcaagggaacaagttgcaacaccatatgaagtacttgccttcagcaacattcattaaataccaacgctgtgaaggtcaaaatgtttggggcccatattctcgctggcagatgatattttggagggaatgacaattctgggccatattttgaattagccacaggattggtagggcattccaggggtctgaaggattcaaaaccaataaaacggttactaaattttgtaattatcattactggttcttttgaattactcaattaacatatattattgtagcaatttttaaagatacagataaatgtaaatgagaaaaaaaatcactacaactgacttctgttaacggcagcatgacatactagataccctgaactactatcttaagtgaaaagctggataaaatacttttagggtatctttaaacaaatgttgagtaatatatatacataaagaatctgcagaaatcaagagagtggaagaaggatatttatgaagtgaatgagtatcaaagctggcctttacactaacgattttttaaaaattggagatggggtcttgctatgttgcccaggctggagtgcagtggctattcgcaggtgcaatcacagcacattatagccttgaattccagggctcaagctgggactataggtgtgtaccactgcacctggctctacactaaagatttctgccaaaatgtggagaccctgacctctgcctgggtggctgcatgggaaaccagagacagagattagggtcttccagaagaaacacaatgttgaaaaagaacagtgttgggaaggtttaggttgcctgatttcaagctctctatacagtttcaataattaagacactatggcataagaacagacaaatagatcaatggaacagaatagagtctagagatagtcccacccttctatgagtaattgaatagtcacaaatataccaaataataaaaaaagataaatcttttaacaaatggtactgaaactggatagtcttatgggggaacgacaaaccttgacccctatctcatactgtacacaaaaaacaattagagatgaaccactggcctcaatgtaaaagcaaagactacagaactgtaagaaaaaatatcgaagatatctttgtgaccttgaagaaggcagagatttcttttttttttttttgagacggagctcactatgtcacctaggctggagggcagtggcacaatctcggctcactgcaacctctgcctcccaggttctagcgattctcctgcctcagcctcccaagtagctgggattacaggcgtgtgccaccacgtctggctaatttttgtgtttttagtagagacgggtttcactatgttgaccaggctggtctcaaactcctgacctcaggtgatcctctcgtctcagcctcccaaaatgctgggattacaggcatgggccactgtgcctggcctggcagagatttcttagacaagacaaaaaagaataattataaaggaaaaaaatggataaactggacaccatcaacagtaaaaacttctgctcattaaagttaccagtaaaaaaatacatagataagtcacaatattctcaaaacatatctaataaggaacttgtatccataatatatacataactactacaactctgtaataaaaaaaaaatttaaaaacgagcataagactagaacaggcacttcgcagagaaggatataaggaatggccaataagcacatgaaaaagtgctcaaaatcattaatcatcagggaggcaaattaaagctgcaacaagataccatagatacccatcaggatggctaaaatgggctgggttcagtggcttatgcctgtaatcttggcactttgggaggccaaggtgggtggaacacttgaggtcaggagttcgagaccagcctggccaacatggtgaaacctgtctctactaacaatacaaaaattacccgagcatggtgatgcatgcttgtagcctgtaattccagctactcaggtggccgaggcagaactgcttgaacccaggaggtggaggttgcagtgggccgagattacgctactgcacttcagcctgggtgacagagtgagactctgtttcagaaaaaawaaaagaatggctaaaatgaaaatgactgacgccaccaaataatggcgaggatgtggactacacatatactcactcttggtgagagtgtaactggcacaaccactttggacaaagggttggcagtttcttatcaagttaactggttagacagaccctcaggtcccatatttgacttcttgtgaagaccggaaaatcttccccaaaccagagaagcctaaacaagtgatcctgaataacctaacctaggccttggcaattcagaacatggaggaagaatcctaacaggactcagtwtggagaaataatcctttccaggtggaaagcaagagtgatgttaacaacaaacacttctacaactagcactacaccacgaagcttctttcttcaaacacagaccaagccaggtatgcatttcataggccaatgctgagaacggtgtttacaaggttaaataaatgtttttcggatatacagtttcaaggctctctttacagtttcaataatcaagacattattggcataagaaaagacaaacacatcaatggaacagaatagtctagagatagtctcacccttatatgagcaactgaatacccacaaagataccaaacaattgttccttcctcagtcctactgtaatttagttcctgcattaacacatcagtcttattgatgagaagaattatagtcagttataaacaccacatttctaggatacataaagattttgttgtgttatgttttaagatctgggaattccagggagagtgatactttccataagcagctttacaatcaaggtgccaggccctaatcatatacacaatgaaaaaaaaattagaatgagaagtcaacaaaaagttattctttaatgaaaagaaggttctttctgcactgacagttcattatcaagaatcatatattcctattgaataataacatagaacagagagagaacatgaatctctgaatcttcagatgaacctttacattacacttgggatggccctttaaattgattttgaccaatatatagaaagggactcagcacctgttgggcactcagtttgcggtgacttggccaaagtcacataggtgataaktggtgaarccagattccaaacacacattggttccctccctcctacagcaagtattgtttgaggagatcatgctctgccttctgtgacaatcacaggcattgtcatggaagcagtgtctagaatcaatgattacttttgaatgagagaataaaaacattaaagagattccacattttcaccctaaaaaagcttatgaaataggaaagtactgtaaggaagaaatatatttaggaatctctagttaagaaacaatgattacatttgtagaaatgctcttataatgcttttaaagtaaactaaagtctatagtggatttttaaaaatgtcatttagctggatacaaagtttgaaggcagaggaaacactttgttatctattatgtaactacaaaaatattctgacgaatgacaaaaataaattagggttataktcctggagagaacagacatattgaaaggctttggtgtctcttgtttgtacagaatattctgacatacaatcatacataaagtattaaatgttcatgtataaatattagtcttatctccttaactatattgttacttttcccatcatggttccagatacacagctggcacatgcatcctgttgaaagaacagaacatcaaccaaaaaaagtttctttcacaccacaattagctgcctaaacattaaagaagagaatcaaaacaaaggtccctcacattctacaagctggacaatgaacccttactgaggtagaccatactttgttgattttaaatccactgtctagggctgggcacaatggctcacgcctgtaatctcagccctttagkwgccgaggcaggtggatcgcttgagccyaggagtttgaaaccagtctsggcaacatggcaaaaccctgttgctacaaaaaatacaaaaaaattagctgggcatggcggtgtgcacctatagtcccagctactcaggaggctgaggtggaaggattcttgagcacgagaggtcaaggccatagtgagctgagattgtgccactgtactcccatctgagtgactgagtgagaccttgtctcaaaaaataaataaaataaaataaataaataagtgtacttaaaaaaaaaataaatccggccaggtgtggtggctcatacctgtaatcccagcacttagggaggccaaggtgggcggatcacctgaggtcaggagttcgagaccagcctggttaacatggtgaaaactctgtctctactaaaaatacaaaaatattagatgggcgtggtagtacgtgcctgtaatcccagctacctgggaggctgaggcaggagaatcgcttgaacctgcgaggcagagrctgcagtgagctgagaccacgccatcgcgctccagcctgggcaataagaacaaaactccatctcaaaaataaataaataaataaataaaaataagaataaacccactgtctacagttcataaaaaggcattgtatttcaaaggcataaagactcgaatttcataaacataaatttaactaagaaaagatctcayatccgacataggcattctatacaaaaagctatttagttaaatgttaatctgttggtaytgttactcattgcaaataataaatgttatacgtacccagatttttgttgtattgaagttttggcaactgagcgatcaaaaatagaaagtttacaattggaaaatagggtaagcgctttgttgttatgtatatctggaaagagaaaggtaagaaaaatagatggttaaatcacattgcacaataycacagaacaggtttccaaatgaaaatcttccattttacttcaatttgctctttggctttcctgaaatgtggatggttccattaatttgctgccttcagagttttatttaacacacctggccctggccacataaatacctgtatcataatttgcccttctgggaagaaaacaattttgcttagaaagacttttcccctgaatcctgttaatgtcattaataaagggagggaggaatgagtgatgagcaagaatgggaggggaaggcaaaatgaagagcagttgaggaagagctggaggtgaatatagggggagtgtgggagagagaagagagagagagggaaagagggaagaaggagaggaggagggagagtgaagggaaaagatccatgtagcagcgagtggtggtatctaagtagaaagagagcaaagttcttcttgtcatttgctgtcccctaggcaatgtcacagagcagtctcccagatgtcacggcagaaactacagtcagggcgtacatggccaggtccagactgccagctggccgattccataggagacagggtagcacacgggtcagaagcaggggctctggtcagactgcctggctcctccacttgctagctggcctctctgagcctcgggttcctcaactcataatggcgtatttcatagggcttgttgtgagatgaagtgagataatccacaatcagggttaagacagtgcacttgttatgcagtaaatattcaagacattagctactattcaggtttataatcttttatccaaaacacaagggataatacagctttcagaatttcaaattttacagatttagaaagataatataggggctggcgtaatgcactataatcaaagttactataatcaaagtctgcatcaaaatatatgaatgtttacagtaaggaggataaataactagtataaacagccttatgtcagctcaggacagattttgccatgcaaagagatctggcaccgagttatgaaaaaactttcagttcttagaggttttctgagctcacaactgcagggaagagtttgtagcttctatgatgagtgggattactgtcagccacaaggggaagcacctttggcaagacagatcaatgctaccattttgggtttgttgggccttgatgactgaacggcaaaccccagtgaaacccaaaactaatctcttacacggaggcagcaccttcccctttgtcatgagctttcaccagcgctatagyacttgattctcacagacctgagccaggcggggaaagtgtgatgattgcttagaaagggcagggaactgaatggaatgaaggctctggggtctgaacccaggttcctctggtatttctgcacagtaatctgttacctgggccaaataccattctgtacccccatccccgccattatatattttaattactcaccttattcagtgggttgtgaatgccagctgcctccagataggctgtgatttcatataaaagtgtgttatcttctttggggtaaggaagtgaagggtcctgatagtgggcttcaatgtctgctaggagagccctaaaggaagaaaaaccctggagataaacattagtgagtaaatgaatttatacaagagttaatatagggcagtgatgtaatcttttcaagcctcagtttcctcatctgtaaaatgagagcttgatctcgctaattctcaaccatgcctgtgattggttttaagtggaaaatttgacctagaattacttcatcttttggaatcaacctcaatcaaatgcattcaccattcaaattttcatgtattgactgaactgttcttaatacctgctttgtcaaaagcactgacttggtgagtgagaagcacagattatttatctgtaagtaggcagcctcaaatgacagcaggttgctggtgaggcggaggatatgagttccctctaggacaggcctccataaccactcttggtaatcaacacacttccaactgccctctggatgatgagtgatcagccctgtaaaaagccagttgcggattttggtaataattgctttctaaaatctgtgcaagtatctagcagtgtctggtgtgtctctcactcgctctctctaatgaattcatttgttcagcagacatgtattgaatcmtgtgatcagtacctgtctgctgaatacacgaatccattagagagagtgagtgagagacagagataaacggagggacaatactgaggaaagaggctccgaagacagatttgattatccgtggcaaggaagcctgtaaattcagaccttccacccaaaaataacttaaaagagtaagaactgaagaaactggggtgygtagataataaacaatccaagcccacggatggctgtttcaaaccctggcacttacttattgagattctccagagcagctgccagatgtttagaatcaaaccgacaagaataatttaattcattggcaatctgttgtctcagaatctgcatctgcccaacctgtgcacaagcaagagaaagaacaggtagtgcattcaagcatttcagagtgacagtgaggaggtaaacacaaagatgacaattcttcactgggccttcacatcactctacaggaaaaaaaataaggatttcctgaactgatctcttggctaagaccagcactggatctaatgaagcaccagaggcccttcaaggaatgtctggatggaytcccataccccaacctaaaaataccccaaagtctatgattcacaaagtgatctattaatgttcagttgttcatgtatcaaagatgtcttttttgaagctatatttttaaccttttggaataagtgctccaaatttagyagctgctgtgagaagtcttacttacttccttttatttatcctaaatggaactttctcaagctctaggaatgccatttcacactagtattctcaaattgggtgaatattaagtctgtccatgccactcaggattataggttctataattatctggattacaaaataatctacataaaatctttcacgaaaattttaacaatgatagccccttaatccagggttcttaattttttttgtgtgtctgatatggtttggctgtgcccccacccaaatttcatcttgaattgtagttcccataatccccatgtgtcrtgggagggacccagtgggaggtaattgaattatgggggtggttacctccatactgttctcgtaatagtggatgagttctcacgagatctgatggttttataagaggcttttctccttttgattatatttctctttcctgttgccaygtgaagaaggacatgtttgcttccacttccaccatggttgtaagtttcctgaggcctccacagccatgctgaactgtgagtcaatcgaacctctttcctttataaattacccagtcttgagtatgtctttattatgtgagaattgactaatatagccttggacccctttgggaatctggtgaagcctatggacaccatttcagaataacgtttttgaatgtacaaaataaaacatagagggtaacagtggaagccagttgtaatgaaatataattaaccattcaaagaacaaatctgtgatatagagttatgctaggatggtgtattaactacagtactttaaaagtagctatgagcataaatgatacttggagattatctgcaatggttggatgataggaagcgatctttgggtcaggcttgagagttcagtttgccctcataatgttgtctgcatcataaggtcaacagcacactctaactttttctgcctataaatgtcttcttttctactcggacaaagtattmctaaaagactggcaaaggggagtgagggaggtggggagaggagggaagacagtattataatgcaagcagcaataaggtggaaataaatgcatttcctctgagttgctgggggcagagaagagttaaggaaaagacaggggctcacgcctgcaatcccagcactttgggaggccgaggcaggctgatcgcttgaggctaggagttcgagaccaagcctggccaaaatggtaaaactctgtttctactaaaaataaaaaaattagctgggtatggtggtggacacctgtaatcccagatacttggaaggctgaggtatgagaaacacttgaacccaggaggtagaggttgcagtgagccaagattgtgccactgcactccagcccrggcgacagagtgagactgtctcaaaaaaaaaagaaaaggagggtggccttctctaagaatgagcaaaagttacttagctaaatggagcttgtaatggtcaaaagtattaaatgacctcagatgtattatttttgaccactattcatacaagactattactctatttatgtgaaaaacgtcaatccaaaaatgctatttataaataggaagtgtttgaatttatagagtagcattatttaaaaattagaatgcagcaaatccaagaaaatagtaggttctttcaggccacataaaaatgtccctgaaaccctgtatctggcccatataattctttgcttaattttctatgtgtagtatactctgtgtcaaggatcctcttgaaaatatcaatctagaactggaaatagaaataaagtcagtttaatataacttgctctcgtttactgcacaatgaatctttgttagtgacattttctatttttggtactcacgcacttcaagctttaataagctgctgaagaggctaaggagcctgggatggatgagaaacttattctacctactcatttgcctctttggagatatctggcttatcactctttctccaagatttttctagagttgcactattgagtacagcagctcctagcgatgtgtggctatttatatttaaattaatatgaaataaaattaaaaattgcatttcactgtcccacaacccacatttcatgagctcaatagctacacagggctaggagctgctgtcatcatcgaatagcacagaacatttccattgttgttccagattattaacactggctccgtgactgtacgcaccctaattcaagacaaaaagacaaatttgtcctttggggctttatttaaagatcactgactcggtcacagtcacgtggctgttactgaattactggcaactataaccaatagttggaatagctactggactgagaaccctccagtaagcaaggggaaaaccttccagtttcttggaagaatccctgtaatccccctaacgcctcctacagagttgggactcacacctgtccaaactcgggtgattctttattcctcctaaagggttttccagcaattagaaacttggcctgggaagcgcttaatatctgacaatcatgaggctaggggaaggcagacccacatcacgagaggatatctagcagagccatgggctccttgccttacctgttctgtttaatgatccaaacaacaacaacaacaacaaccactcaccaaaattatgggaaatatattgtgaatttggctaagataccaatgagtgctgtctcaatgagaaacttatataattgggaatcagagaatggaacttttcaaaattcccttagcattctagaattctagacttttctacagtatgtgatatttttgaccacaaaccagttttctaccaggaagtctactcttccctgctagattgtgagttagctaaggagaccggtcatgtttcatttaactctgtctttcacagcaactgacaatgccctgggtataatgggtgtgcaagaatgggctgtgatgatctcagattatcagatgatgaaagaagactcgcagaagatgcaggggtccctgggagctcctactgccgagtaaaggcaggaaactaggcagctggattctaaaataagttagacttccatccagcaaattaatctcttcgtctttcttattcatttccaaagtaagactgctttctgcagagtataaggataatttatgccccaaagaacctggcttcctaacatctatgcagacacaagagggcagagagacaatgttctgttctaacagcagcttggagcagatgaggtgtgtataaatgaactttgttatgtaaaaagggagtattactgtgcaaggaaaagttcaattttcatatataaaagcacctctagccaaaaggcattttacaaagagccagttttcttgaacaaaaggaaaacgytaggctcctaaaaagcctaatcaagaacagatccagaaacggagataaacaaaatgaattttaaaatgataaactgaagtattaaaatatttttgatttaatgacaaaagaaagaagagtagctttttttgggcaacaaagttacaagaaaataaaaaatttaaaaatgtaagtattgactgtacaccctctcttctacaacataccttcattatagcctcgagatacgcagtccaaatcttctgtgttttggcaatggcggaaaaataaattttatttgaatttgctgaaaagttaaaacataattttctctttagtacattcgtaaaggctacagtgtcatccccgcctcaggctagtttcaggacactcaccgacaatactttttaggggactgacagcattcatgagggtttttaaagtgtcctgaacagttctgtctctcaggataattttctgaaacatactgaggaaattctaaaaacaagaaggcacggtcaaagaaccaaacataatgaattaaacaagcaaattctccagttacctaaaatgctatgcagaacagaggctgggcctaagtcacacaaaacctctaaacaggatgacagcaaaaagaagcaacttcaggttcctgttagaaacatcccttgctaggaaaagtcactggcttcaaggattaaaaagtcttatcttcccaagttgaaacttacaaaaacagtctaatcctaaaagtactatgctggccaaacaaattctagtttattcccagctctgatctacccagtaggtatcatatgcctaaagtcagtgtaagaaatcatggaagaaaggttaagtgagttcaaactgcccactaaaatatgttcttgcctctcccccagggtggcagaaaacaggcatgaaagtcaaaaggctcacctgtaactcttttacaatcataaagcacagaagcctgtctaagccatttagaccaaaggttcccaaggtggtctggatttctgagaagaggcggctgctggtcacttcctgatgagttttcatatcataccaagtgttcagctggtctatgtgacatgtcattctaaaatgaaaacaatgcaaaaaccccagaatggctcagaattcatccttaaagagatgttaggactcaacaggacatgcggcaccaaatatgaagaacaggagttacatgatctgtgttttctaacctctgtattcaggcacccaatgcgtcttcccagtgacacccaatggaacaggaaggtaaaattcagtctgacccccttttcctgccctatgccatatcattggtttcagtcatttatttccattgagttagggtgttgacttggaatcatgctgagaagacaaggttaggttcagctgtcaggctggaagactttagagcccatttgtctctctatgcagccttcctttaaatttccagtttggagacaaaacaaggccttgtgtcatttccatttgataaaaaaggaacctagaatctccatatgctacctaacatttgagactatgacgacaaagcaatttgctttttcctcccagttccttaaacttgtagatgccatcttctggtcctctccaaatgattctttttagactcagaagtgtgatgatgacagtgacaacaaccaaccatatttactgggcacttattgtgcaccaggtgctgtgtgtgctaagacctttccatgtgctatttcatcctcataatagctctgtggaatacaaaccatttcatcctcattttatagataattgaggctctcataggtctgaccaccacccttaaccaccatttcaatggttttcaaacactgagagagggaccctgagtccctggtagagcttgtctgaaatacagatgcccagcttccattcctgacgaatctgatttaatagttctgggggagagctctggcctttgcattttcagcaagctccacagatgacatatcctattgtccaaagccaccacatacctttaccagaaggaggcgtgagaaggggttgaaagagcctagaagcaagggaggttttaaatcaggaagtaaatagggagaacaaaacaagaggattcccaaactgcttacaacttccatctgcttgcttcaaagactccttctgccaccaagtacactctgatgtgtcactggggaggcccccaattctgatgataaaattcatatatgatgtggaaattctggtcacacttaatcctctctgcctgcactaatagggcactgggtggatagttttctaaaaaggcttcggtgattgaaggctaccaagaaagaaggagctatacaactttttgaatcacttactttttttgtcccatgagtcaaaattccttatttctgctagaaattttggaataaggttatgcatagtttctcaactttcacaagtttcgaaggacaaaatactggattagaaagaagacagcacaaaggatccaggtcctaagaagatttaactcacacaagatcaactacacgtgcctgggtggtcagagaacaaagatcatcgcttttttcctgggtaattccaccaacccttctgctcagtgagcctgtgcccaggggtggacatgagaacctgctcttccccaagctgatcttagtaccaacagcttctcctgaggctcaaatgaagaaaaaggaggaaaactggctcagctggacttactagaggcagcatgctagtctctgccgtggtgctcacctaaaatattctcaggagcagttttaattaaatgagattttcacccagttactgctgaacgtagagcccacataacccgtatgtagactgtgattggctgtatacaaagctatgcagtctgcctttcacagtacaatgcctaggagctgggctctggagtcagagggcctggagtgtattctgggtccgtcatttattaactgtgtgatgctgggcaaatgactaagcttttctgtgcttcagttacttcatctttaaaatgggaataagaataatgcctataagattgctgtaaatgggttaatgactggatgtgtataatgtgctgagaagagtgcatagataagtgttcaataaatattagttgttgctatcaaaagtgcttgtgtgttgagctaagaatcgttttgtggagacaggggggcgggggagagattagattcttctaaggagcgcacaacctagatccctcacatgcaaagttcacgctcctatgagaatctaatgctcctatgagaatctagtactttgggagaatctagcacgctcctatgagaatctagcactttgggaggccactgatctgacaggaagtggagctcaggtggtaatgcttgcttgcccatcgctcacctcttgctgtgcggtcaggttcctcacgagtgacagaccggtatcagtctgcagcgcaggggttagggacccttgccctaaagggtcagaatatgagttgacaagtgcaggacccccgtgactggaataggggctgtgccacagggccacagatgcagatgagactgcctgcagtattcagggctctgtagaattcaggtacacctactttgggtctgtgatccgcaggatttctctgcagagtcgaccaataaacgttacagactcatccacaggggtaaacttgggtattggaatatgagtggactggtacatgctttgccaatcttgaatctagaaaacaaaaccatcaatatttagtaaacctttgataagataacctagttatcccttttccatataattttacaaagataatattgcataaagagtgacaataaaggttgttttttttttttagatggagtctcgctctgtcccccaggctggagtgcagtggcatgrtcttggctcactgcaacctccaccacccgggtgcaagcgattcttttgcctcagcctcctgagtagctgggattacaggcacccgccaccatgcccggctaatttttgtatttttagtagagatggggtttcaccatgttggctaggctgatctcgaactcctgatctcaagtgatcctcccaccttggcctcccaaagtgctgggattataggcgtgtgccaggtctggctaatttttgtgtttttagtagagacaggctggtctcaaacacttgacctcaggtgatccacctgcctcggcctttcaaagcactgggattacaggtgtgagtcactgtgcctggcttggttttttattttagagacaggatcttgctctgttgcccaggctggagtgccgtggtgtgatcacagcttgttgcagcctcaacctcctgggctcaagcaatcctcccacctgagcctccaagtagctgggactacaggcatgagctactgtacctggcctgtttcttggttttgaagaggaaacttctaaaactgcattaataatagtctcccagaaataccacatataacatttataaaaaacaaagaaacattgtgaaaaggtgaggtgacaaacgagaagcgagaactaagatgagacatgggaacttcggctttctgtcttatgagttgacatgcatccatgtaatataaaaatccaaaatatcataaggctggaatagacttaaacttttgaaaatgtcacccaaatcatgtcagttcccacatgaaaacttgcagagtggctccttgttaactacttactaaaatcaaacttctcaattttggcacttatgcatttggtattctttttttacccaattaaagaaataggcaaaggacttttatgcacatttttccaaagaagacatacaaatggccaataagctgttcaacatcattggcattagagaaatgcaaatcaaaaccatgatgagataccttcatgtgcactagggtgactataattttaaaaaattgaaaataacaagcattggttaggacgtggagaaactggaaccctcgtacactgctgttgggcacataaaatggtgccgttaccgtggaacacagtttggcagttcctcaagaagttaagcatagaactacccattataggtcctagtaattccactcctcagtatgtaccctgctgaacacaaacaaaggagtcctaaaagtcttttgaactgttaatcacttgggttataacaattacaacaaacagcttcattctgtagccatttaatgatgtctgccttcttaggacagtgagctcccggaagttacatgccatgtccacttttctgcaaccctcctggctcctgaaagtactctgaaggtactgagactatctagtaaactttcttgttgacatttctgaggtttgggatgtgtactctaaacatgagaaataacaaatatagtcaagaattttaaaatttattagataccttcgttcttagaaagttattacactcttgctccacgttgtaatttatgatacgagatacttcttcctgccaaatcttcagaccataaatgttgacatagtcctgtatgtattcaaaagaacgatggaatccatccatggtcgctcccaactctttcagcttgggcatcaattcacttggctgtggaaaaggggaaacataaagctcttacactggagtagattgtcaactattcgttctaatatctaactagactttaaatagtatagcaggccagatgcggtggctcccacctgtaaccccagcactttgggaggcttaggcaggaagatcacttgaggtcaggagttcaagaccagcctggccaacgttgcgaaaccctgactctactaaaaaaatataaaaagtagccaggtgtggtgtgtacctgtaatcccagctacttgggaggctgaggcagggaaytgcttgaacctgggaggcggaggctgcagtgagctgagattgtgccactgcactccagcctgggagacagagcaagacttaatcttaaaaaaataaaaaataagccaggctcatgcctgtaatctcggcactctgggaggctgagatgggtggatcacttgaggtcaggagttcaagaccagcctggccaacgtgatgaaaccccatcaaaaatacaaaaattagccggatatgatggcaggcacctataatcccagctacttaggaggctgaggcacaagaatcgcttgaacccaggaggcagaggttgcagtgaatcgagattgtgccactgcactccagcctgggagacagagcaagactttgtctcaatcaatcaatcagtcaatagtacagcagctaagagaccacagtcatagtttaagatatactttaagttttggaatactcatttcctacttcatctaggatgactgacaactgatgtcagacattcagcaaataaatgatttcactcatttgggaaggaagcctcatataaagaaataaaaaaaaagaatgactgtgatttctctgtcatttaataaatctatctagtctcagaatacttaaaacattttaaattgaatttactatgataataaagatcctaaatagagatttcaggcctattatttttctcctgagaaaaatgaccatattccctagcagataaagcaaaataaaaaattataacctttatagttcctatctactttagggttaccaaattcttttaactataagaagtacttctgaatcataaaatcagtttaattctgaaatgggatcaataggtggaggaaagaagcactggttttaaaaatatgaagttttaaatataaaatctaaatttcatatttatactataaatttataatatgaatggattataagatcaaaaagcacatcagttgtttgtgttgaaaatcacatatttgatatacgttagctaggaggtaaggtcttgttcgcgataggttaaaaatggcattctagtccatgctgcaagctgggcggagaagaggacaggcccactctggtcactgggtaccttggctcgagggttgaatatcagtcccctatgcagggcaaaggcaacgcgcttcacaagctctttccttattccatcttccagcaactgctttggatccacctaagtgccaatcaaaagtattaaatgatagttacgaaaaattcagtcctaacgaaatccagaggaaagatggctttcagaatctgcagtggggcattttcctacctcctcactaaatgatttgaattttttcctttcctgtccctgtgatcttgcacagcttggatggaattattaaacctgtcacctttttaggactctgtttatttcagcaaagttcatgatggtaattttacaacaagacatttcaaagacggtgaataaggaaagttttaaatggcctcacattctaattaatggcccctctttttggagttttaaatggcctcacattctcattaatggcccctctttttggaggggcaggatgaaggacctatgactgaatttacagatgcatgttcttcctttagattttatttctaggcaccttatatccacatgagcaaactcagatttgaggtcgggccactctgtaaattgaataattatcttttctttcagcattcttggaattagggagataaaataagaaagcaaatctgctatctaactctacaagcttactttgctaattatttctcctataatgaaaaggttttgttattcctttaaaaagtctcttatcagatccataaaacatcaaatgatttttacatactcccttgaattctctgagacttgtttcttttacttttaatttgtaaagaaccattattttaaaaggtcataaaggcaattaatgggttccatccagttttgattgtatttaaatttcaaataagacaactgcaagggggttacaaaaacacaaaagccagagaaacacattaaactacgtcaagatcgttcaatcagggaaatccagactgtggagcaactgaaggtgaaaggccctatgttcttcaacagatgaattaaagggaaagaaaggaaggagggcygggcgtggtgactcacgcctgtaatcccagctctttggaaagctgaggcaggcggatcacccaaggtcaggagttccagaccaacctgaccaacatggagaaaccccgtctctactaaaaatacaaaattagtcgggcgtggtggcacatgcctrttgtcccagttactcaggaggctgaggcaggagaactgcttgaactcgggaggaggaggttgcggtgagcctgcaccattgtactccagcctgggcaacaagagtgaaactctgtctcaaaaaaaragacttmaaagacataacatagtttttcraatgggcaartctaagctatagtctggaaattaatgacatatagtttcactggataataaaactatacacaggaggcctgagatgaggtcagggtgcatgagggggctttcaggagtggggctcactaaatcctatttcttaagtggtagtcagaatgacttgtgtttaccttgtaataacctaataggctacatcattctttctttagttttcagcatctgtgctttattatacaataaaaaggtaaattataaagatatagtcaatgagtacagaatcaaagaagtatcatgaagctttcaaagaaatattccttacaagaacagatttactaaaagagttcaatgctttcgtgaatctaaagatcgcatgcggctcttctaatccttcccgcattctcactaatctgtggaagtgttcacagctaagagaaagccatcttcacacaccccttcctcacatttctattcccttcccctgaagttaacaacagtaactgttttcatatggatcatccagacctttctccattcgtttatatacataaatatccatccttacacatatatttaatttcaaaaatctaaatgggatcatatacatgtatatgtacagagacacgcaagtatatcacacacatatattatacatatatacacatagttgcatgcatgtatatcacacacactmcacacacacacacacacacacacacacacacacacacacacacatacatacatgtttttctgcaatttgcttttttcattttccaccttggagattttccagtactaaattctttttgaatcgctctagaccaatccacagtacgaatgcaccatggaatatttaaccattcccctactgatgatggatgtttagattacagatgctccttgacttaagatggggttacattccaataaaatcgtcgtaagttgaaaatatcagaagtcaaaaatacactgaatatacctaatctaccaaacatcatagtttagcttaccctacttcaaatgtgctcagaacacttacattagcctacagttgggcaatatcatccaacacaaagcctattttataataaagtattgaatatctcatgtaatttattgaatactatactgaaagtgaaaaacagtatgggtatcatatgaagttgaatcattttaagtttgagacgacctgtatttctttttttttttttttgctgcctctaacaatgaatgcttatatctctgtgtatatctcacttgttttaagtcaatatcaaccaaactgaacctacactttttataagtgtttgaaacacaacctcaacactctgaggttaaagatcagcgagggccacaggattacttttaaaagcccttagttgttattggtagactagcagagagagtctactgggttgaatgtagttggtcagcagagtattccttctgctgttataatctgaaacactgtgggaaaagatcagtattttaccaagcagtcttggtaaaattcttttgataattattgttaattacctgtaagaggttttattacatccttcttacagtggtcactttgcagtcctaggatttatcatcctgtgtgtaagaagtgactaaaatgcatgtacattctctacacatcaattgaattcacctgggatcaggcctaaagcatgtttagcaaattctattaatattctaggaaataccatggtatttcctttagcatacttccagaaaacacataccaaagttccatttaggtacatttcctctattttctttgattttaataatgcaaatattaatatggcaattaggaatgttgagattctactgatgtcagatatatagaaaaataaagaaaagcaccataaactatatgaatgggcccatcgctactcaccataacattccaaattaaaaaagcaatgagatactttatacctcttgggagaacaaaattagaaagtggataatatcaagtattggtgaagatataagccgttaagtcccaatggccttctgatatttccaacttgtgatgagtttattgggatgtaacaccactgtaagtcaaggaacatttgtatctcaacatccatcagtggtggaatagtaaatacaccacggtgcattcgtactatggattggtctgcggccacttgaaaagaatgtagatttcagaggaactcttgcacaggtctggagtggggatatgctcagagacgttcatcatgacattggttgtgataatggggggcacaggtgtctgtcccaagctggatggttaagaaaaatgtggaattctatgcagcagtaaaaagtaacctactatctgacctatagcaatataaataaattgcaaaagcaataaccagtaagagaagctggaaaaagaatgagacttagagcacaatatggttgagataaatcaaaagcacatgcacacatcaaataatgccatatgctaaaaataagaatacttgcatatgtaggaacaattaccaaatccacaaagttggtgctatgggtaatggaaatggaagcagggatccaggagaagaaaaaamtaaacaaacaaaagatgacaggagcttgcatgccccagtgatgatagtggtctgttaaaagacggatatgggccgggcgtggtggctcatgcctgtaatcccagcactttgggaggccgaggcgggcgggtcacgaggtcaggagatcaagaccacggtgaaaccctgtctctaaaaaatacaagaaattagccgggcatggtggtgggcgcctgtagtcccagctactcgggaggctgaggcaggagaatggtgtgaacccgggaggtggagcctgcagggagccgagattgcaccactgcactctagcctggatgacagaacaagacccttgtctcaaaaaaaaaaaagggatatgattatcttagctctctgtacctggggtgtgaaataaaagtactaaaaatgaaggaaggaaaacagagagagagaagaataaagcaattttgactaaggaaattgaatttttttttttttgcttttcccaaaattcaatcaaatatatttttcttggatttaaacaactctttgataaaacagtactagcaccacacattttctgcagaactacaagataaagaaattcccactaccttcaagtactaagagaaataaagattacaatgctttctcttcctccatcaataagtgagtaaaacgggctgggcaccgtggctcatgcctataatcccagcactttgaaaggccacgacagatggatcacttgaggtcaggagtttgagaccagcctggccaacatggtgaaactcgtctctattaaaaatacaaaaattagctgggtgtggtgttgtatgcctgtagtaccaactacttggggggctgaggcatgagaatcacttgaacccgggaggtggaggttgcagtgagccaagattgcaccactgcactccagcctgggcaacagagagagagagactctgtctcaaaaaactcaactaaaataaaataaatgagtaaaatgaagaccgaaattggaatgtcaaacagccagatgatgtcactcccttttgcacacatgataattaccacaaaaacccaaacagctaagagtcatggtgcgaggccacgcagactaacaaaactgttaccttgatgatgccaaccaaagtcgttttcatcattaagatgccttcagtaaaaatggaaatagcatgagtaagcttggcaacctataacaaagaaaaagaggtatgaaaaatcactgtctaatagtcctggaatgaacaaagataacaggaaawgaacttgtagctttaggacacctgtrtccacatattctggacagaaatgaggctctgtggtacaactgaaagcccactgttagacatattgggtaacagagtcagaagacaacagttyattctttcatgtttgacaaagcatttctcctttaggcttcattttctcatgtctaaaatttggggcagaattcaatgatctagaygggcccttytggctagaaaagactatragactgagaaggtaacctccccttccctggyctccccattatttgcaagcaatagcagcagacattgataaggtaggcaggtgctagctataytgttgaatcagaataaacatggaaatatcaagcttgataatctaagtccctgacatatttcttggacttgtatcagaatgggaaattgacactgtacatcatattttcaatcttcacttgattttacttttgatgtctttaaattctaagctcagggagaaaaaaaccagaggtgcttgggkagaagaacctctgaggctgctgaactattattgagtgagcttaaaatctgcccaaaagaaatggttaatggaatatagattattttgagctgctcaaaaaggaacatgaatatgaaaagtcaggtcatctagctcaaagagaacaagggctgctttagcaagactgttataggaaaaagtgaccagctaagcctcatttcccctgagaatactgaggcgaacaaggccttaagtgacaccaggaaaatgtcaagaataaaaggtgtgattgtactaaaatcataaaacgcgtttaccattgcaaatgtgagacaacaagtcagaattggtctggtggtccccagaatatggcaggtgacacaggcctgtgatatttcatgackgttagtttttaayatgaaaaggcagaagtcagagggacacagcacctcgtatcgtgggcctagctgagcatagtccctcagcttgtctttgtccaggcgggtaggcacttcaataatgtcgtgggtctgaagctttatgatctttagaagagatgtaaacatgctttctgggatgatctgcaaaaccttcagtgaaaaggaaagcaggaaacgcaatgaacatctgttttacttttcttggctgacaaatattaggatgcctaatttgyctatatrgggggatgctgaaaaatgtaaaagagctgttttaataactgctggcaggcacagggctccattcctttaaacattaattgcttacagaatataaagctaatccttctaaaaatgctgcaaaagactgtatcattcccattttacagattttaaaaagatcaaggttcaaaaatgttaagtaacatcactatagaggactggctagaatgcgacaccagtaaattttgaattcaggctggtctggctccatgctccatcagaatttattaaaacgagaatcaaaattcccatgaaaacctgaactgggctctgaccgggagatgctggatctagatcaggctcttttaccagatatggctctgtgattttgaagaaactattataatctctgtttctacatctataaaatagatgtgaataccaccaacacttaaaacacagaaataaaagttcctggcaagtaaaaacatctgtacatccacagtagcaataagggtaagtttatttttaggtgttgcaaatttctggaatcaaatttttaaaagggaaagagacacggatatacttttggggggcctaagcatactttttgtatttaaaacagcagttatctggcaagagtaaatatcaccctgatgcatttcttacttttctcacataggataccaactctccagaatagtactgtgacacgctgagcaggtcggggctatttgcctgattaatacgaagaaggggcagatcgagggcagaggcaagctggaagaaaaataaggtatatctgtttcttgtttcaaaaagagtcctagaaatctttctttccagaaaatgtaacatacaacaaaacatttgggttttacccaacagagggcattaatagtttctgacaatacagtttttgaaaaacccaagttaactgtgatggcagyggttcttaaactgtgctccctggaccagtagcttccrcatgacctgggaacttattagacatgcaaattactgggctccactccacactgacttagtcagacaccctgggggtgcggcccagcaatctgtgttacaaccagccccgcaggtgattctgatgcatgctcaagtttgagagccactgtgccacagaaaagagctactcctgtgtggaaatcaagacgttctgattgacgttctgatagaatctgattgacagattctaccgaatctgtccaatctaatatgccgtcaagtgtaagaagtgccattattttatgtgccattcagaaaaaaattaaatgctgacaactaaactatgatatgccatcaatgataaaacccatccccagttacagaaatgttaaaatatgaaaagaattgtagtagctaggcrcagtggtgcatgcctataattaaagctacttgggaggctaaggcaggaggatckcttgagcctgggagtttgagacacagcctgggcaacacagtaaaaccccatccccctcactcccacgtcccaaaaaaaggtgcatctcagaattgatgtacatggtacatggtagctctgtcaggagacattgagtagrctgggcgtgggggctcacacctgtaatcccagcactttgggaggccaaggcaggaggaacatttgaggttaggaattcaagaccagcctggtcaacatggtgaaaccccatctctactaaaaatagtaaaaattagctgggcatggtggtgaacacctgtaatttcaactacttgggaggctgaggcaagagaatcgcttgaacccgggaggaggagctgcactccagcctgggaaacaaagcgagattccatctcaaaaaaaaaaagaagaagaagaagacactgagtagaytctttgttcatttaccacgaactgaaattaccatgagagcraggactgtgcctgttgttcaccaatattcyctgttactgtagatattagtactagtttgtagcagaggctcagtrattttttgaatgaataagtaaaaggacttaattcatgcctagggaataaaggacacaaaggactcacatttttagtacacagataaaacttaaaaaaaaatctattcttcacctaaaaatagtattcctgaagacattccaacttacattaattaaaactttaaatatttctggaatctttgaaattatgctctcgtggaaaaactgctaacaatttcagtctataaaaatattgaaattatttaccttcctaaaaggataaratcctgggctgaattaatgaatgaggtatgaatgaaggccaactctttcctagcaacagagaatctcactgytttttgcttacctttaggaaggtagctctgagtttagtaaccatggatggatttacccttatgctttcttgcatgatggatgtgaaactgtaaaaagaaaagaaacggtaagaagatgttcctagggcctttcatctacagcaaatgtcaggctgcctacattacctgtcaatcaactgccaagcgaaagaaaggtccccaacgatctgcattgtgatcagaacctcctctttaatgttaatggttctgatcatttgatgaagaaactttcgagtatcggcaagaaactgacatacttgcagattggattccaactggtggaattcttgaacctgtgttacagaaatatacttaatttaaaaatcctgaatggactctatggtgctcatytrttcttgaaaacacttcaaataaagcacactacttctgacaatttcttgawaaagtttttatttcarattataaatttcagaaacgtgagccaagctattaaaaaatgcacaagtttctaggattagaaaatgttccgctgcttattgtgtatatcacaaccatgtgttggaatttgtgtattattaagttcttttgatgcacttttaaaaacaaracaatgattctacaatgtcttgaaattttaatgtatataactgaagatgcctgggttatatgacaaaataaataaggcaaatgataaaaagcatttgagatttacaaagttgtttacgatcatattatagactaaaaaaatccaaacaagcaaagtagaaataatacaagtgtgcaattgttctggaataagaaactttggtagaattattttactgtgttgctgtttatagcgaccatcctaaaaaccttgcagaaataagaaaaagcctgtaagaaaatattccaagtgaaaacagtattaattatatctctaaaaatatataatcataccaattggatagggttatagattatgagtaaaaatgatgttttaaataatagagttggccgggcacggtggctcatgcctgtaatcccagcactctgagagcccgaggcaggtggatcacctgaggtcaggagtttgagaccaacctggctaacatggtgaaaccccgtctctactaaaaatacaaaattagctgggcatggtggcaggcgcctgtagtcccagctacccaggaggctgaggcaggacaatcgctggaacccaggaggcggaggttgcagtgagccaagattgtgcccctgcactccagcctgggtgacagaactggattccgtctcaaaaaaaaaaaaaagagtttatgattatttttctgctgcttttagttatcattttaaatctagttaaatacacaattaaaatttaagagtggtgaggtataatttttttggtacaatcatttttgagttgaaagaaaaacaataaactatttttttcagaaaagaaaatatatcacttataagcatatgaccattatataattattttcatttttgtgtattcctttctggttttttcccccaaggcacacacttttttacaaccctaaaaatggtatacacatgcaattttgtttttgcttttacctccttatcacaatttgcccaatgtttctatattatttttataattatgtttctaagattacatgtttcctcaagttacaatatcgtaatttttgctaccattctcttcatactagttatttatttccccaaatttaggacagtatacgttacaggaaacatattaattcacatcgcttttacttctgatgaaatagtctctcagctatatttacaggaacagactgctgggtgggtcataaggtgtgattcatgatccaagaacctgcatttaaaaagcgtttccttacctcttccaaagcttgtatcagttgtacagtttttctgcccgcagcagtagaatcatcataatttaaagacaatatttgttttgagatctctctgaaccaagcttgaaggttttctagtaatacagaaataagaaaatactgaaatcctygaattcctgtagctgtggctttgaatttaactaaataatcttttataaattcagttcttcagagctttaaccrtgggcctaacactaggaattttccaaaygacaaaaatgcctggagcatgcgacatagtagaatamactttctacataaatagcttagtctacagcacttggcagacaaatactaaaggctcaagtrcatgctataaagtgtagaggtggtggtggcagtggagaagagttggaaaggaactgaaggatgaccctagttaccagggagaattttctggagaagcgaggaaaagtaaagatcrgatcatcggagagatgaagaagggaattgtatccagatgaaaggcagacacaggcagaggcttcagggcaagaatgacaagagcatatcttggagggcaaagaagagaccaatatgacagaagtgtaaggtgtgactggtgagtcacagggatgtctgaacaatgcagggggtgccatttgcacttaggaaccggcagacatttcatacagtagagaaagagaagggtgtccacatgctctgattaccctcagtgtgtcaggcaaagttctaagtatttgatcttcatagcaatacagggaggtggaaattgttagccatttcccagataaagaggctgatgctcagagagactgagaatgctatacagggtgacacggtgactaaatggcagagccaggatttacaattatctgtccaggttcaaaaactctgtgctctttacctcaccaagttgatcccctaaagttttttttttgtttgtttatcaatggggtggtcccacgttattaaaaggccttaaagacttacgatctaagttatttcaagaattggcatgacaaacactcatttttgaagatttttgtagggctgaggggcagcgatggagtagtagaaagagcatgaaatttggggtctgagatgagtgagacccaggctctccacctttgtaccttcagcaaatgattacatttttaagcctcagtttccttatatataaaataaggattaagatgtgtatcttacagggttgtaaggatgagaaaaaactgtgaaagtatgtcctaagctgtaattaaactatacagctggaaaaaaatgtaaaattgttatttcatctctgaaacaaagttggtatttgtaagggcctaaaagacactatcacagagattaatgcactaattctaggcagctaaccgggtcagattgttacacgtgattgttttgcaggtcacaatatgataaccataatattcattctagacttcaggtttcatatcacaatatggtgacctgcaaaacatgtttctagtttatatcacatcgttatacgttggctggcttttccctataggaacaataatacaatttggaaatatatttttgaccaaccactcagcatcaaagaaataaacaaaagctaaaatacagtaatcacaagctcatactgattaaaaataatagtttttaaacaagaagctacactactaagcaattctacagtataattaacttcatcagaaatagatctgatagttaaaacaaaattaagygttaaaaaaatagtttgtcaccataaaattcagaatggttttttgggagcagttagaaatttcttatttataaaaaatttgaaatgatgccagaactttcctataaataaaatttcctagaagaagtaggatcaaaatcattaaagtaaaattttagtttgtgttttttcaaaactagtctgcagtaccctcttctgctactagatagcaggtgcattcgtgaacaagaatcaagcaaaatcagaagaattttagatatcatctatgctggtagattatgacattcttgggtgacgtattcttcttgagaagatcatgagaattatagatcctttcccccctttccccaaatcactaaactgacacattagttttgcataccatggagatggaggccaactgtgactctctaaactcttgtctatgaactggagttaccaaaacccctggtttagcataacctcacatttcaaagataagatataaaacctgaactctaaaatgaatatgaacattgcccaagagagcagagagctagacgcagccaaaactaaccttcagatctttattagcaacactaaagakggaatatcataggatacaataatgagaacataaagtctttttaacctgccagtttccaaggtttcaaataacctgtgcacacattccaaacacaccagtatttsctcttcagyaattaccatttttctccactctggttaggggtttcactcctgaaaagacatcagcaagctcagtcatccgctccgaaccctctttcttgtaatgctcccatttggtttgcttttctgaaagcatttgcttgaacatctgttgaagcaacagaaaatatttatttacttaagagaaaaatccagactaggcagcttatgaagagagcttgaggaaacccaatttaaattttaaataagaagctacactataaattaacattgaccctgatgtcatctcctcaggcactgatactttgcagaaattcagggacaaagccagaccacctccaaaacagtagttctcacaccaacaccaacagcacataagcaccaccaggaggctttaaagttttcagattctcaaggcccacccccaaagattctcgttcaggcggtcttgaatagggccagaaatccgcatttttaatgtgagattaaatttgtgaccactgctctatggttccttctaggcaacaatgtctgcaattctaacgtaaacagtcagggacagtttgtgtattaccttctccaatgactggggaatgaactagattacctgcaaaagttctttgttttattatacaagtttaattgtttatttttatttatttatttattattatacaagtaattgtgtttattgttatttayttatttagtttttgagagacagggtctcactctgttgcccaggctagagtgcagtggggtgatcatggctcactacaaccttgaactcctgggttcaagtgatcctcctgcctcagcctctcaagtagctagggctatgggcatgcgccactacacctggttaattttcttatttatttattttttttttttttgcagagatgggggccttgctatgttgcccaggctggtgtctcaaactcttggtgtcaagtgatcctccctccttggtctcccacactgttgggattataggcatgagccactgtaccgccttaattctgtttattaattcactccttcataacatttaaattctacaaagtcttgggcagagaagaaamgggtgtaactcagggttgggttttttttttttctgaaacaaacttaaaaaacatacttatttctcactaaaggacacgccatctcagacaaggrtagatggtcttttacaccgggctcttaggaggtaaacaggcatgaactctgatttctcgcttaagaaattcctcacttgccagcatcataataaatcttgaaaagctgagcaatgggatagggagactccatctgcaggtggagaatcagggctctgtggaattttgcggggcctgtagaggaagaatcttagtgatctggcagaatgactaaccaataaaatgatgacggagaggatgaggaataatgaaattatttatagagtctaccctaactttctgagtccctcggatcaatcaatgccatttgataatggcaaagcaacaacataagagcaccctgaagccttcstaagagactacatggcgtcaagcccttcaaacactcattcacatgaactcacaggtttcacatctcacaggatggaatttgggataggggatggtccctgaattaggaaatgtgctgtcatataaagattagaaaaaacacaggtccaattactgtgtctataggatagtcrgaaagtgactctatgaactgtgcaggatgggaagtaggacagaggaagcacaggttaaagaacccagctgaaatgtcagaaattcaaatgtatcatttctttgagcaatttgtattgggtattttttttttctttttaccagagctttcctgaagacctctmatgaggtggtactcctttatgctgtcttgtttcctgtctacctggatagacagaaggaagctgtccattctgtttcaatagattccagagaacagacttatcattagaaatacaggcttggtcagtcagatagcctaggtctgtcctgatttccactcaacaatgctgaactacatattatctatagaactcttgggtccctggggctctagttcataattctaactggtctgagggcatttctttcattcctttttttttttttttttaggcagagtcttgctctgttgcccaggctggagtgcagtggcatgatctcggctcattgcaacctctgcctgtgttttcaagtgattctcctgcctcagcctcctgaagagcttggaatacaggcacgcgccactgcacccagctaatttttgtatttttagtacagatggggttttgctatgttggccagactggtctcgaactcctgacctcaggtgatccacccgccttagcctcccaaagtgctgggattacaggtgtgagccactgcactcgactgggcatttcttccttgcgggcattttttcatttgcctttgaaaggccacttttgctttgacctggttcctgttcttggatctttcctgttttctcatcttggcttaatctgtctttcttccctcactatactgacagggcagctcctagacggtagggacacattttgttcatatttaaatttccagcacctggcaaagaacagagtaggtattcaataactatttgctattcagagggaaaccattaaaattattaatagatcaaaaaggagcagcatttatctgatttgataaaattatgcccagacaaatcactgaaaacactaagcacaggcattatcattatgttagcagtcagtatctattttttctgagctacttagtaggggaatatagtatcctcagaaacctagaagataaagaaacatctaatatactagtaaccatactgaagcaagatgaggatctgttccgaatgggtataaatgtctgggctagttcctgggcccacctgatccaagcccccagggatactggttataaaacctgagcattcccaggtacccatcatttttattatgcccatacaggcttcttcagaggtaagactaacctcagcatttccttcagtgaactcagatgcctgaagtcctcaagatgaccttgtacaaatgcaaatcacccaccccagttaataccctttccagtggttctcatggctcttaggataaagaccaaagtcctgcaaggcctagtatgggctgactcctgcctacctttcagcctcatttcacactacctttctctcactctctctcctccagccaactggtctttcaggtctttgaattgtttatgttcctcctcaccaaagacgacttgatattcttcctgtccctggaatgttctccatcacgctccctacctttgtctacctaacactaacagatcccttccccaggccccttcagaagctcttgcgtctcttctcatggaagtctaccaggatgcaacaggatactttattctaggtacctggagaactacattcctttccttcagagcaaatatctgagttcatatttacatttttattagtgtgattctgtttttttgagacagggtgtcactctgttgcctaggctggagtgcagtggtgcgatcttggcccactgcaacctccgcctcccaggttcaagtgattctcatgcctcagcctccccagttgctgagactacagccgtgtgccaccatgcccagctaatttttgtatttttagtagagatgaggtttcaccagcctgctggccaggctgatctcgaactcctgacctcaggtgatctgcccacgtgggccttccaaggtgctgggattacaggcatgagccactgcacttggcctagtgtgattctttgattaatgtctatattccccattaggctataacctctaccatcttgagtacctttccccatcactgtatccccagtgaaaggaggcactacaggcttgttaaatgtttattcctgtcctttaastataagaactatctcaacagctcraatctgtaccttgaatcaragacagagcaagcaatcctagtcttttttttwaaaaatatttttaagcataaaaaagctaagactgtggtgatattcattcaaatatttttacctctttgagtataaactcaaattgtgcagtatcyaacagcagctggaagaggatcctgggattgtaccgagagtctgttagaatctggtccttgatttgacgaaggcgtttgttgtttgggtcacaggctagaaayaggaaaagtgttacctgcttactaaatgtgtagaaaatatctatgaaataagataaattattaaatattttccttcattttaaccatttaaaaagtaataagcaaaatgtatatcaataaaaratggtgaaatatagtacatctatgccatggagtacaattaaactgttaaatgacagttgaatctgacatggagtgccatccttgaaagattgttgaatgacaaaaagcaagctgcagaacagtgtttccaaattttgtgagcrttctgcggtttgtttatagcaactgtctaaaacgaatgggcagagcctccttgtactacttcatagctgggtggcttcctcacgtcctgtctgttcggagttgcttttgctttagacattgatccctgccattcagtaacggactgctatccctagagaggcctgtttgcaaggttggctcttggctggcatctgggaacttgaatttcacgaagagctgccatcattttgagaactcacaagatcagctcactaagccttaaatgattgtacaaacaacgttttccttctggaagtctggaattttggtacatgctgggcagaggctacctatgtaagcagcccccaatagaaaccgaaggaagctgagtctaatgagccttcctggttgacaacacttcatatgcattgtcatgactcactgctgggggaattaagtgtgccctgtgggactccactgggagaggatgctcggaagcttgtgcctcattcctccaaattcactccgtgtgcccttttcctttgcagattttgctttctatccttccgctataataaatcatagctgtgagtactactagatgctgagtcctctgtgtccctgtagtgaatcactgaagccagagtggtcgtggggaatgcccgacacaacaaggaagggttcctcacacaaagatgagggacccccaaacaagaagcagcagacctctggccatcctgcttcttgtagaggccagagggcatggcaggcagtcagagttttctgaactatccactacccaggcactaggccaaggtcacaaaattaggcagtgattgacccaaggtaaaaatactggatgtcctaattcttagatgatcctatctgccaagctaaaccatttcaaatgaaataaacgccaagttaaaagaatagaataaaaaatattgatatttgcttagattggtttataaggccaattacttatctaagaaagagtaagtagaataaggcaaaatacttacaaggcaaagctactgctgcggtttcaatgcgtcttccaaaagttcacatgttagacacttggttgccattgtgtcagcgttaagaggtagagcccttggcaggcaattgtgttatgaggggtccaccctcatgaatggattaatgccattatcttgggagtgggttagttattccaacagtggctttgctataaaagtgagctctctcttgcacccactatcttgcccttctgcctatctggcatatattgacccttgctagatgctggcaccatgctcttggacttcccagcctccagaaccatgagccaaataaacttctttatacatttcctactctgtggtattctgttatagcagcagaaaatgaactaagacaaataaagtcaaaataaaaactctaagacttaaacagactttgtcaaaaagttcacagctgataggtataaggtatatggtagttacactagtattacatgtgccccctcctgccttcctagtcctgcccccatcaatatctcaggatgtctggcaggtacagaacaacaatgttgtatagatatatgtatatgtcatgggtggttttgttgctttagttatgatgaagcctgtggaaggtcatcttatatgctgatttctaagttactccatcaggaggagactcgtgacaacctggaaaagaggctcagttttcatgggaaactgcaaagttctgatttttcatgaatttgccagaactatgtgggaagaaatatattggaactggtgacactgattacacaaagtgaaaattttcagctccatatttacctaactaaacaaaaatcaaacaaactcagaaggagctccagttgtctttatactaattttaattaaactagaaatctcctgattttaatctgctttcatgtttgcatagggaatgtttaagtacccagttgttggacaaacactctgtattcctcaatgtgctttaacatttagcttcttggtataaaccaggtttgcttctggggttcccagggcctgaccatctctctcagatctgacccttaaggattcatacccagagaactgcagagccatcagaactttggggtcaaacttcagtagccagccagcctttctcatcccttatttcctcagagaatatttctttacaaggttctgtacaagcatcctaagactgggaaatgcctccagcaactcaacaggaggcaatgagactaggcctgcttttctgaacaccatgactgaaattccacaaaagttaactaagcagttgcttttcccatgtgtgactcacaatcagataggtcaatcayttgtttctgataaattacgaccctgtgcaatcaggtcagacaattgccaggcacaaacgcaaaagacaaatgtggctgaagataaaaccacagacctctggcaagccaaggttgtccctggcatgggtgcgaattcaggagactgccggctttccgaacatagacagggccgtcaggcagagtcacacagaagatgaagatgaggctgagtcactagaaaaccccagttggttttatgacaggataaagtgagggcttgagttgtttatacgcttgtgaatgcaasacttttggtaaagaagattaaaagctgagtcaatgtagtaaaatcctcaaattagaactggagtttatgtaaaaaataaactcaactaattaaaaacagattcagggattaaaaacttcagccatcgtgttcatactgtgggtaaattgtaaatggatataggccaacaaacaagatgatgaaacaaactggaaagcagctctcaggataaaggtttaagaagctggagagaaggctgaggggaaactccacacattttcaaagatacgaaggatgaggaagtccaactgctgttttcactgtggaccacccataggaagtggaagcagacggtagctagarggactgtgaagtcatcttggctggaagagctgtgagacaggggctaccatgttacaaaggaaggctacagagaagtcttgtgtgcacagttttttaaagagacacagtcttatctggaagaacaaagaagtgctgcacacagtgcctgtctcagagttggtcctcaaggaaagtttgttgagtgaaaaacaaaaagcagagggcttcacaggcctgctgaatgrcacacctcttaggggtaggggtatacagtcctggatgagggaatgcattggttaattagtgttgatccagcatttacgaagaataagaaactgtgccagccctgaacaagctcagagatgttaattcaacttacttatttttctaccattaaaccagaggttgaagcatttctcacaatctgaacttgatggtcaaactgtgtgaacagaaggtctcggaggagaccatgactcataaaaagctaagatccaatctaccttaaataagcactctggtccagccaggtcatcaactcagtgggcccatatgtttttctgtactttcaaaatcgtatcacttattccatcatttctgtagtctagaatttcttctgctttttgcttcaaaacctcatcacacgcctggttggctcctgattcctgtatggggtttcctgacctcctctgctcccctatcccaagcaatgtttccctctctactctgaactcaaatcacaccaactgtctgtttgacacacctggtgtctgtttactgccttggaccttgaattagtttcccgctgctgctttaacaattaccacaaactcagtggcttaaaacaacacaaatttattctctcaccatcccagaagtgacaaatctgagatggggctcactgggctaaaatcaaggtgatggctgcgctgggctccttctggacattctaggggaaaagtctgttttcttgttttcagcagctaaaggctgcctgtattccttggcttgtggccccctccatctttaaagccagcaatggccagtcaggtttttgtcacaatgctatctctctggttctgacacttctacctccctcttcctgatttaaggacccctatatttacaggctgggcatggtggctcagacctataatcctagcactttgggaggccgaggtgggcagactgcttgggctcaggagtttgagaccaccctggccaacacagtgaaacactgtctctacaaaaaaatacaaaaaacttagccaggcatgatggcacacacctgtagtcccagctgcttgcggggattgcggaagttgtatcgcttgagcccaggaggtctgagtgagctgagattgtgccactgcactcaaacctggggaacttgagatcctgtcttaaaaaaaaaaaaaaagtgggggggggggcgggctcttattttattattcttttttgagacgtggtcttgctctgtcacttaggctgcagtgcagtagcatgatcttggctcactgcagctgcaacctcccaggctcaagtgatcttcccacctcagcctccccagtagctgggactacaggtgtgtgccaccatgcccagctaatttttttactttttgtagagatgggatctcactgtgttacccaggctggttctgaactcctgggctcaagctctcctcctgccttggcctcccaaagtgatgggattacaagtatgagccaccacacacagcaaggacccttatgattacactgagtccactgggataatccagaaacatctccttaaaggtcagctaataggcaacctcaatccccctttttcatgtaatatatctacyggttcagggactagggcatgaacatctctgggtgtgggctggaaggcactattctgcctaccacagatctgcagttctattttttcatatgtctacatttgatctccccattctgatcagtgacaagctccttgaacatgagagataaacatcctcttattccctagcacctaacagtacctgacaggggagagcttttcaggtatgctagtggcctatccaagttgacaaaaaatgactaactttaaaaagcaacttgattctcatccaaggcctctctccctgctaaaccactctgcatcgtgaagtaggtcctgattctgagagtctttatgtggagyaatataaacggccaccccttttgtgcattacctgagtctgctgtatgaagcatcagccatcggatggcaacattgcagtctctcaggcagttcagaagctttgggatattgtccagaaccatctcctcccttaaataaccttcttttagaaattgctgcacttgagcatgcactctttcactgacagtagcatatctgcttgccttgacaaataagaaacttraattacatttaaaaagtcatttatcttgaaaataaatcacattcaaatgaattcactgacaaatagtaacatttctatataggatgaatgacatatggattacagttatagggctcgaagataacatttctataagatgaatgacatatggactacagttatagggctcaaactttaacatttttatataatttctgtacaagatgaatgacatatggactacagttatagggctcaaacattaacatttttatgtaatttctatataagatgaatgacatatggactatagttctagggctcaaagataacatttctatataagatgaataacatatggactatacttattgggctcaaagacaactggcttattgaacatatttgaaaaaagcactggacttagaattctgagactacatcctagttctggctgtgattaaactttggtgtgacttggggcttaacccctgtgtattggtttcttcaaatttcaaacggagacttggaccaggtggttcctcagaactcttctattattaacttagatgaaaaagaaaataaagacagaagttcaattgcttgttcttgctaatactgttgacaaagaaggcagaacagagcagaaacacttaaaatataagacttcttctacaggcttatgaaagcttagcaaaaaatacaccttagtatatcaaaaatgaatttccaaaccagctttttggaaaatttggtcattctgctttacttaaagsaagtcaaatgttaaacatcattaacctcrtcaagttagttgaaatctgtggtatcaagaaacctcttaaaaatgtcacaaatgagaaaatgcaattttagaaagggattttagcaatgaaaaattaatgatctgatgttgctaagtataaaagtgccactttctctaatatatytctaggagatgtgccaacattgaaattattttgtgcattatttatggaattcaatttacttgaataaaacatgatgaagttttttgagtcaatattgttttatccacacaggaaactcagtaactgagccaggatgaggaacataaccatttagaaatatcaagtatgctccccaagattttatctttattcctctacttacttggatgttcccttctgccttgtgtaagaacaaaagagatagaatataaccgtttaacctttaagatgaatgtcttgagtcttgttgcttatttagcacaacacaaatgataaatttaaattacagtgacaggacatattatccatattcagttatcatcttcatcattcatcctacttataaaaacatattaattccagctattggtacaaccaactctggccatgagaatatagtctttaagcaaaagtaaactaagtcatttggggcatatgccatgcttctttgtcttagggtactgactcttccttrggatcctaatcttcaatttacatatacyatataacaaaacctacaattacctatcttattctaacctataaaattcaccttttattaatcattgcattaaattatctaagtgattatcttccaaattccttgggaaatctacttagcttatttgctacttcataaactaggcctgcagttatcagagaatgtccccagattagaacctacctgttctctgacatttgaaaggtccagggtattatttaaagcagtttttgcagctttgtaaggttcccaagcatctactagattaactgtgatccccatgtaaatactaattacctgaaagaggagacattcagaatttgttaaattcctactcacttcaaggcaaagggttgaatactaaagttatagaaggcaatrcccactccatgtttaaattccattccaatgaaaaaccaagattttccaaatatataggtaagtgttcctgattgttaagtaagtgttcctgattgttaattcacgttaataggtataaagatctctttacacctattaacrttgctttttgaaattctctattgtgtaatattaatgttttctcaccagttgttttattggttggcaattgcctgggatatctttttttaaaatcccttcattttcactgtgctagggtattttttcaggtgtgtatcttacaggtttcatgtaattggattttggtctttcttaataataaatatgtctttaattatagtatcatggtcaaaacttctttattaaacttaggaacctgaagccacactatcagtgttttcctcttggctgctcaactctgagctcactaatatgattcacagttggccaggaaccaccacttcctaatgtaggctgttctcatactaccaataaattgaaggcccctcataacgatagtttatgtgaytcaacagccgatatagaagcagaacaaaatctgctacatgcgaatataatccaactccctgcattttgttaaagcctctttgttttcatatatttcatttcatatatattatgaagcaagctttattcctataagaatatttttaaatgaaacaatgcttacaaaggtacaagcatatccttgcaataatataaactttagtaaccccattacagttagcttataggtaaaactttattattaaagtgaaattcctattcacaaagtgacaaattagatgaatttggctatcttagattcagaaaatggaaaagaataaataaattcttacacaacttagttgtaatctcagtagctaaagcaagagacattttaataaatgatttaatcttgagagtatccattttagaaaaagactagtgsgttcttcaggaagttttactgactcatttattccttcatgttataattataaaattctcaatacagttagagcaagtttacctaagtgatgttatgtcccattatttacaacattacaacctgtgggttaaaggccaaaagaatgggaagttagttctctaacacatttactgtagaggaaaaaaattagcaatacttgcccaattatctggaaagtatttatccactatctctctcatttttgcttgatgggtgtgaaggatggaaggctcaaagtagagaatcacgtacagcatggcagcttggtttgccagggctgtgctgcgatgctccggcaaaggatacgctgagacctgcaatgtcaagacgacaccccgagaaagctgttggcaacatttgcacgtagacatgctcaaattaaactctctggttgtaagacacatcagtttttccaaagcccatcacctttcaggatcctggacactggaagcccttctcagactgtaccattgcttgccaaggtcttccttcttattcctaacaccataatattctcttcttccagcccttgaccgctgcaattctaagtcttttcttaaaaaaaaaaaaaaaaagtcccattcctgtgtctcccaccacttctccatttttgtatctttcctgttggagacaacccttagaactgacaggctccactcactgttgctattttctcactttctgtttattattcaactcactgaaattcgacctccatcatcatcccagtggaattccctacggtcgctcatgacctcacaaccatccaattcaacggcttctttttaagactctcacttaaattctctgaggaatgaaatctctccttctctggtttcctagataccactctctcttctcaatctcctttgctgagtcctcatcttctgccttttaaatgttggtgttccccaggggttcatcccctcacgtactagaaatctttggatgcacaaagcacatatcaccttsagctaccacaagcaaaaaggagagaaattgttataagggcagacayagccatgtcacatgaaacctgcaggcaggwatgyggccaggccacaggaagcggctggggctgggaaccggaatgccttcgctctttctccccttgatgtgtyggcccaccttttctctccctccaggctactcgccatatacatggcagaatgaggctgcccacaaactcccaattttgcatgttgtggataaactccaatccagaaactgtttctcaggcccaattccaaattacctggagacagaatctgttccatcacccatgaccagggatgggggaggtgcaggacagagagtggggtggacacacagcacaatcacagcttaacccttgtgctaataaagatcatggggcaaggaggaaatggaagcacattgccttcagaaggacgtggaatgagaggcaatcaggaatgagatgctctgaattgacacagaccaaattcaagttatggttctgctacttagtaacaggaatttaaggaaattatttaagctctccaagtcttattcttctcaacagcaacatgggggataatgccatctactttacagggctattgtgaggaacagagaaaatggtatgggaacaaaacctcctttgtggctggtttggactgaattctcaatgaatggcaacaattattatggagacctggcatctgtgggtagcttctgattttgaattgtcttaaaacaacaacaacaacaccaccaacaaaaaccctcttatttatacttaacatattcacacaaaaaactaacaagctacctaaagaactgcacagatcaggttcattctgtgataaatgatatccacagttatcacaggcctctttactccctaattataatttttacaaatatttaaatatataacatctaaaattatgttttcttcagaagaatgaagtcaaatggtaattttatttggcgttttttaaaaggaagtgactactacacatactggcaaggggagtggggcgattttcaaatgctgcatgatcttcacagccttgctcaggctgcctcctttcctggcactcctcttaccttccttttgtcacctgttgtgaccttgctgccactgctgcatgctccagtggcaccctgtgcttaccctaagataacacccatcttgctttactataatcctgtcatctgcctttcctaagctacaagctcagtaggggcagggacatggcctgtcttcttcggtgatgggtccccagcattgcgcatgtgaatgggcacgtatcacatactcaacaaccatttcttgaatgaatgactaaaagaatgcatcttcttcccaatagctcaaattccatcttckccctgaaatayatgattctggcaaaattaataaccctctttcctttatcatcctggggtgtagctcaaaaggttttaaaaggttctacctgcttttactcttttgggaaagaaggaaggaaaggagtaattaaagagggaagtgaaatcagtctgttaaactgtcttaataggtcttaatagatttaattcccacctggttgtaaatatcatcagatctcagkcgaccaatgaccatactgatgaaggattcgttgataggcactctctggaaatagctctcgggatagttggatggtcttttggcacctggttggctagaataacctgtacttcgaagcagcttacaaatatcgtccatatttgaatcagcagaagatcgagcagcactgagtcatattcacaatgggaaacaaagacccaaaacacacatattagaaactgaaaagtccaataaagtagaattccattctactttgactcaatatagtttcagatatgatcacaggtccatctatatcctcaatatatcctcaagattcaaaattatgtgtatatatatgtgtgtgtgtgtgtatatatatatatatatatatatatatacatttttttttgagatggagtctcgctatgtatgtatatataaccttttttttttttttttttttttttgagatggtgtcttgctctgtcacccaggctggagtgcagtggcgtgatctcagctcactgcaacctctgcctccaggttcaagcaattctcctgcctcagcctcctgagtaactgggactacaggcatttgccaccgtgcctggctaatttttgtattttagtagagatggggtttcaccatgctggcccaggctggtcttaaatgtctgacctcaactgatccacccaccttgtcctcccaaagtgctgggattacaggtgtgagccactgtgcccggcctcaaaattatatttttgaaagcctgtttagaagatgggtattcatactatgtaaaggtccataatcccttttccaaaatccttaggagtggatttgtttcggaatatagcatttttcaaatagtaagagtcatatggcatatagatcatacacaatacaacactccagcagggtctgaattggcatctcatgatcaacataagtgaataattctggaggaaaatttataaatatttacaaaagtgagataagtgaagactatatatagcctcacacctattccaggcaagttttgactccaaatgatttcagcttacatcaggttttgctgccaaatgaattactatgtatatgtacatgtgtgttgtgtgtatactcgtgtatatatattttttcagagctctttggatttgaaaattgtgggtaaagaatgtgaacctgacattttacarattaaaaaataatttamaaatattatgtcaatttaaagtaaaatatatctaacttttttcttggcaagctgttccttctacagagatctaataaacaggtctgtgatttttccgggtggaatagtaagctctgaaagaaatgaactagattcaaagaatcttagacttggatatgacctgctatttgctgtaaggatctcttttgccacgactgtgacttggaagtgttcagtgtcacttcaataataaatgctcacattctaatgaattagctgttgtaccaaaggggacaaagccatattttcaaaactgggcttcataascaatatttttttcttcttctttacactgtgtatagtttttgtttttccaggtactctcagaaatataggaaaggccattcaaatctcatttttaaaaacatggatgttaaaacagcttggtcaaactgacatgaatgaacactgctagaacactcccttcagctgaaaggaaaaggctagttgaggagcctaagactaatttgctgctgaggacacagtagtacctggtattgccgaaaagtataatgtccccaaagaacccccttctccttgtctactttgtcctaatttttaagtttgaaaatgttaattctactctttacatctttagctcaagctcctgactcctccttcttgacagtttcttctctgaatcttgactatctccgacattgacctggtattccatttttagctcattcaaccaattgaaaatctgtgcgttagacactaaaattaaaaagttggttaaggtggctcctgttttcaagaccttacttcctgaagaatcacagttctgtatasataaacacaacaaatgatttgtggatatgtgctgttgcttgatttgtttttgtttctatgtaaacatgggagagaattcactttcaacctgactctgaatgacaacttttcaaagtcatcaaactgaaatgacaacagaaagcacacttatttccttatatctgccaaggagtaatatttgaaaacttaaacaacaaaagcaaaaataatcttcattagatttctaagattctttgaaatttagcctcaaggtaaagaaagttcacaattcagactcctttttaaaattggagttatcattagggacagcataatccatacttctaataatctataatatatagaatayttgatatgtaatacatagattatataatttataatcattatgaaatatgtaattgttatatwcctacaatatgctcacaagacataagaatcttactttttttttttttttttttgagacatagtctcgctctgtcacccaggatggagtgtagtggcatgatcttcgctcactgcaaccttcrcctcccgagttcaggcgattytcctgcctcagcctcctgagtacctggaattacaggcgcccaccaccgtgcctggctaatttttgtagttttagtagagacagggtttcaccatgttggccaggctggtatcraactcctgacctcagatgatctgcctgccttggcctcccaaaagtgttgggattacaggcgttagccactgtgcccggctgaatcgtatactttcttatctattcttggattactgctgttcacagtataaggaatatggggacatacactgcattttaccgacagcagcgtttcggaagtgtagtcctagcccaggaatacctgtatcggtagtaagaaaccagcatcctctctctgacttctccttcaatcttttggtcaatgaccagtagcataactccatataagtacagtgcttcacactaagaagagaagaggacaaaagccaaaatcactagattatacattcttagggagtaaagtcggtaatcatgaaaaatattgctttgctcacacttcttcaaaaagttttagatttcaaggaaaaggtaggtttcctccaaggagctcttaccttcttgcmgaatrggccttgaaaagtttatgtaaaacagattttaattcatagtgataatttttcagttgayctattttggctatgttgcttgggacaccaaaatagcaacccaatattgtgtatacctcttcatcataaaatcattcacttattcaatcagcatttcttaaatggttagtatgtactaggtatcaggacagatggctgggatgcaaaaagtaaagaagacagaattcttacaccgaggaggctcataacttccacataacttttaactgttttaaattctgttcaaagtctatgttctaaactcagatatggacctgccagttagaagatarttaaaagctcatttcgcttctctttaaagaatggtatttcgtatatatttgtgacttaaaagaaaaaaaagtgatactatgtttgatattcttgaatttcattttaaataatcaytattacttactagaagttgttttccatcttcattgagaagcacagtttctaaggtttgctgaatataaaccccttcattgagatcatctagatatctagaaataaaaccacagyrcaagttattaatttataatagaaactttaacatctttaaagaaggaaagatttttaaaagataaggcaggatgccaggcattctggccttccactagttcatggtccttcatgctcttaagaatacagtcttataaactgatttagggccacagtttgatatttatcgctgttccaagtaaaagaaatattccctagtcctgatttgtgaattacaagtatctaggagtaaaggcagaagaacatggaatatctagtctaaaagttaatgagtaatgaattcttaagaagtgtattaagagacagaaagttaatgataaagataagttctttttcccacttttcacatataatacactaggatatgataataaataacaggattggaaactrtatgacttagttaaactaagtttattacaacacctcrtaagagcaggacattatagtaaaacttcaaaattcttaagatgaccagtgccacaggtaggaaaagacaactatatacagtataaactaaattaggaaattttgtagtaactcagagagatttacacgttgctatgtgtccttttccctctccactatttactaccagaataagctattcctaaatagatcaatacctgtttaagtctacaatatatttatgtacactttgaaatgctaaataaaatctggtcacaatttctatgttgttttcacgaaattcttcatctaaatcctgtagctctggcttagcatccagtttgctttcccataattctggaccctragaaaaaaaaacacatgtgaaatgtcaataaaagcatacttgttggtgacaatttctaaatagtcttttaaaaatttgttcttatgttattagacatcccaaacttaaagcagagcaacagaaagtagtgaagataatagaagcctagatataaaatccctttgagagaaatgaatttgaattggacccaagattagcatgcttttaagtatggggcccttcaatgtgaaatatcaaagttatcttttaaaaatacaattatattgtgttagggctttgacataatactttcaacttattttcaagttagtagctaatattaagtttagtcgaaaagctcttctctttagctttttccataattmcttaaccttacagagtttcatggttcccagagaaaacacgcttttgtagaaaagacaacaataaaaatgytatagaggaagattaccttaaaatagctgaaatcaaatatgatatctccatatttctgttgatcagctctgtcttttaacctgaacacagcaggaataaactcagagagtctcaaaagttcagcaatgatggcattaccacaggaaacaatccttaggattgcttggccacagaggttgttctcggctagaaagtccaacattgtgaggcggaccgactactctgtgcctggacactggggatgattaactggcctcagagctggtgtctgtatattattagatgaaaccaggtgtgcagagagattggctcctccattaaagaacctgtatccccaaaaaaagtgtgaaaatctcaatttgtttaaggaagcacatgtgtacacataagaaacacatttttctcccaaactcactaaaaaaattttaagaaataatgagttcctttataggggaaagggtgtttatctgtcactcttcatattttcccatgtggagggactttgctagattaacactcttggcctcttcttcaacatgttagtcacttctcttgagaaaaagatatgatacagctcatctctgtgctagggagaaggaaccactgggccatgtggtggttcccaatggtaccctggattatacaagnnnnnnnnnnnnnnnnnnnnttttgtccattggtttctggttaaaagtcaacttgggaggcggacgaaacttgtgtctggacctgggaagaataacggcccccaagccgggtcggaatttatagataaaccggtttccagaaagttggttcctcataaagaacctgtatccccaaaaaagtgtgaaatctccatttgttaaagaaggcacatgtgtacacataagaaacacattttctcccaactccactaaaaaattttaagaaataatgagttcctttatagcgtaaagggtgtttatctgtcactcttcatattttccaagtggagggactttgctagattaacactcttggcctcttcttcaaacatgttagtcacttctcttgagaaaaagatatgatacagctcatctctgtgctagggagaaggaaccactgggcatgtgtggttccaatgtaccctgattatacaagctatctcctactattygatatattagcaaataatttcaaacgctataaagagagctcagagacaaatccctgtacatcattttgaggcatttgtccaattatttcccagaaatggaactgcaagcttaaggtaagaacatgtccaagattccttttaaaattacagatgctaggttctgcaaaattctgtgaagatgatttataaatactaaatcaaactggtccaaaagtctcataaaattcagcacttaggtatctagcactgttagcagaatccattacttgcttctcttgtattccaatgcactctctgaggatggttagatcacttagcatactgaatattatcgttgcttacagctcattctgaaagttcttgaaggcaaggattgatctttacccaaccactccttgctgaatacctctttgccaggctggatatgaagatgtttaaacatctcaccttctagtccagtggttctcaagcctggctgcttaagggaatcacctagcatcttagagtttctggtaagtaggttagaggtagtcctaagcatctctgtttttaagaatctccccggatgattctgatgtgaagcsaggatcattaaaagagtagagaatgactggtcttatagaaaactgcagcaggcaaacaggaaattaacaatatttatctttgtgccctttgtgctgaactcattccttggcactgrcaagtataaggagtgcataaataatactagggttacaagaggtgatgtctgtcctctctagctgcctgctatactgctggagatgagccctgaagaaaaaaaatcagagagatgaagtgyttcagtgtgtctttacaataaagaaataagaagtgtaacatayatttaattgtcagtatggagcatttattaggtgttctgttgggaaaggtattcttatactgggtgatctttagtaaagtgacatctaggaattcggggctagagaaagaaacctagcatctaaaaagaatgacctattttagtatgtaacacttaaaaacttttccatggtaaatgacttagaagatggatttgaaatccaaagggcagacacagggttgatttctaaaacatgcaaagggatctcacaagctgtcaaagagagaacagagagagaagcggaggcagaagccaagtaacaaggaaaagggaaaaaaagatgtcactaggaatgaaaaccaaccaaccaacaaaacatacatgtgatgttttcctgtacacataagtctttgagcatgtcactacccaggttgtgccttctaagcatcttctgtaacacagagactctcgataaaactgcttcctgacccatccctttccttcccactagcttcctcctacagccagtgcagatagcaggggtgagcagatggtagaaggcgaagggcaactggagaaggaagcgagaaagacttacacaaatgaaataactcctcggacttgatgaggtttcagaaagttcttgaagtaggtaatttgtctcattacgctactccttcttacattcccctctgcccacagacttgagtaccccttcttgttcaggcctgtgtgccttcccctgcaacaatcatttttcttagttctaggggcttggaaagcaatctgattataataatgtggtaactggttgccaaagatggctcccaacaattccttgccatgaagtcagcccatacagcaccttaagtgaagggctgaaccttattttccctctcaatgagtctggattgcattttattagtttgctgggctgccgtaacaaagcaccacagagagggtgacttaaacaaccacatttattttgtcacaattctggaggcgagaacttcaagatcaaggtgttggtaggactgttttcttctcaggcttctctcactggcttgtagccagctattttcctcctgtgtcttcgcatggccaccccattgctcatttctttgtatagagatgggagtctcactatgtagcccaggggagtctcaaactcctgggctcaagcaatcctcccatctcagcctcccaaagtgctgagattacaggcatgagctaccaagcctggccctcctttgtaaatttctgtgtccaaatttcctcttcatacaaagataccagtcatattggattagggcctatcctagtggcttcattttaacttaaccacckccttaaaaatcctgtctccaaatatagtcacattctgagctactgagtgttaggaattcaacatataaattttggggggacccaactcagctcataacagcttgtgccttccttccttcaacccaaagaatactgtagaattaactctctaccaattccaggcctaagccttgagaaggcctggcagtatctccttttgctctctttgggtgtccgaagctgccatgtaagatgtctgggtatcttgctagagagatcacaggagttacaaagaggaaagaccatgctgagagggaaaagtcctgacacagaagagaatgaagaaagccagcagacagcagaaactgaagtgccgacgtgtgacttgggttgacctggtccactcagcccccagctctttaagtcttcctagctgaagtgctagacatataagggatgaggctattcggcttctgcagccagcaaagccctctgtgccttttcccaattcctaatgcacaggatcatgataaatttttaacatattgtattgttttgggcaaataagtcttggggtagtttgccatagtgctgagattcagttttgaggactaacagtacaagttgtcaatttaaacagcatgctgatgctgttattgtgatatttcattttctataatgctgtgcaatatagtcattgcttttgtataataatgtccatgtagctatttctgtattgtactactgcattttcctccaatccccatcttttcagttctctgcttccgctgattattgcaatttccttacaggaattgtgccatttgtcttatctttggaaaaagagagctatgtcctaaaaaccactagaagtcggtgagggaacaacaagtaggtgagggaacaatctttagaaatgtttttaggcctggcaacggtggctcacacctgtaatcctagtactttagaaggccaaggtaggaggaatgcttgagctcaagagttcaagaccagtctgggcaacaatagcgagaccttgtctctactaaaaatcaaaagaatatcagtcaggtatggtggtgcgagcctgtagtcccagtgacaagggaggctgaggtgggaggattgcttgagccctggaggttgaggctgcagtgagccatgatcgtgccactgcactcttgcctgggtgacaatgagaccctctctcaaaaaaaaaaaaaaaaaaaattttctcacatgtcaagtataggagattcttgctattaagaatagttcatatctgaaaaatgctagagtgattacaaaatacagaaaaatgtttcataaaaaggagaagaaaaagttttgattacaaatgtatcttgaaatttgtgaaaatgagctttatatattaggctgtgataagtgccgtgaagaaaaarcataataaaggatggggcatatgctagtttccatagagcacctcgggcagaagtcagaaggaaatgagagagcaagcagtatggatatctgggtatggtcagcagctttctaaagtggtccctaatgatctctgcctcctggtattcatgttctatgtaggttccttcccttgagtataagctgacttactgactccctcctaaagaggagaatagggccaggtgtggtgactcactcctgtaattccagcactttgagaggctgaggcacatggatcacctgaggttaggagagccgggatcaccccggctctactaaaaatacaaaaattagccaggcatggtggcaaaaacctgtaatcccagctactcgggaggctgaggcaggagaattgcttaaacccaggaggcggaggttgcagtgaaccgagatygcaccactgcactccagcctgggtgacagagtgagacttcatctcaaaaaaaaaaaagggggagggggggaaggaaataggatagaaacaaaagatacagtgcacttctgagattagatttcgaaaagactaacttctggcttgggcaccctctgtagcttgctagtccaggggaagcaacatatcatggtgtgagagagccctggggagaagcccatatgacaaggaactgaggcttgccaaaaaccacctgagtgaacttgaaagtagatcccttataatcccagtccagccttcagataagaccatagctccttgttcccagcctgactgcaatgttctaaaagccccagagccaaaggcagccagctatgccctaccytccggaccatagatgctataaagcttattgtcttaagccactgggttctggcatagtttattatgcagcaatagataatgatcctaataatggcatcccaagcagaggttacaagtaagtgcaaaggccccagggcaggaatgtgctagatggctagcaaggtggctaaagtggctggagcagagtcagctaggggcggaaacagaagaagtagactggattggatctgagagccaagaagccactacagctgtctagaactcccatgaaggtaccctgtaatacacattaaggcatacattattaacaagttcttttagtttcctctgtgatacttgcttgttaaaccacactgatctctaacaggctgaatttcagataatttcatttcattttctgcatggatatggtctggcttgggaaagyagagagggaaaggggaaataatggacagtgggcaaaacagtcacatactaaagccctctgaagaccaccaaactaacccagaaggtctaagtaggatgaaactttacaccaggagtgtccaatctttttggcttccctgggcaatattggaagaagaattgtcttgagccacacataaaatacactaacaccaaaaatagctgatgaccttaaaaaaaatcgcaaaaaaatctcataatgttttaagcaagyttacaaatttgtattggggcacattcaaagccattctgggccgcatgtggcctgcaggcctcaggctacacaagcttgctctagactcatgaagaggaggacaagctatgattaacaggtccaatggctacccgatttgggataccatgacagggcaacaatgtggccctgggaaaaacaacttaaagcaaagtaacattacttgccctttactctactctctcccaacatacagaaggacagacagactcagcacctgcatgcacacattcggggaagcttcagtctgggataacgacagagatcaagactttcgtgtgtcaatctcttgttttaatccttagtcccttactcaagaattacgctgtagacaactttaaaagaacatgagaaggataataataaccaaatatgttcggcaatagtaaaacaaatattatgggtctttattacctaggtaaatcacctttctaaaattctatatataaactttaaatttttaatgcaaaagcmtatgagttatatttaatatacttttactgaaatgaactcactgcttgtaatctgttttgccccatgaagggcacttgtgttttctatttctaataatgcaagcatctcctgctaagtttttgaagatggaagaagttaaaacaagattagctgaaagaaggaaatcacttagttacattttatgtactagacctcctaacccggactagttatattttccatgtaacaaatggaatttccataatttgtacaaatataatttggctagagtatttggtaaatagccccctcgttggctgaaggactagtcctgaagaacagaatctaagaaccatcattaaaaatgcctaatcaagttgcagctaagaggtaggtggatggctttacaaagtgttaagactcagctaagtcttaaaaaaccactttagaattaggtccaaataaacactgtagaagaagctatgttaaattatcctttcagaggttctcttggtgctagggatcaagaacacttgaagatcagttttctcaatacaggctatattattattggcatgaaatccagagatcccactatattttcttattttcttttacaagtgccggtaacttcatttttaayaatttggcgtggaactgtgattttcagtttgggaagtaatcctaatcaaaagacatgctttcaagaataaggcatgacatccttacaccaattaccctgagtacagaataatatttcttaaggaaatcgaattgtcgtggacaaacagtttaccctcttcagaggacaaaagaaggcaggtctatttttagcctttcgcaaaacctcagttccataaaggaagcactggtctccacaaatccattatcacaaacaaaatataacggttgctgatcaagataaatgcaagctgcatatattttccagaaaagttctgaaatgaggctgaacctgaaatcctgggaaaggcaggtgaaggacaattagagaaggtgtcccttgtagtgcacaaagacagtaaaacttcgccctcactacgcctcacctatgtttgagggagctccatgcgcttgcaatcaggagacccagttttatggctctgtgactttttttctttctcctgtccgatcataatcctgattccgatcccaggaatcagggccctgggaactttttttttttcccccaaatgcaaaggrttttgacatcagtatgtcacaggtgaaggcattaaggcgcggcgagcagcaatgacttgcccaaactcacagcccatggcataactagaatgcaaatccacgtctgtcagcctgtaaaagtcctcactactagcctttcagttttctcaaaagcaaagagaaataacgacgacatccatacagcagtgttcccggaaacttggaaggatgagattcggaccaagcagctgaacggtgcttcctaaagcgaggaaggggtgtgcaaaatgatttccccctaagcggagacgaagagctggattacagcccccgccccagaaagcccctaagccctccatcccgagtcccccatccaggctgcacgcgactctgcagacctccccgtggccagcgcggcccagcggggaggggaagggggccatgcaaaaatggggcgcgctcactccatccccactcacctgtcagccgggccgcgccacggcgcacgcgcagggccggaggtcgcgcgcggagccggcacccagtttccacccctccctcaaggcggcggtcctcttctatccgcagtcccggacctggagcgggtcagaccccgacttccgcccctgactccccaggcggtcacatgaccgaagcggctgggagcagggaggggcatcatgtgaccactcgccggcgacggctgatgacgcaagagcccgctctcacttttcagcggcaggcgaagggggctgaggaaaggaggtgggtctaggcaggggaaattggggtgccaccagacggagacagcttggactaccaggtagggaagaagcgggggacggcaatggggagggtggcaggagtttcgccaccctcagggacactccacggggactccgagccgggggtccgtctacccggattatggttgtggaacttttcacgccacggtagtgagtctgggacagtttaccctcctgtccgagacgccatctctccatcctttcgcctcaagtgtgtaggggcaagattacgaatttttgatccaaatagattttgtttgaactgactttaaaagtaaggccacgggaaggtcgtttgaataaactctctggacctcaatttcctcttcagttatgtagattgcagtgagaattagcgataaggagaataaagtgccgggacaccagtttatggcattctgtaggtgaccgagaaatgatgatgtctgttgttatttttgtaactggccaaatctttattggtcccctattttgtgtgaggaattgctttatatgcaatagaatatgtcagggttctagtttaaggaggtgtcagtttaaagaagctgcagacatgtgagcaaatagttgtgatgagtttcataataggagtgtgttgtgtacatgtgcatgtgatagggataatggtagcatgagggagggaaaagcaattgtatgagaaggattcagagagaagggattatccttgcatgttgaaaaaggagaggcagctctggctgacttgtacaaggctcccatggatttaaaggaagtcaacatattgtctataaataacatgcagagaaaaaactcaggaaatgcacaacttgttctaaactttcttggagatcataggtaccgggaagaaaaagatcagtgttattacctggggagggatccaagagagattgatttaaaccagttattctcaactgatgcactattgacattttaggccagataattttttgctgtggggtcagggtgagggctgtcctgtgttttgtaggatgcttaagagcatccctggcctctgcccgctagatgccaaccacaaagtctacagatactgctaaatgtccccttgcgagaggggtaaaatccttcttggttgagaaccacttaaaccaagccatgaaagatggtatcttagtcaatgtgggcttctgtaacggaaatgccataaactaggtagcttatgaacaacagaaatttatttctcacagttccggggcctgtttcctggttcataggtggcttcttgctgtgtcctcacatggtggaatggcaaagcagctatctggagcatcttttaaaagggcactaatcttattcatgaaagtgggcctcatcacctcccaagaggccccacctcctaataccatcaccttggaagttaggatttcaacatatacattttgggtgacacaaacattcagactttagcatatgggtaagatgtgggcagatagaaaactgaagagaggccctggcacagtggcttatgcctgtaatcccagcactttgggaggccaaggcgggcggatcacttgaggtcgggtgtttgagaccagcctggtcaacatagcgaaaccctctctctactaaaaatacaataaataaataaataaataaataagtaaataaataacataattggtgtgtcctggcacacacctgtaatcccagctactcgggaggctgaggcaggagaatcccttgaacccaggaagcagaggttgaggtgagccgagatcatgccactgcactccagtttgggcgacagagcgaaactctgtctcaaaaaataaataaataaatagaaagaaaactgaagagaaggttttctcatggtgggagcaggatgaggaaaagtcctctttttcctttttggtgacagcgtctcactcttatcgtccaggctagaatgcagtagcatgatcatagctcactgcagccttggactcctggacccaaggagtcctcccacctcagccttccgagggtctaggacaataggtgcaagccactatgtctgtgtaagtttaaattttttttttttttgtagagttggggtcttgctgtgttgcccaggctggtcttaaactcctggcctcaagcaatcttcctgccttgccctttcaaagtgctgggattataggcatgagccaccacacccagcctgaacaaagtctggagctgagattaagaatattgggtatgaaggggagaaggaaacaggagagctatgaatctgactgaagcagacagttaatttattcatttattgactattttcagagcacttgctgtttgtgaagcactgctaacatcttgcaagatagtcactaacaaagtggagtgactataattataattatatcaaagaaggtgctgttagagtcagagaaaggagttgtctttgacttgtacttagctgtatttattgggagagattgagaaaagtatgtctgttccatctttctgcaccatccattgcctttgcttttcaattcaatctcagtcttaatcttttccctactccagaattacagaagagcatgatcgtgttttccttggtcctctgcaaaagtgaagtttcactaaagtaatgtgagttttgcattcaaacaaatagtgacagctactgtttggtagatactttccatttatactggattgcattaatcttcatagatactgtgtctttgttcaagctaccataacaaaataccatagactgggtggcttaaacaacagaaatttatttcttacagttctggaggccagaagttcaaggtgaggttgccagcatagttggattctggtgaggactttcttcttggcttgtagatggctgccctttttatgtgtcttcacatggtagggagagagagagagagcagtccctggcgtctcttccttttcttttcttttctcttttttttgagaaaagagggtctcgctctgttgcccaggctggagtgcagtggcgtgatcatggcttactgcaacctcaacctcccggctcaagcgatcctaccacatctcctcctgaggagctggggctgcaggcccgcaccaccacatccagctaattttttattttctgtaaagacagagtctcactttattgcctgggctggtctcgaactcctgggctcaagccaacctcccacattggcctcccaaagtgctgggattataggcatgagccacctttccagccaggttttagataatcagtacacatgtgcctagtgcctatcatattggacagtgcagattatagaacgttttcatcacagaaagttctattggacaatgctgctctggacaatttagacttacactagaatcaagactgagtagaaaacagaatacttctgctgatcatggtgtctcatgcctataatcccagcacttgagaggccgagttgggaggatcacttgagctcaggagtttgagaccagcttgggcaacacagggagatggtcgtctctactaaaaattaaaaaagaaaaattggccaagtggtggcgcgcgcctgtggtcccagctacttgagaggctaatgtgggagaatcacatgagcctgggaggttgaggctgtagcgagcatgatcatgtcactgcactccagcctgggtgacagaacaagaccctgtctcaaaaacaaaaagaaaaccgaggccaggggcagtggctcacgcctgtaatcctagcactttgggaggccgaggccggtggatcacttgaggtcaggagtttgagaccagcctggcaaacatagtgaaaccccgtctctactaaaaatacaaaaattagcctggcatgtagctcccagctactggggaggctgaggcaagagaattgcatgaacctgggaggcgtaggttgcagtgagccaaggtagtgccactgcactccagcctgagggacaagagcaaaactccatctcaaaaaaaaaaaaaaaaaaagaaaagaaaattgaatactggaattatatcatttggtccttgcaggtttgtgttttttgattaatacttagtactgtaacaggtaaaccccacaagtctaaatggctttgcccagttgaagtttctttcatgcatggagcctgataggtgagtagttttcctccaagcagtgatgtagggccttgagctccttccatgcagtaattctctatcatcagcatatagctttactaaggtccctatgcttgcctgcatcaagctatcaaatgggaaaatgtggctttttgcagattaggcctggaaatggctcacatttcattgccttgggtacagtcataggccacagctaacttcaaggaaggctggaaaatgtggagcatatataggcatgtaaccgggttgaagaggaaatggttttggtgggcacctgtccagtatctgtcacaagtgttttgtccttacctgccctgagaaatagtctcaagaaacagtcctagaagtttgctattgcatttactataaggatatttttgaggattatttttttcagtgtaacccattatctcatatatgatgatccatacttgccttgattgccatggaaagctttatttttttcttgagtttctagtgttatttgttttttttttttggagaaaataactgtcactttttgttttgattgtgaggaagctcactaccaaatgtgtattactagtactgtgtggaatcctttttttttttttttttttttcatacggagtctttttgtgatctcagctcactgcaactgctgcctccaggattcaagcgattcttctgcctcagcctcccgagtagctgggactgcaggtgtgtaccaccatgcccagctaatttttgtattttcagtagggatggggcttcaccatgttggctgggctggtcttgaactcctgacctcgagtgatcaactgcctcggcctcccaaagtgctgggattacaggcgggagccaccacacctggccctctgtgtagaatcctaaagtgtgcgtgactccattataactttctcatatgcttggtttgcccgtaaatttctgttttttgatcctggtttttctgaatttatgtttttccatctttttgtgtatgtttgtatttatattgtgtaaaatgtctcaacttgtttggtataatacagtgagattgtaaacaagcagtctctttcaatgcaaatgtttgaagatcatcattggcttttattcctgtttgtattttttcttttttgatgtggaactgtaaagtcccagaaaagaacacaacaagaacccttgtttcatcacccagattttaacatctttaacattttgccatatttgtttcaggtcttgatttttaaggtaaagttttgaaaatacatagagctcaaatttccatgatgaccactagacccaactggagtgaatctttatcctgtacttaaggctgtctacactatattcccaaagaatgaaatccagttatcttcccattcctttgtacctgtatgccaggcaaagggaactcatctcatcgtttactaccttatgatcttttttcatctcactgcttccttcatctgaacagctctccctgataatttagacctttccaaatcctgagtaccttttatggtccagcttaagtgccttcatttccgtgaagcctatgtctcccctgttgtgcctataatcctttcctttcttgaacattgtagcatagtgggtttgtgtaatcggtttcttttttcaacttcatagtacttggttcattcttttaatatggaacttgttctctgccaagcctgttttgaggggttgtggcagaaaggagttatgtttattctggaatatcaaatagttaaggtt

SEQ ID NO: 96209 - DNA, 61676 bp, Homo sapiens
tgtttaatgttaaggaacattaatgttactgataaccatgataaactggaagttaaatgtttacattgataatcattaactgtcaattaggaaaattataaatctgggtcttttaaaaatccaattttggatttgcaataagaccgctactcatatggactttttaaagtgaaaccaatgaagcatagatgttattcctttaaagtaaaacttttggccaggcacggtggctcatgcctgtaatcccaacagtttgggaggctggaggctgaggtgggcggatcacctgaggtcaggagtttgagaccagcctggccaatatggtgaaaccctgtctctaccaaaaatacaaaaattagccaggcgtagtggcgcacgcttgtaatcccagctacttgggaggctgaggcaggagaatcacttaaacccggggaggcggaggttgcagtgaaccaagattgtgccactgcactccagcctgggaaagagtgaaactctgtctcaaaaaaaaaaaaaagtaaaacttttaaggaagtaaataatatgaaaaattagaaatactgttatcaggttaaatagttaaggacactattaattcactttctttaaaaggggaaaaacttgctttgagctgcttcttgttccagagactgagacattgctattttctacacactattttacaacagttctgtaaggcagatattatcatcccatgttatagatgaggaaactgagattcaacatgataatgggatttttccaagaccactaggctaataagtataataagagctggactctgattctcaccccctctgccatttcacactaccttaggaaaagaaaactcagcaaatatatcttaaatgcctattatgtggaaagcaccaaactgtgtttcttataaagataagaaatatgatcagcacagtggctcacacctgtaatcccagcattttgggcatctaaggtgggaggatcacttgaacccaggagtttaagagcagcctaagcaatatggtgagacccctgtctctacaaaaaatagaaacattagccgagtgtggtggcacttgcctgtagtcccagctacttgggaggctgaggcagaagactgattgagcctgggagttggaggctgcagtgagccatgatcacgccactgcactccagcctgggcaacagtgagactctgtctcaaaaaaagaggaaaggagaggaaaggagaggagaggagaggggagacggcggcggggggggggggggagggcaggggaggggaagggaggagaggagaggagggaaatcctgatcttgtaggaaatatacatacacacatacacattctgatctggattttatcttctagtataggcaggaccagttacataatttatgggacccagtacaaaatggaaattcaagcttcttatttaaaaaattatttaaaacatcaagatggccaggcgcggtggctcactcctgtactcccagcactttgggaggctgaggcgggcggatcacttgaggccaggagttcgagaccagactggccaacatggtaaaaccctgtctctactaaaaatacaaaacattagccaggcatggtggtgggcgcctgtaatcccagctactagggaggctgaggcaggagaatcgcttgaacccgggaggcagaggttgcagtgagccgagatcgcacctctgcactccagcctgggcaacagagcaagactccgtctcaaaaacaaacaaaaaatcaagatagtgacattagagcattaaaccaatcatggaacccttctaagtacagggctctgtacaactgcatgcatgagtcatatgcctgtgaagctggccctgagtacagggctcagcaaactatggcctactggccaaatccaggccgcccctgtttttgtgcacctataagctaagaacaattttgacatttcttttcttttctttttgagacagggtcttgctctgtcaccagagctggagtgtagtggcatgatcatagctcactgtaacttcaaactcgacttgggcttaagccatcctcccacctcagcctcccaagtagctgggacaacaggcatgtgccaccacacctggctaattttaaattatttttgtagaaacaaggtcttacttgttactatgttgcccaggctggtctccagctcttgaggttcaagtgatcctcccacctcagcctcccaaagcgctgggattacaggcgtgagccaccacacttagccgattttcacatttttaaatggctaaaagaaaaaaaaaaaaaaagaacatttcgtgacacgttaaaattacttgaaattcaaattttagtgtccataaataaagttttattagaatacagtcaggtctattctttatgtattatctatggctgcttttgtcccacaactgtagagttgagtggttgcaacagagaccatctgtctggcccacaaagtctaaaatatttactctctggcccttgacagaaaaagtttgcaaatccctattcacaggaaggtcaaacacaagtgacaaagaaaagcagcaataaaatgtttcagggattctaaagagaagagaatacataaggttagaagtatcagaaaagaagctctttttttttttttttttttttgagacggagtctcactctgtagcccaggctggggtgcagtggtgcgatctctgctcactgtaacctccgcctcccgggtcccagttcaagcagttcttctccctcaacctcccgagtagctgggattacaggcatgtgccaccatgcccagctaatttttgtatttttagtagagatggggtttcaccatgttggccagcctggtcttgaactcctggcctcaagtgatccgcccgcctctgccttccaaagtgctgggattataggctaccgcgcctggccaagaagctcattcttaagagaaagtagataaaccttgaataatgggcaaggtatttgcagaatgagatggaatgggaaggggcattccaggcagaggaaatcattcacctatgcacaacagagagatggggaagcaaattatgtgggccagatgaaaagtccactgtccattctgactataaatcagttttgagtgaaaggaaaaagtgagacacaggattttaattttattttggtagagtggggagtaattgaaggctctttgaggaagggagtgacttgcttggtatgctttaagataatcatctggcaacaatgtatagaatggatcacagcaggaacagactggaggccaccaggctgcaaaggtccaggggatgagttctgccaaactaaatttggcaactaaaaactaagtatggtcttagttgaaatggaaaagaggaaacacaatgaaagaccttgtcgaattactatctaatagatatgccaattgatggattattcaagaagagcagagagctaagtatcaggcttgaagattgggtaatttaaaagatggtgatacaattcacaaaggaagaggaaaagaaactggtttggttacaaagacgatgagttcagtttgcacacatgaccagtgcaaattgccagtggaatatcctggagaagaagtcaaggaaataaataggaaagaggctcaaactgaaaagtgagttcagtgttaagagatgcagattatggtattctctgcatagtgataacagtttaatacaaataacaatgatttccagtctaataagagaaactgtgtttttaattaaatagattattttacacgttctctcaaactctaaaaattctagcttcaattttctaaaaccaatttctttctggaaaaaaaaaatcaattgcccaaaggacaaagagtttttctaaaaaaagaaagaaagaaaaagcacagtgttcccaggtaacacttctgtgagctcaaagtttcagactttcagttatcaaatttttatgcaataactgaaaagttagtaaagtcaaatttatttgtaattcactcattcattgagaagttacagtaattccaacggactgctctgaaatttgcctttgaaacttttatttaaaaaggttttctaaagaatggatgttaagtgttctcataaaaaaatgctaactcaaggccaggcgcggtggctcacgcatgtaatcccagcacttcgggaggcccaggcgggcggatcacctgaggtcgggagttccagaccagcctgaccaacatggagaaaccccgtctctactaaaaatacaaaattagccgggcgtggtggcgcatgcctgtaatcccagctagtcgggaggctgaggcaggagaatcgcttgaacccgagggtgggaggtgggggcggaggttgcagtgagccgagatcacgccattgccttccagcctgggcaacaagagcgaaactctgtctcaaaaaagaaaaaaaaaatgctaactcagccggcgcggtgagtcacgcctgtaatcccagcactttggggggcccaggcgagcgcatcacctgaggtcaggaattcgagaccagcctggccaacatggcgaaatcccctttctactaaaaattagctgggcgtggtggcacgcgcccgtcatcccagctactcgggaggctgagacaggagaatctcttgaacctgagaagcagaaattccagtgagccaagatcatgccactgcactctagcctgggtgacagagcaagactctcaaaaaaaaaggtaactctgtgaggtaatgtaacaatgtatacattacttcaaacgatcatgttgtatacacaataaatgcagacaataaacaatttttaaaaagatatttttctaaggaaatagaaattatcgaaataggtaatctactcaattaacctaaattgtaaaacattataaaacacagagaactgttataattcattctcatctattcatttaacttaggttagcttagttttcaatcactacatattcttaaacggagtgaaattagtcacattccatttatcttccaaatttatcaacgtttattaagatttatttcaagaataatttgtacagggcctaattaaattatgaaccaagaaagttagtcttaaatgacccctcaatccccacttttccctgcactttgctctcttaatctcctcgcccatcaaaactgcttcaagaaaaagttctgataaatttcttgtactaagggtaagtaagaatggtaaattcccgtgttaagttcccgccctttttggaacgaggcattttggaacagaaagtgttttctggtgccctgaagtcacacgataaacctacttgcctatgggtaatcctgtgaagtgaataaagcgtccaggacatgcatttaaatacgcaatttattttagttatataaatggcgttggtttaggtgcagggtacaaacttatttagaaatcatcgatttgttaactgcgtttggcatgggaatttggaaagagttcgcccgggttaagacaccaatggataaaacacttgtcaatccaggagaaaaggcatctcaagaatggaaagacttgctggcccaggctccctcggggagctctaggtgtagaaaatgcgcgctctccgttacttctcggttactttgcccagcacaaaggacgacgcgaataccaacagactggacgagtcggtgactacagtttgcattaagaggcggcgccttttgggtttcggagggttccactggaacccacgagggtcaggaacaccgacgcgcggattccgcccaccagacagcctggggaagcgagcctgaaggcgcggcgcagctagagagaagaacctcggcagacatgccgcccagaggcagctaaggggcccgtgggcagggcctgcgctccggctgcgatgcaggccggctagaggccggcgccgaggacccggcgcgcggcggccccgccccctcggctcccctcgccccgccccctaggcccgccccttcccgggccgcgcacccgcgcgccccgcccgcgggcggaagctggagcgaggctgaacgcctgacgtcaaggcgacatcgccaaacctcgcccagattcaggcgtgtaaaccagccggagcggcgcggcagcggcaggaccgccgtggcgcctagagtagcgacccggggggagcgcggggcgacgctggctgcagggacccggtgacagcgtgagaggttcgcagagtgagtgcgtggccgctgagggaagccgcggcggcggccgcgcgtggccgggcgccggctgaggggagcgggtggggtgcggcgaggcgcgggccgggcgcggcggtcaggggccccggcggcggcagcccctcgrcgcgcggcaggtggcgcgagggccaggcgccgggcccgcgagcgcgctgccttgcgggccggcgaggaggagcagccgccgccgccgcgggagaacagcgcgctttgcggaaggggtcaaatgtctgaaatatggcggaggaagtgagagcccgaggacccccccacccgcccgctctcttcagcccgcgtccgccgcagcttctcccgccgccctcctttccccgccggctcccccgaagactcgctccccgccccgagccccctcgcttgtcgcctgggttccctccgtggtatgggtggaagttagaacggaaaccagaaagttgtcctttgcgaagacctagcttctcccagccccgagctagggcgaggagccttcgggggaaaccactcccaggcgccccgcgggcttgagcctgacagcgaaaaagtttgcctgaaacggggcttgcttgctccatttgttgcgggaagtggcaggaggaaggcagcggagagagccccacytagtctggcagcagccaccgtgtagagaaaaactgttaaaggggcctttcccttcgtcagcaagaggaaatctctttctcttagagggagagaaaatccaggaagtttgtcctcttctctttttcgccatctcgaggtgtctaatcctaaaactatcagcgccatgaattttatttaaaactacgcccagtgaaccgggctctccggatttttcttctgaaaaacactgatgtcttttggagaaaagatcatttttgcaagttaaagcagatggtttccttccccttcgctttcccccctctcccactctctttaatagtttagaaaaacattttggccctgtaacttctgattggtatgaatagaagcagttctgtgttgcagtaaggggaaatcacatttttacggggtagaaagttgacactaaatgaagattgtgattttagtattttaaaattaattccgtctaattggattttggttttgcaggcagcatctcatatatgtcgagtacttaacaatttaaagctctgacttgtaaatttatttttcagctctcttttttygtaattagaatactgtttggacttgctcaacaagaccttatcttaacaaaaagtaacttatagaaaagggagacattcatttaacttcaagcccatattattcttaaaagctgactcttgaaatagtatttattgagtcatagtggagtcatgggactttttaagggccggaagggactatttagatcatccagtcccaccctgtcattttatggaggaggaaactgaggcctagataagataaccagttagtgggtccactgacctttaggacagtagtctatccgtaagagacaacatggagaaagaaatacaacgtttttatagtgaattatcatcttacaaagaatattcttcccatatcgcacttttaaaaagtgggtaccttagtcaaataggagaaaaaaccacttgagtagtttcatcctcaggttttaggtgaggaaactgatactcagattaaataactttaagcacacagagcctgaatgatagtcttatttgagctcatctgtgcttttaatgtgtactacgttaggtgttttcacttgcatttcctttagtcttatttgagctcatctgtgcttttaatgtgtactacgttaggtgttttcacttgcatttccttgtttgacgttgacaataaatcgtgaagctgccttatctaaggaagtcctaaagtaaatcattggaacacatgtagccagtttgttgtttttaatatgccaggtatcaaaatataactgaagaaccaatgctaaactgacttaattttaaaatgttgtatggggcatgaaaatgattgctctggctgggcgtggtggtttacgcctgtaatcccagcactttgggaggccgagccgaggaaggcggatcatttgaggtgaagagttcgagaacagcctgggcaacatggtgaaaccccgtctttactaaaaatacaaaacatagccgggtgtagtggcacgcgcctgcaatcccagctattcgggaggctgaggcacgagaatatgaacctgggaggttcacattgaatgaaccagcttgaacctgggaggcggagggtgcagtgagccgagactgcactactgtactgcagcctgggtgacagagctagacctgtcttaaaaaaaaaaaaaaaaaaaggagataagaaaatgattgctctgctctcttttacattctcccctcacccacgaccgcgtgaaagtcatctctcttaccttctatgacacgcattacttcctgcctcctgttaccattttatattatttattccattgaattgtgaactccaaccacaagatatatattgttttgtatgccttaacgcactggcatggtgccttgcaatagacattcaacaccagttaaatgtaagtaccatgagggtagggacttaatccatttcattcttcacagtaatcttcctagcgcgttgcctgggcacagtgtagcgcgttgcctgggcacagtgtaatggttagcgtttgaatttagggattaatggtaatgaacattcaaagagaggatatttgaagagaacagtgtaatcctttaaaaagaaacatttacatattggctttggaatcccttttacttgacaaattaattttcgttttatcctcaatccttttcagaattccaatattttctcttagctgtataaaggtaaagtgaccccctcccataataaagagctaccatgtaaggagggtatagcaaagaattaattattaaaataactagatccatttttgtaaggatcctttcaattgtatcttcctatctaattcaagattggtggaaggtctatgcaaagattgataacatggtaactgattagacatgttattttaaatgcagtccaagatttggatgaaaagctcacgttcaggttttttttgccttttgttgtaggtactcgataaatatttattgaggtagtgaaactaatctgaaattggatctgatacagagaatttgaccgattttacaaggtgtccatttactttttccccataagtattgtttaaataggctgttttattatcgactatcacacagatcttactgatttgcctcatttccttaaagatgtaaaataactgtgtttctctgtatgtttgtgttgctaaagaggaggttgggtattgatctgcagtttctagatttgactggcactaggagtaatttagcatttatgaattagctatttactgctgttttatagcagtgatgtcacgtgttcactctatagaaaagttaggtaaagattggtctgtcttaaactttctgagacataggttgtgactaaaaatatgccctgggttttcttccccctcctgtcattattgaggactccatggtctaagagattaggctgaagtttttgttagccttttcaaattgaattgaattttagaacaagttaagacattttggctgatgcagtgattcattgtaacattggacaaaatttttagttcagccatctgtaaacaggagtactgtaccatggctctggaagctagtgtttttctgtgttcatagattattttgcaatggtattgaaaggtastaattgccatttgaggtcttaagttctttgtaaatctcataagcacagtggaagcagtagctacaaagaatagatgaatttatccatttgcagtaaaaactgatttgtatgtaatctgttgtactttgaacccagttgagcactggattctaaaacaagtctctttggtcgtggagagtttctattttaaacaagaaaagttatcaggaacttttgtgctgccttaaaaacatcactttttaaaattcaccagcaacaaaaaatagtatcacttacattccgtatttcataacattggactatttattcctaatgttggtcaaatcaagggtacagtagcaactgattatttaagcagtaatttagaaagattttttttcctttgaatcagtagagggtcaaaatttttaaaactttccaaagaaccttaaaacaggaaaaaatgaaaatgtgggggaaatgtaccagttttttttaatttaaattccctaaaataaaaatatttacaacatgagttacagaatttccatctgatttttattgtacaggaggagtatattctgtgatatcagtatacaattcaaaatacaaaaaattacctgggcgtagtgggaggtgcctgtaatccgagctgcttgggagactgaggcaggagaatcgcttgaacctgggaggcggaggttgcagtgagccaagatcgctccactgcactccaacctgggcgacagagtgagactgtcaaaaaaaaaaaaattacttagattgtgtatgaggtgcctgcatactagaaatgttcttttgagttacaaatctgtctctctgaccatagagagtaattatttaatcttgtgagtttgagttttatatcaaaccatttcctaaagcttacttgtaattacttttactttatgtttttgtagttatacatgtgtatatatatacacatacatacacacacacatatacatatatcagtgagaccttttaaattttagctgaattctggtttcataacttgtgattttttttccggtactgggggattgaatgtttttaactgttgtgcagatagactgaataaaggaagtgagcatccattaaaaactctagtaaataatttggatttttttttttttgagatggagtcccactctgtcgcccaggctggagtgcagtggcacggtctccgctcactgcaagctccgcctccagggttcacgccattcacctgcctcagcctcccgagtagctgagactacaggcgcccgccaccacacctggctaattttttgtgttttagtagagacggggtttcactgtgttagccaggatggtctggatctcctgacctcgagatccacctgcctcggcctcccaaagtgctgggattacaggcgtgagccactgtgcccggcctttgtttttttgttgttgttgttttgttttttgttttttttgagacagagtctcgctctgtcagtcaggctggagtgcagtggcacgatctcagttcaccacagcctccgcctccaggggtcaagcagtcctccagtctaagcctcccgagtagctgggaatactgtgcctggctaattttttttttttttttttttttttttgagacggagtctctctctgtcccccaggctggagtgcagtggtgcaatctcagctcactgcaacctccgcctccaggttcaagcagatctcctgccttagctagtactacaggcgcacaccaccgcacccagctaagttttgtatttttagtagagaggggatttcaccatattggtcaggctggtctcgaattcctgacctcaggtgatccacctggcttggcctcccaaagtgctgggattacaggcatgagccaccgcgcccggccaggttttgtattttttgtagagacgtttcgccatgttgcccaagctcacctcaaactcgtgggctcaagggatctgcccatcttggcctcccaagtgctgggattataggcatgagccactgtgcctggcccagcatttcactaagtaactttattttaaaaatatacagtgaactgattgccgaagtggtggattgcctctacctgtttcctttttctttgccttgtaggaagggaaaaagatgaaaggaaacatgttttgtctatttagtagcaatttttggtgaaagcttctggaaaggaaatggaaaatgctgggtaaaatgaaattataattatctgtgtattctaaaatttatcctcacattagaatatatttttcaaagttactttatactaaattcagggactttctaagttctcagttaatagaactgaaagggtatcaataaaataaggactatatatataatctatttttacttagtttttatgcgccaaaaggtatgtatgttgcatccagctgtttgttaccttgtgttttaaagttgcagttagaatgtggaatcctattactacattgtgccaacatatttgtggctgatgcttctaagttatccacaagcttctcaatacaatagcaaaatgcaggaattcctctggaatcttgaattgagggataggatgagatatataacatatgttatctgttgttttctcctactgctcttgaaattaacaaacttgagatagtgtactgatttgtatttataagattggctgagttcaaatatgtctttttgacgttcttaccaatgtttaaaatatagaaaagtataaagaagaaaatgagtatcatccgtaatgccatcactacaatgacttttttaaagcaaaatgtgtactttccttctgaagctttccaacctccttgcctcctcagtgagaatgatgacatactgttgttagagttgttgaggatcaaatgcagtattactcatgaatgtttcataaaccataaaataatacagtaatgtactatttttttttttgacagcctcactctgtcacccaggctggagtgcagtggcacaaacttggctcactgcagcttcaacctcccagattcaagccattctccagcctcagctccccaagtagctgggcctacaggcgcatgccaccatgcccagctaatttttgtattttttgtagagacggggtctcaccatgttgcccatgctggtctgaactcctgagctcaagtaatctgcccgcctccacctcccaaactgctaggattacaggcatgagccaccatacccagctgtattagttcttgttctataaagctttttttttttttttttttttttttgaggtggagtctgtcgcccaggctagaatgcagtggcacaatcttcgctcagtgcaacctctgctcccaggttcaagcaattcacctgcctcagcctctcgagtagctgggattacaggcatgcgccaccacgcctggctaattttttttgtatttttcttagagacggggcttcaccatattggccaggctggtctcgaactcctcaccttgtgatctgcccgcctcggcctcccaaagtgctgggattgcaggcgtgagccaccttgcctggccctataaagcttttattctcctatggcattgcttaagaatcccattaaagtatgaataaggactaataaataattgtgagttttgattagtgtaacaaatgaattacctagatcagtattttcaaggtatggtccaaggaatcctggaggtcccctagacatttttggcgagtctacaagtgcaaaactatttttataatactgagacattctttgccgttttctttgtagtgacatttgtacctgtagtataaaaacagtggtggataaaacttctggcgctttagaataaaccaggttagagtacttcactgtcctagtaatcattgtattattcactgccatgcactcagatttttttttaagtttcacctaaatgctcttgatgaagaagtaaaaaaattttaaactaaatctctacctttgtacacatctttaatatactgtaacaaaatgggaagtatgcttaaaacactggcgaggccatggacagcaagcctcccagcactttgggaggctaagtccagcttgggcaatgtagtgagagcctgtctctcctattaaaaaaaaaaaagttagtgtggtcatgcacatctacagctactctggaggctgaggtggaaggatctcttgagcccaggagttggaggctgcagttagctgtgatcgtgccactgcgcttcaacctgggtgacagagcaagaccctgtctcgaaaaacaaaacaaaaacacttggcagcatactgaaatataatggttgtttctagggaaagtatttgtgtgattgagtcacacgctgaatcaatcttcatataatgccatttttgcttaaaagaatgccagacttgggcattaggctgacattttcttgaaaacagtgaggctttgctttagggaaaatagtggtagtatttatggtcgatgataaagttcctagattttaagcaaaaattttagaaagcttgtatcagctrctgtaagtatataatgaaatctgtcattatttgattatctgcataactgagtcagtatttccaaatgatcaatgcatagtattataaaaatcatacatgggtaagaaatctttacaaagtgtcagctagaccaatggattttaatgttatagagaacataaaagtttatcaataaggtatcctgttccatattgcaaccaattgctgagctttggtgtagtgtcaaagaccagtatccagatttatctgaaaatgctattaaaatattcccaactgtctaatgtattttgtattacttatttttccatgctttgctctcagtgtttaatgtcttctttgatttattttgtttatatttttgttggaaacaggaatgggagccatagataaatgtgaagcaatgttttcatgtgctttatcttaaaatctcctattaatatataatcagtttaacttctttgtagtcttctctgtgcattccattcaacttttggtcttggtaatggattagataatagttatttttaagcctatttttggttttaatatttgttttgtatacctgactgctcatctatagacagaattcccttgtgtccaaagtctaacataatccttaagtagatttttagtagttgactttctcagttttaaaatatttgataacttttccatagtaaagctgtaagtttcaagtttagtaatgtctttttgacctgagaatttggtgtgttgtcttaccttaagtagacacttttcaaaaacacacctgtagaatgatcctttttttacctttcaggagaatgctgtttcttggtggtggtggtttttttatttttttatttttttttatttttatttttattttttttaagactgagtctctctattgtcacccaggatggactgtggaatgcaatggtgcaatctcagctcattgtaacctcctcctcccaggttcaagcgattctcttgcctcagcctcccaagtagctgggattgcaggcaccaccaccatgcctggctaatttttgtagttttagtagagacagggtttcaccatattggccaggctggtcccgaactcctgacctcaggtgatccgcccacctcggcctcccaaagtgctgggtagagccactctgtggccttcttttttatgttaatttaaaaacatttgtagcaatccttgttaaactgtttttataaactcatgggataagtccaaattttattttccttttcttttttttttttttgagacaaggtctcactgtcatctaggcttgagtgcagtgtcacaaccacgactcactgaagtctcgacctcccgggctcagttgatgcatctcagcgtcccaagtagctgggactacaggcgcatgccaccacacccaactaacttttgtagagacagggttttgccatgttgcccaggctggtgtcaaactccttggcctaatcggttcttccacctcagtcctccaaagtgctgggattacaggagtgagccaccgcaccggtctggttccacattttaaaggatttttagactgtgtttggatcgagtaatcagtttcagattaggagagtgttaagaaagatagttaagttacagtttgtattgtgcacagtttcttggaaatttagtgccagttatttccctagagagattaaaatggagagaaaagataattcagtctgaacaccagtgttgcaaagaacaaagttgacaccagaggaagaaaaaggtttagggaaggaatacatgtgaaaatgctaacttcagggtagcttcagggattaagcattatagaactcctgcctgcatgtgctaatcccatagagagcaagggaatttaacaggaagctttagtgctccctatattaaataattaactggtctgctgttctagcaattctgaattagggaacatactgagatcgtattttatgtccaggacatccaaattagtcacaaggttgtcactgactattatttatagagttttagttgctagttgaaaatattgcattaaatccttctattttagcttgtttatacttgtgtttttttcttccaggagctctcaacttaatcatccttcagcaaaaaagaattaagactaggtttgcaagcttttaaggacagaaaaagcatttataacatttctctgtttagatgaaagtgatgatggttaatgatggtgataataggcaatgaagaggtgaaagggcaggaagtagagcagaaaagagagtgaggatggtgattaagaggttcttgttaagtgcaggactactgttaaaagcaattcacttcacagttctggtcaacaggaatgataaactcaacattgaaaaacacttgtgatgctttagtggttgatacatcttacccatcagaaggtcctatgtagaggataaactggcattatatttgagttagagattatagtcttaaaatttcatcactaagcagtttgactggagagcctttgactagttctgcttcccagcagtcccttgtgtacttttctctggaccttcaggtactcaaattagacctttatttcattgtcctcatatgtttttttagctcattccattgggtgtgaaatcaaatctgagaactcaggtatttgttttaagtagttagaccttttattgtactctgttgtcttaaaaagcatggtttagtggtggtaacattgacctaggtgacaggcttcagtttagtttctggcactggtcatgaaactttgaacaagttaactcctctcttaggaccttatctttatgtagagaaagttggactaaatggctgttaaggtcttttcgggctttcaaatgctgtgtttctgtaataccacccttgtttaagccacagtcatctcttgtctggactcacaggagcttcctaacttgttttcatttttgtccttccccacattattttctacccagaatacaaagtgacctttttaaaaatgtaaatcagatcatgtaataccctccggtcccaatttacccttaagaaccagttccttatcaaggcctagaaggtactgcataatccagttcttgcttacttcacaactttatccccattactcactaagctctagccagctgtacttctttctgtgacaatcttttgccagccctctgcaattctgcctcagtctcaacagtggatctcagttcagatgtcacatttacagagttttttcctgatcaccttatataaaggagcattcctcttcattacctctgtagttcttaatcataatcaataattatatttatccatttgtttgcctctcatcccctctaaactgtttcaggacaggaagatcatgttacttttccaccactatctcaaatggttagcccaataactgcctagtgctcaagagaattattttagttagaaaaatacataaagtatgtaacggtttgtccatatcaattcccataataagctactccttaaactggtttttttcttcactcttttggtagtggcctggtctcataatcttgcccaggctagtctggaactactgggctcaaggatcttcctgcctcagactcccaaagtgctgggatttacaggcgtgagccaccacacccagccttaaactaatttttaaagttttatatctatgtccaactataattcctcattttttatttaggtcatctgtctcttgaggactatttgatctgattgcatgttattgaaagctaattgttcttagttactatatgttaggattaaattgagtaattttgcacaaaaggtttttagcaaagacatgaaaagttaaccagkataaaactgttagcagttcagaatatccaaatgagtgatataaatgagtgcttattagagtcaaaggaagaagtgaaacccttaggatctagtagttagaaaagacagtaaaaataaggtagaatctgcatattaaaggagttttagattaacagtgaattacagtgagcagtactacagaactacagaaattgaagtaaattcaagagtgttttgccctggtagatgtttgtaaaattgattatagggccataatcccttatctatatataacctttggtgccaggtatttttggatttcagaattttgaggaaagatttgttttagattttggtaagagtaatcaaacacaatattaatgtggaacatggatagtcacattaagtgagagaaataaaagataaaaatagtctcccatcagtgctcagrtgaagttttgccattatatattaggattaagctttgccaccaacatagttatagaactttgagttttcagagattttaggatttcagaatttctataagaagtcggtttcaggctgggtgtagtggctcacgcctgtaatcccagcactttggaaggccaaggtgggtggatcacgaggtcaggagatcgagaccatcctggctaacacggtgaaacccatctctactaaaaatacaaaaacttagccgggcatggtggcgcacgccagtagtcccagctactcaggaggctgaggcgggagaatcgcttgaacccaggaggcggaggttgcagtgagccgagatcgcgccatggcattccagcctgggcgacagagtgagactctatctcagggaaaaaaaaaaaaaaagagagagagaagaaattggtttcaaatgagttaaaaaggctttattcattactgtttggagaagataccagggtctgaaaatgttactttgaagcaattagctttagaaaccctctttgccaaggaattgtttgaccctgactcaggatggaatgcagtgctgagggtgatgagtctttagggtatgggagaatcacctcattctataattgcagagtccagttaaatttggaaatagttaagattggtgcctaacaaacactaacatttttttaaatgtttaaatattgagagctcataactacagtttcatcttggtgatttttttagtcttataaggtattaggcagtttgtttcctaataatgtttttaagaattatttgatacatttaattgtaagaatacaatagattagaataggaatattataaataggactaatgtaatcctcatttaaaaatcctcagaccagacacggtggctcacgtctgtaatcccagcactttgggaggccaaggcaggcagagcactttgggaggccagggcgggcggatcacttgaggccagaagttcgagaccagtctggccaacatggtgaaaccccatctttactaaaaatatgaaaattagccaggcatggtggtgtgttcctgtagtcccagctactcgggaggctgagcaggagaatcgctggaacctggcaggcagaacttgcagtgagctgagatcgtgccactgcactccagcctaggcgacagagtgagactccgtctcaaacaacaacaacaacaaaagctcctcgatggaaccatttgatagtgacaaggattgaagtaagtatctgaagaggctacttagaaactcagaattggttacaggaagtgactgcccactttccatgtgttcttcagatgctctggttattctaacagcctagttaaccacccagactttggttctcattgcctttatccatttgtttggtgtatatactaatgttcamcgatgcacacataatgcatgtgatgttttttggataccgtcttatcacttgtagaattgccatgataggcattttttggagctactttaagtacttgctggcctagtaattatgcaagtaagtaattaagtgtttattcatatgtgaaagcccaatgtaagcattatttatgtctttcagtgaagtgtggtgtgcctttcatttttctgagtggtctttattttatggaatattaaatggatctttgaataaactcaagagggtagattataaaaggaagaactgttaaattagtcaaaaacaactttataacacaattagctgcataagccagtgcgtgcgtaagcaggtagtataaatgcttaggttgagatactaaaattattattagagaaaattacaggaagtacctatgctcccactatgttttgttacttggttaatttttctcctctgaacttctggcaggtttactggggaattttccattaggaatattctggtccttaagtttcattttgaatgtataatataatcatgcagattacgaacccacaatctaaaatcaaggcattcttttttaaagtttcagatgaggctgggtgtggggctcatgcctgtaatcccaacactttgggaggccgaggcgggtggatcatgaggtcgagagatcgataccatcctggccagcatggtgaaacctccccgtctctactaaaaatacaaaaattagccgagcgtggtggcgcgcacctgtagtcctagctactcgggaggctgaggcaagagaattgcttgaatccaggaggcagatgttgcagtgagccaagatcgtgccgctgcactccagtctggcgatagagcgagactctgtctcaaaaaaaaaaaaaaagtttcaggtgtattcaggagtggtcatattaagcttgtcacctgatcctggttatgaggttaacagcaaaatgaaataaaatatttttctgagccatttgtttctcctctcatggaagacactaattctgtttatttctatattcggccttgtgttgaaacagactgtaaaatcatgttttaaaaaagcttcacccatccttgtggagggtggtggtttgcaaaagcaccaccccacttaagcatttatattgagaagatatttatggcattcttccattcatgaaaatgggtatgctttgttctggagttcttaccttgatttatctactaacactaaagttcctcacttccaatttcttatacctctaacccaacagcttataaactgcatgtagtatagtatttgcttgaaatatgtgaaagtagttattttccctaactaatagggatatttctgtggtggttgtagttactttgcaacctgttcagcaaatattatagggcgtttttgatggtatctttaaattttggacatagagaaccatcttggataacctctttccccccagtctcagtcatccctttggaggtagtgtctcatttttaatctgtgacttgtggaagttaaggcatttgagtagcttatttaaagtattaataatctgatttctggagatctgaggaatagcagacacccttttctgtattaaattggggaaatttattttataggcaaaaagatgaataaaatggtcctagtagacagcccctaatatttctggtctcgggtaaaggtcttaaggaagagggaaggtagtatcagaattttccagggtgttttttttttgttgtttgtttgtttgtttgttttgggtggacaggaagtagaatttattggtgagtattaagagggggcagcacagtggaagccctcatgagtgcagggcccgccacttgtccacagggccacgattggaaatgtacttgacccgacagccatctgggatgagccgcttctcagtcaccatgtcttcaaactcattggcattgaacttggtgaagccccacttctttgagatgtggatcttctggcggccagaaaacttgaacttggccctgcgcagggcctcaatcacatgctccttgttctgcagcttggtgtgaatggagatgataacttggccagtgtgaaccctggccacagtgccctggggcttcccaaaggcacctcgcatgcctgtttggaacctacactggggtagtgcaaggtcagaaacatgaacatccatctgaaaggactgtctccagggtcccttagagcaacccatacaatacaacacacaggctgcatacactaccaaggaagctgctgtttgcagccattgcacactgggcccccccatgaggaaaggaactcagttggcttaataggctgcagcagggtgttttttaaaacacacaaatatacccaatccctactagaatgagagattttactaataatagtgttaggagtataaatggtttggtagccaaccactactttaaaattgattaggtctcccgggcttctgggccttcacatttaaatttgacctgaccttgaaacttcacctctcgttattcccagcgtgacttttgttttacccacttttcgaaataccccatgtgtagctccttacttcacgtcatgctggaatgtgacccataccagccaaactacatctaacagaaacataatacctaactaaaagcgtcttttatcatatagatagatgtacagggtatgttaatttatctttagagagactccccagtatactgaaaaaacagacctaagttttggtagatagccttgctttatagaaaatgaaaatgggccagacagtggtgactcattcctgaaatcccaacactttgggaggccaaggcaggaggatcacttttgaggccaggagtttgagaccagcctgggcaacatagcaagaccctgtatctgcaaaaaatttaaaaaaaaaaatttaatcaggcatgcagcacacgcctatagtccagttactcaggatgttgaggtgggtagatcgcttgagcccaggagttgaggctgtagtgagctatgattgcacctctgcactctagcctgggtaacagaatgagaccctgtctcttaaaaagaaggaaatgaagatgccagatactagcttttccagcctcccttgcagctagggcacaagtacttgacctaggccccacaaaattacatgtactttaacttgagatggaagagatgataaatttctgatagatttctcttctcctcttggttgatgtacaccacaaatcagttttctgctgcagaaacaactgatacaaactgaagcatctactgttagtgatgtgacagcagtttcctcacctggccagttttgtaatacggtttcgggtgtttgtggctatgttagcttccaacttcattctctagttttccacagtaattttgtaagttgcttggtattttttaatgacttatttttatatgtaaatgtgatttgtataacttccaacaggaaaccttgtcsaatgcgtgattttagaaaatttagcaaaaacttttcaaagggatatttatgtgaagaaaatgagtggtatccttgtgagagaaaagtacaagaatgagactggggcaaactgcttttccagaaataaagaggccctgatggtgwcacttttggtagatccaagcttttcatgaatattgaagctctggatgccttgttcagtagtttcataagcaaaaatccaaaagtgtagaaagagttttaattgaaattaaataaaatcaaaattttagttttacagttacactaaccacattttaagtccttgatagtcatctgtggctagtggctactatactggacagtccagatagaacactatcattacaggaagctctattggacagcactagtctggattctaatcctaaatctacagtcttgtggttctgcaacctcaggtaagtaatctgaatcacaaatcctttatctctttttatttatttatttatcttctatctgkctgtctgtctgtctctgtctattttgagacaagtctcactctgttgcccaggctggagtgcagtggtgcagtcacaactcacctcagcctcctgagtagctagggccacaggcatgcaccaccatgcccaggtaattttttgtagagacaaggtttcacaatgtttcccagtctggtatcgaactcctgagctcaagccatctacctaccccagcctctcaaagtgctaggattacaggcgtgagcccttgtgcccagccaaatcctttatctaaagacagtaccttattttcattgttgctctgaagattgaaatttaatatatggaaggacatggtaagagctttaaaagcaccatacagacatgtcagtgttcagattagaaatatatttattggttaacaaaggatttttctaaaataatctgaagagaaacttcagaacctcagtggcatgaatactttgatgttagaccgtgtgtattttaaccacttgaagaatctaaatgcacaaaattaacagattagattttcattttaaatgtgaaatatattttacccaagctgtccttttcaattttatctataaatcttaaagtttttatatgtactgggggcttaccttcttgctgtaggttccctttatatatactgttttatcatcctcatgaatgatcttaaacaactcaatctgttaactaagtgaataatgtacctgtcacatagaggtattgaatgaatgttataaatatgatagctatctatgccagaaatcgttggttttggtagacagacttcagcattcagcacgatcattctcagtaattctttataggtgttttgatttgttttgagggggttgtttggcatatattttgcaactaattaattcatttttgtaaaaccatcagacaacagtgctagatgtttaaaatattctacagcagaaattttcaaatgtttttggaatcattaatacaaccctgtctctccttcacttaaaccacagtagccattggtaattgagaactagattctttccctttgagtcctagttgatctcaaaaatcattctcaacactgcacttagctacaggtagctgttaatattttgagttgatgactaagctgaaacccatttgccacctgtgagttaatgggcaaggtctatccttgtctcttccaggctctagcctatagtgcaagtgttggcaaactttttctgtaaaggacctgataactattttaagccttgttaaccatacagtctcttatcacaaccattcacctctgctattgtagcctgaagccagctgtggacaagacacaacaaatgaactatgttccattaaaactttatgagtgtgactgtgttccaacaaaattttatttaccaaaaaaaacaaaaacaaaaaaacagggagcaaatgggatttggcctgggagttctagttggccaacctcccctctagggcaagaaactggttttgattcattcaacaaataattaggtgtcttccatattccaggcactgtgttaagttttgattatatagcaataatcattacacgtaggccccaggtcatgaggtatttaacccttaactgagtatggttttggggctttttgcttttttggttttggggtcttttttgtttttgtttttttgtttttttcaaggcaggttctcactctgtcacccaggctagagtgaagtggcgctgtcacagctcactgcaacctcaacctccccaggctcaggtgatcctttcacctcccatcctcccgggtaggtggaactacaggcgcaggccaccacgcctggctaattttgtgtatttttttgtaggggtggggtttcgccttgttgcccaaggattacaggtgtcaaccaccgcatccagcctgaatttgttttttttttcatgtactttggcagattcgaagtacttttttgagggaaaaatggagtctgccccatacatctgctttatttgttaatacatgtgaggttgtaggcaaataccctaagtgctatgttctgtgatagtggtataactaaatgtaacttcaatgtgccttagatattagatgccatggtatcaaaattaatatcctgttataaaaaatagggaagcaaaaatgtttgcatatgatacctaccctggctgcacatagcagatacttaatatccatataatattgaataaagctgaaattaccagtttcttaactatccttatgtcactttcttgcagtttcttccatttggtatgctatttctgacctcattttttgtttttcgccaaaaaattaccacatattactcatattttaatgaaatgcttaccatgcctagatgtattgttcagccttctactgttagaacttctttcgttaatttaaaagtatctttagttttctcagtattcatgtttatcttcaaaatgtctattgttgttgcttattaaatgagtcagagctcttcactgatactcagagatctccttaatcttaactgaagattactgctatttttattttcctattcctttgtgccctgtgagccagtcagactgctttttccgctatagtctaattaatgttcccatgttatgctgccttttgtgcctttgctctcacttttcttatccctggtatgttctttcctgttgaaatattgtaacttttttttttgccaccctcttcataaatctgatctctccttctgaactcccatagtattttgtacatctcatgatatttttcatatttttatgtctccatcttttcctacaaaattgtaagctttttgagagcaggtatgttttgtccatctttcagaatatgaaataagaagcaaattcctgtcagaacatattccacctaaaatggccaaccattcttgttttcccaggatggagagtttcctcagacatgagactttccgtgcttaaacctggaccgttggtcactctgattccacttcatgatgtagccatcttttttgcatatcagtgctttactgcaggttttttttttctttttctttttaaagaataaacacataaaatgaacatgaaggaaacagttttttgggttttggatttgttttttttttkttttgtttgttttktttttccagactgtttggctgtcacccaggctggaatgcagccacggtctcagctcactgcaacctccgcctcccaggttcaattcttgggcctcagtctcctgagtagctgggactacaggtgtgtgtgaacatacccggctaacttttgtatttttattagagacagggttttgccatgttggccaggctggtctcaaactcctggcctcaagtgatcctcctgcctcagcctcccaatgtgttaggattacaggcatgagccactatgcccagccaaacaaaaattttttttaattaacaaagcaaaattacttgtgccttttaagcaaatgtttggaagattatactcatatgtagaaatgtaaagatcagattcagatgataaaaaaggccaaaatgtgggaaaattttgactaaagttgaaaaagaatgatgtccttttcacaagcagagggactcttcagtaggtttggtttatggttagtagacacagtttttttttagagtagaccctgtaaaagaatgtggagtaaatggtggcagtggtttgaccacaacagtggtgtctattgctagagaaattaaaaataagatataagatacttaactctcctttttacaaaaggcttcagataaagaggaaatgggagcaaatccagagattataggcactgtatgggctaatgatttttttagagatgatgcctcactatgttgtctaggctggtctggaactcctggccccaagcagtcctcccactcaagcaagactgaagtaactgggactatagatgtgagctatcatgcccagttggcaggcgatttttatatgttatggtttattgtacaatacaagctattcactgcgtgttttattgtgagaagctcactaagttagaaaggttttcagttttgtgcagtatttttttctgttcctatttctatttctcataagctgggaaaaacatcatcagagttcattgggtgacatcttacatctaaaaccttaaaactaagttgagatttattatcacaaaataaattcccccatacctccactgaaccccccaccacccatgacttgatgacttcaatcatactcatcccgttccccagagcgccctcactttccaagtgaactcccctattccctaatgatttatatatccactggtctggtttaagtatccacttaggaagccttgcctggtagttctttatagatagacaattgttctcttctctgcatccacagcaagcactttattctgtagaccctgcttcattgtgagctaacacagcgcaaacactgtgaacattttaatttataaaacagagtgtcttctgggctttaatatgtagttgtcacatttgcttttcctcagatttctgggccacataacctctgtcacagttaaaactaatatctcggctgggtgcggtggctcaagcctgtaatcccagcactttgggaggccgaggcaggcggctcttgaggtcaagagtttgagaccagcctggccaatgtggtgaaaccccgtctctactaaaaaatacaaaaattagccaggcatggtggcgtgtgctcgtagtcccagctactcaggaggttgaggcaggagaatcacttgaacttgggaggtggaggttgcagtgagctgagatcgtgccactgcactccagcctgggcaatacagtaagactctgtctcaaaaaaacaaaaaaacttaacatctctaatctggtcattgaaattgaggtgtaaagcaaattaatgttttctcgttgcctcttgtatcctcctcttcccgtgtaagaaataataaggcccagtataaggtagtggagtagagagaatggaattgattccagaaataccaaggtagaatgaatcagacttgataatggagtgaagagagaagaatccatgacaactcccaggtatacagctacctattaaaataatatgctattgaagtcctttaggtgtcttaagcactataaacacctagatagatataattttaaaaaatagcaaattaacatttactggctacttcctatgtgttactcattgtgctacacattttgcatagggtaagttatttcatttgaatctttaagaactgtaagaagtagatacttttatttccattttcaaatgaggaaatgagacacagtttaaaataacgagaccaaagccactcaagtagaactgattccaacccagacaatgggatctaaagcctatactgagtcagtatgcatccctgtagattttactgctagttcagatgacagggaaaaaaggacatttttttaagtcacatctagagaattgggagcagggaggagttctacacaaatacagcctatttggaaagatctgatagaaactaataaggtgatcttgagcctatattattatttttttttttacctgtttttgaattgttggtctctccttttttaaaaaatcacttaactattttgcttatctcttgactcggctgagaaatctattaaactggttcttctgcattygtcagattgttgataaattgttaccctctattctgtattctaccatacatgatcaaatactgaactgaaaaggtaactatagaaataaagctggaaaagctaaccttacgttgcatgtcaaattatatgttgttgaatatttcagggagaaagttggtgtgattaattgaaaaaacttgatttactagcagtattaatccatgaaaagggcaagggaatttttttctttcttgaggtattataaatatgatcagaatagagaaaatgctatacacagtttgataatctacaaattttgcactttctagatttagaaatcttgttcacaggagatctttcttggcagaatgagtaagattggaaacattttccatgtgtcctcattatgagagaggcagacaactcaaagtaaatatgataagcagtcttcattttagcagctttctatttattttatagttccttgttagaagttttatttttaaaagagggtaggagaggcagtgtttgggccccttattttttccttcaaaaagaatttttaaagtctgtcattgtgttaaacagattcataacaggtccttctgacagttgaattagttgattttatttgggaatgagaaaaggacacagttaccctctttagctgttaaagtattacttttggagttggagatggaaaggagaaatcaagtatcttctcttccagaaagtgcagtgggagaagtaatgttacctgacttcaggaaccagtatttaaggcctctttttttgagacagagtcactctgtcacccaggctggagtgcagtggtgcgatctcggctcactgcaacctccgcctcctgggtacaagcaattctcctgccttagcctccctaatagctgggattacaggcgcccgccacctcacccagccaatttttgtattttggtagagacggggtttcaccatattggccaggctggtctcgaactcctgacctcaagcaatccacccgcctcggcctcccaaagtgctgggattacaggcatgagccagcgtgcctggcctacttaggcctgtttttataatttagggtcacagaatttcaaactggggttagggggtgagtgtagtagttaaacaacttgagattggagaactgcttttgcaaaatttccattttggttatacccatgaagagattttttttttgttacgaagtcttgctctgtagcccaggcttgagtgcagtggcaaaatctctacttactgcaaattccgcctcctggattcaagcgattctcctgcctcagcttcctgagtatctgggactacaagcgcccgccaccacattcgagtattttttttttttgtatttttagtagagatggggcttcaccatattggccaggctggtcgcaaactcctgacctcaagtgatctgcccgccttggcctcccaaagtcctggtattacaggcatgagccatgacagtcagctattttttttggcatattttaagggacagaaattatgctttttaaatgttgcttattgcttttcaaggatttgattcttataagctacttcttcatttattaatgagatttaagaaagaaatcaggttacaaagttatgagcaattgtctctggaacccagaagttggttttaacactagagtttctgctgcagggcatttttactggactgtgattcctagaaggcaagtataagcactgtttttttgttgtttgtttgttttagaaacaagttcttgcgtcacccatgatagagtgcagtaatgcagtcatagctcactgtaacctccaattcgtgggcttaagtgatcctcctacctcattcttttgagcagctgggactctaggcatgtaccaccacacccagctactttataaattttttgtagaagtgtggttttgctgtgttgtccagaatagtcttgagcagtcttcccacctcagcctcccaaaatgctgggattgtacaggtaggtgtgagccaccatgcctatccctgctgtttttttttgagacggagtctctgttcaagcaattctcctgcctcagcctccggagtagctgggattacaggtgtgcaccatcatgcccagctaatttttgtatttttagtagcgatggggtttcaccatgttggccaggctcatctcgaactcctgacctcaggtgatccacccacctcagcctcccaatgtgctgagattccaggcatgagccaccacacccggcctgtccctactttttttaatgccaagatttgtgtatttcatcttcagttgggattcatggcatctgtcaataattgatgtgaacttaaatggcaatttacctataaaaagataacttactactcttcttttaaaagtctatatacttctgtcatttgctggaaatgaattattagtctttattcagcaaacatttatagaccaaatagtgggtaccaaaataagtactaccctgcagctgcttgatgatggtaataactaacatgtaaatctttaataaacagtgtacattcttaatctgtccatcaactcggtacagtcagtattgttgtccgtatttcacagattaagacaccagcctagaggccgagtgcagtggctcacgcctgtaatcccagcactttgggaggcccaggcgggtggatcaccttaggtcaggagtttaggataagcctggccatcatggtgaaaccccacctctactaaaaatataaaattagccaggtgtggtggcacgcacctgtaatcccagctgctcgggaggctgagagaggagaatcagttgaaccagggaggctgaggttgcagtgagctgagatcacacaccactgcactccagcctgggygacaagagtaaaactccatctcaaaaaaaaaaaaaaaaaaaaaaaaaaaaacaagatgccagcctagaaataaatgaccacccccctggtaaattacgtagctagttttggtctccttatttccagatttcatgttttatcaccctgagctccaaagatgatacagtatttacttttaagtgtataaggaaaaactgagtttgggcctcaaaccagccccaggatttctttatttaccaattatgaactagcctcactcagttcaggaagtctcttaaaatgtcagttatttggtttcatcttcttaaaatgtagaattgctttatgttatttaaatatgggtccttttttttaatgagttaatttgtttgcttttcaagataattttggattcaaagtttttaaggtaacctgggatgcaaattttgctaactggattaatacaaatttaagtttttaaaattccattgttcaactgtkttttatcctggataggattaaagcagtctttaaaggtaatctgttgttggctttaatgttttatagtacagtctgrtgacacttggctcactagtccacattttttgtatatttggtatatagattttttccttggtagtcacttgtttttaacttctttttatattttacttcccagtcttaatctctgtaaccaatttgtataatcccttatacagttagtctctttatttgtggtattatttgaagagaagtgtgtttcctgagagaggatgtcatgtccgtgccctaatttttagttacatggcttttatttgcataaatagcatgcgagaaggtaaaggaaaatgtggttgcatcttgtcctggttgagtgcccactagtcttaatggattttcccagttgtgcatactttaggagtaaggatgttgtcttacgtttattttcactcctttttaaaatgtgtattgtttttgaaagataatgactccaaaatatctataatatcaaacaaccattatgaagttagagaaataatatttagattatattaaattttattaccagtgcaatttatttttttatagtaattaaggaatctaacttttttttgttttttgagacagagtctcactctgtatgcctaagctggagtgcagtggcgcaatcttggctcactgcagcctcggccttccaggttcaaatgattctcctgcctcagcctcctgagcacctgggattacaggcatgcaccaccaarcccgactgatttttgtattttttagtatagacggggtttcaccatgttggccagctagtgtcgaattcctcacttcaagtgatctgcctgcctcggccccgcaaagtgctgggattacagacatgagtcaccacgcccaacctaagatgcttttaaaattccatttatgtttaattcttcaaagtctggtacatgtaacattattataacaaaacattttataattgaaagggactttagggatctagtcgagaagtcaaaaactgctggaccagggttcagagctcttatctctcaaattgattttgttggtttatacaatattcataatttttagaattcaaatgactttacccgtaaagcattcactccctacttgaccacagtctatgttattacctaataagaccttaactgcttcaagcgtttacatggttacctggctgatgtaagtcatctgagtgttcagtatttcccctttccctcattccatctttttgtagacaaggaatctggaaaccaagaattaagtgatttatctcaaaatrtacgactttttaaatagagcttcttaaattcaaagttaatgttactttctacagcttgttgtctccttagaaaatagtacaaggtaatacgtaatcaagtcctaaagtatttggtataacttgtcatgaaggagaatgatcactgtgggctgagttagtgcaagaatgcttcagagacatttccttgacactaacctcctaagaactgcatcttgagatatgctgccctgatctgtgttgtttttgctacacagctgaggaaaagaggtacatatcctcctctaaagagctggcacaggaactcaccaaagggcattttgtacatattgaaaaacagcacctcataagaccaactacatttagacttctccagaaatcccatttatgcccctttttgcagaggaaggggctggattgactcccaaatccaaatttaacttcagccacaaactaattagcatgtcaccccaccaaagatttttttttttttttgggagactgagtcctgctctgtgctaggctggagtgcagtggcacaatctcagctcactgtagcctctgcctcctgggttcaagcgattctcctgcctcagcctcctgagtagctgggattacaggcatgcaccaccacaaccggctaatttttgtatttttagtagagatggggtttcaccatgttggtcaggatggtctccatctcctgacctcgtgatccacccacctcagcctcccagagtgctgggattacaggcatgagccaccatgcccggcccaaagatgattttttaaatgctcaacaggacaaagcctaatggtagtcttttgttaaaaacaaaatttaatatcaatccattgacaggactctttgtgtactgagctatatagtaatttcaccttaatagaagttcttcataaccaccccatataaaaccatccattcttatctcttttttttttctccatactgcttatcacagctgacactttatactgactttgtttccccctctataccctttactccagattataaattctgaggacagggtctttctttcactgctttatattcccactgcctagaatagtgcctaacatatattaggtactcattatatatttattgatgtcaaatattgattgctgtattatagtagtgttaatggaaggtgtcatttcttagattttcttttctgaccagcacagttcttgggttgatggagtatgtcctcaataaatctcagcatcaaataaacaagaattttctttttaatacataaatttgtcattttgttacgctttttagtttcctcagtgattttttagaataattcttgttcataatttggatcagtaatatctacagttgaatcttaggaagaatgttataggcaatccagaatgttggataattaaatcagttatttgcattttgatgtgtaatatagtgaacacatttagacaaaaaamaagctaccccataagaccagtttttattttctttgattcatgtcttcaggattttctgttaactcagaattattatagcattcattattgttttgtgaaratactagttaataatctccggttaatgaaataattatcttagataaatttactgaacttaatgtagaatatgttttttgtttcgttttgtttttgagacagggtctcacttgtcacccaggctggagtgcagtggcacaaacatgggtcactgcagcctcgactcctgggctcgagtgatgctcccacctcagcctctcaagtagctgggactacaggtgtgtgccactacacttggctaattttcatattttttgtagagacggggtttcaccatgttgcccrggctggtcttgaactcctcctgagttaaagcagtctgcttgtctctgtctgccagagtgctggcattataggcatgagccaccacccccttcttccactttcatttcaaacagttatgaagcagccactgaaaccggactctcgacaatgccaaaggaggttttgttttcttgtctttccatgtctttgctgtggtttgctctgaaactagaattaaacagctttttaaattgataaaaaagaaccaatgcaaataaaactacggtctgtagagtaaatggaaaaagttgtagaagtaataataaactacttttaaacaaatgagtaaggtagtagatattttgcaagaagtaaatagccaagtgtaaaagctgtcagttactttcatcaatcaggttagttgcagtcacgcaaattttaggtgattatataaggaactcaaattaggaatctttaaatgtaaatgacctaatactaaaaactacccaaaaaatatattcaaagataaatagaagaaatacttatgcatttgaaaaaatcgatgcattccacagttcctctgaatcaaaggtaaaaaaaaaaaacagtgtagaaaatactttgaacagtagtggaatttttagtattttgatagctttctttagaaatttaattgattttcttcatctgtaatcttagattgtgttggagaggcagtgtgaatcatgcataaagtttataattgtgtatgtgcctacatgatgtagaaattgcaccttttggctgatgaagtatcgtatagttgcactgttgataacattaagttcatttcgcatatatgctacagtcttttctgtttaacgcgttgagtaaaatgaagatccaggagtccctcattagttggtataattggttaattcatagactaaagatgaatacaaatgtactacatttgcagattaactcatacataggcatattattgttaactagcaattcttaactgtacagatagtttcaaactgcatccagtttttacaaataaatgctcttgtttataaggaataccataaagagagcacatgtaaatgaagaaaatcttgtcacttatactggaaattcaagcgagaatgatattaaaaaaaaagttgttaaaggcaacacaagaagttaaatgaaactgagttagcaatgagagatattggctaatttactgtgcctaaaattatggtgctattggtctactgtataattattatttttaatgtccagaatgtgtaatacaagggccagaacttcctcctggactcaattttataaattctcgattagttggtgaggccaataaggatactttttctcgtctaatttggtttctgggaaagcttcgttcargtcctcagtggtcatctgatcaaatggaattaagttcttcatcttctccatctgtttctcatattctacaatcctggcctttgagagagacacccactcagcacaagatttcacatctttttcttcggcatccacctgcgcagtatatttatcctctggcacgggaaccttcagggcattaaacttcttaaagtcatccaccaaaccggccttggccacgttggccttgtagtaagmccagtcgataaccggtggattctcaggtaaagcagccaacctggaggtgagggtctcattccaggatttcaggaaactagcaatggccttttggttctggggtatgatctctgcaaaagctactcagtcagtggtttttagagcaagttttcgcccagccatyttgggattcttcaccgaccctggctgcccacggtscactgcagccgcctttaacttcttgaaggttgttcatcttaaaatttctttcagagtttttctgttgattatagtttttgtttttcttccaaaatctcttcactttaaatggtagtacatggcagtaataccttctaatagtcagaactcttaataatttataatatcaggtattctagtattacttcctatcctctttttgacttaatccttattttctactgatgtacaagtagttaaaaatgagcaagcttctcagaatgtaatcatttacttgtggcacaccagttaaagtactaacttaagtcctttgctaccatatttatcttttcattctagataaattttttgcttgctaattgtaaatattgcattgatataagataggtatttaaaatgtcagtatttacattgagtatttctttttctataaagcacttaaaatatatttaatgttgtaattttcagtagttaagcatctcttagtcctttttgagaagtgttttctgagaagtaattaagacttaaagaatagaattaaactttaattgattcttttatgcttacctgtttgtttctttaaaaaggtaccctcaccattagtttattaatccagtacttttccaacatcaatattttatagttactctatgagttgagtggctaaacttggtatttttgagttttctaaagtctacttcttaaaaatgccagtaattatcagcattcttataataatattggggtagttatagaacaacttcacaattcctctgttaacttcagtttttgtttcatttgttttataattttttctatttattaacaatagaactgtcaggaaaaaaaataagcaaaaggaaaagaaaattccctatccccccaccttgtcatgtattttttttcttttttttattccagggaattgaaattcattttctattataatctcaagattttttccgtactcttgaggtaatgtaataatgagattcctcctaggctgtcaaaattacagtctgcataacttgaggtacaatagatttcattaagacttctgtgattaatattagcggtcagagacaatgccaatattacaggatttttgtttagtaatgtgttttttaaatacttaaaagagggctatttcccagtcattatctctgaacatttttaaatgattcaaaatactgatgtatgcacaggtttttgcttttttatattgacatggagggttcttacatgtttttgagctagtagattaaagagtggaacagtgggccgggcacggtggctcacgcctgtaatcccagcactttgggaggccaaggcgggcggatcaggagattgagaccaatctggctaacgcggtgaaaccccgtctctactaaaaaaatacaaaaaattagctgggcgtgatggtgggcacctgtagtcccagctactcaggaggctgaggcaggagaatggcatgaacctgggaggcggaggttgcagtgagtcgagatggcgccactgcactccagcctgggtgacagagcaagactccatctcaaaaaaaaaagtcgagcagtgattctcaactgaaggaatagcagtcctctttagtgtactgagtggcagctcaaaccattgttactcttattttaaaagttacttttttttttttttttttttgagatggagtcttgctgtgtcgcccaggctggagtgcagtggtgcgatctgggctcactgcaacctccacctcctgggttcaagcagttctcctgcctcagccttccgagtaagtaggattacaggcatgtgccaccacacccggctaattttgtatttttagtagaggctttgccatgttggccaggctggtcttgaacttctgaccagcctggtccagctggtccagtgatccaaccgcctcggcctcccaaagtgctgggattacaggcrtgagccaccacgcctggcctgaaatttatcttttgttgacgagtatgtgcaaggtgttgtgtcagtgactctgaagaattactacatttctttccttattctttctttaatttattgatcacatatttcaggcacagtttcaggttctgggaatatggcagtgagtaaaacaaaaaaaatccctatcctcatggagtttacattctttgtaatccatctcacaaccttatcatgtagctgttactatcttaattttacctggaaggaaagtgaggctctgaaaggtttcgtgacttgcccaagattatagaaaaccacaatttgaaacttaggtaccattagccactatgctgtgctgtcaaaattgtccccccatggggttctgtgaaagagaacaattagtctcaatgtctcaaatagtagttgtcacaaatgtctttgaaaatctgatgtaactattcccatttttaattgtgcatgaaattttagggaattgacatatttcaaagtgctcattcttaacctgagctaaggacttcaggaaaagaacacttgaacagaaaggttatgcctaaagatcacaaatacgctatacaaataacaggtgctacagctctttcccagtccctaccagcaccacaagccaattatgttgcttattgaacagagttgtcttttctgcaaaactagatgcaaccacaccatcctaaaaacaggataatggctgttgccagtcagtcagagttggcattcgcaataaaaatctgtttttcagtcttttcaaggctggtgtagtagaaagcacagatttgaaaaatactgattcaaatcttgactattgtactgttgggttttttttgttttgttttgctgtttaaggtaacagaaataccctgataatatccccaaactggaaatcagctggtgtgaatgggtaaagaaaatatcatgtattcatgtggtatattttaatcaacagtaataaataaaaggagcaagttactgatagatacaataatatggatgaacctgactcattctagcaacaaataataatgctcattcatggataaatgaagcagctgggaaaaagagtcccagtcacctcactaagaagtgtagctcccacagccaactcagccacctttgtgaaataagaaaggcatacgtctcttagaaaaatcacctctgataaatgtatagtttttatattcagtattttaaaattgtagtttttatgttgttkcggtcagttgtgttatgtttggaggttttagtgaatatatagttatgcarccatcactacaaccagtttttggtgtgtttttttttttgagatggagtgttgcagtctcaccggggctggagtgcagtggcacgatctcagcttactgcaacctccacttctcgggttcactcgattctcctgccttagcctcccgagtagctgggattacatgtgcccaccaccatgcccagctaatttttgtacttttagtagaaacggggtttcaccatattggccaggctgaactcctgaccttgtgatccgcctgcctcagcctcccaaagtgctaggattacaggtgtgggccactgcgcccggcccactacaactagtttttagaacacttccatcacccccaaaaggtttcctgtgactatatgtagtcagtcccactctcactcccagtggaggaagggtggagaattggatgctcatatttcctttggagcagcaataatgaacagatttggggttattgtacttccatttgttagtgaacatgcaacatcagttcctcctgtggctctgtttgtacaagtagcctcatctgtgggcttgcatttcttcgaaaacaaagacctttttatttagttttttctagtttgtttgtaagactctgaaaatctcaaccattgtagattttttcggattaccaattttccattttaggtttcctatttcagacctgaacccatatacaaaaagaaaggccatctctttactttaactgttgggtctttgccagaatacttttgaaaatttccttaaatcaatttttattttgtatcctattgaatctttttgagacagaatctcactgtgttgcccaggctggactccagtggtgtgatctcagctcactgcaacctccacctcccaggttcaagcgattctcatgcctcggctttgcgagtagctgggattacagacatgagccaccacatctggccgagttcttgattacctaagctatcctggtcagatacactgctctttttttcccttttttttttttttaatttccccaaccttgctagactgctggtcttacaggattttggggaattaggaagttccatggttggcaaactttcaaagacaggagcaggttaatgttagctatagaagcactgtcactcaagtgaagacagttgttgattggttggctttgggatgtgtctgtttaacaggccatttttgattgcctgagtttcagaagtaaggaaccctcattagttggttagtttgtagaagcatatcctctgaggcaaattgttattagttgattaaaatcatttaaatcagttatagtagctttgttaaccatgacccaaaaaactgtcatttcttgatcagaagttttaaaatctgttctggttgctacctttgtaccactttactgactctttagtttttttctaggaatgtaggagccttttattctcatgtaatgcccccaccctggaatccttgaagaccttctgtctattgttcatatactgaaattttataatgataagccttggtatggattgtttctttctggatatattttgtttttatttctactatttcatcatactaaacattctaagtagaygttttcagtctgggaactcatattcttcagttctgcctctgattcaagaccattttcaggttgtctgtacgttccccactttaggaataaatatytggtcttctgcttcctctaccaacatattatatttaccatttatgtatgccagggcttggccagatacgtaaatatttaggctctgttgtaactactttgctgttacagcacagaagaaaccacagacaatacacaaatgagtrgatatggctgtgtttgagtaaaacttgatgtaacaaaacaggtgataggttggatttcttttcagacctgtgctctatcctggatcgggctcaaagtcatgtctgtaattctgtagttttcttctacctctgagcatcttttaataagtctgcttatagggtgctccatactagggttgtatagtaatcattttaaataaatctattttcctgaatgttttatttctgtgaaaagcacaggaatacacaactttacttagaattctttttttttttttcctttaataaggtactaggttttgacargcttgcatcatgcgtgagtataagctagtcgttcttggctcaggaggcgttggaaagtctgctttggtaagtcattcttactttacctaagcctttcactccaagacgttctttttctgttgmgttttaggttttgatgatttgtctttgttaagataaaattccttaatgactttagaagcaatataatatttktcttgtaattttattcaacttttaattatatctgggtggatcatattctctctggaacattgactccagaatgacacgagttatgctggaatacaatttgagctaagcacagagattgagagcgtacaaatacatgtctttttgcattcgcatttcagagccagataggaataaattttggtctttttatttatttatttttttgaaacagggtctcactctgttgcccaggctagggctcaagtgatctcagcctcctgaatgcttgggactacaggcacgtgccaccatgccaggctaatttttaaaattttttgtagagatggcgtcttgctatattgcttaggctggtcttaaactcctggcctcaagtaatccacctttgcctcccaaagtgctggaattacaggcataaatcaccatgcctggcttgctctttcttcttatgaatagtcttaccctgtacattttatgttagaaaatatcaaagcttataaaaagtcttcaaatattacctttgactgtccagctttacattttttaacggcacgttttctgcatcaaggaatggtatagcaagaatgaagacataactgggtaatgagggttgggaaagaggaaaaacgtagggaaaataatttgatgaatagttcagagcttagcaaagcctcacaagcaaatagattgaccttctgtctcactcataagataaaccatcttggccacttagaaaggccacctagctgagaagtgtcatgcttggaacaaactgagaagtacatacaatgtgaaatgaactgctttttcatttgtatccaaagtgatggggaggtcagttgatcctgcatgtatgtgtgtatacataacaattagtcaatttctaatttaaaaatcaaatttaagctcttaagactgaaacaatgccggcacagtggctcacgcctgtaatcccagcactttgggaggctgaggtgggcggatcacctgaggtcaggagttcgagagcagcctggccaatatagtgaaaccccgtctctactaaaaatataaaaattagccaggtgtggtggtgcatgcctgtaatcccagctactcgggaggctgatgtgggagaatggcctgaacccgggaggcagaggttgcagtgagccaaaattgcgtcactgcacttcagcctgggagacagagcaagactctgtctcaaagaaaaaaaacaaaggactgaaaccagagacatttaaaattttttaatatatgatctctaaatttagaattacccaataaggagcatagtgattatttatttaaaaataaacagcttcctgaggtaattttcttaccaaatgtacacattcgaatgtagtattggctgtggttttttttttcattgatggtgtaactccctgtgtgaactcagtttacaattacattaaagattgaatgtactcttttctttagaartataatggtttcttaatttttttttcagactgtacaatttgttcaaggaatttttgtagaaaaatacgatcctacgatagaagattcttatagaaaggtatatattactttggaaggccttttgcttttkattttaatataaatacttattttagctttataattattgaatgttttatacaaaggatggaggcagagttaatttataaaattagtgggaaaagtttacactttctggcattgcatagttaccagtttaagaggatcataaacacccatactctcacatattcacagaattttttgtaatttgacacataaactktaaagcagaccatccatttcaagtagtagccccatgttactttcagtcccctacctagcaagactgattactctcaagctcccttctttttaacctagaaataggtggacacaggtcttcctaagctttctacttactaacctcttgagaaagtgccaccactcacaatactggttgaatatcccttatctgaaataactgggaccagaagtatttcagatttcagattattttctgattttagaatatttgtatatacataatgaaatagaatgggacccacatctaaacaattcatggtttcatatacacctcatacacataatcttacataatatttttaatattcttatgcatgatacaaagttttggctgcattttgactgtgactggtcacatgagctcatgtgtggaattttccacttgtagcgtgatgttccacacatggctcaaaaacttttggatttggaacattgcaagttttggatttttagattagggatgctcagcctatagaaaggtgaattcctgtgtccactaacagcatgtgacaataaaacaatgtgtagacatttttaacttagtagggaaagaggtatttcccaacctctatgaagcagccaacctggccccgctgttgcacaaatactgtgtttccattcctccctccatgtgcatagtctaccaaaaaaaaaactggaaacttttgcaccccagctgtgagacagtattactcttttctttctacatctaattctaaatacctatttttccctaggaaatattagatggaaaggggtaacagggatatatgtgtaatttatttaatagctgtgccactgcttccttaattccagaaatcttgttccagtatggtgagggcatatagttacctagagaaatgaggtatatctaaagtatcatgggagaatttagacagaattacttatgatactgttggaactgttgctggttttgtttgtttatttgagctatttcgaaactatttttttctctagaattaagtgctgagaatccatattgagactggttcgtgtaggtttccctgtgttgacttgagaacacatggcttttgaacttgattacaatttgggggtctttgaatcttgattacttagctatttttcctcctgctttgttgaagtattgctggatattagtttgtaaagttgttaaaatctgtgtgtcttatttttgatacattagcttttttgtgtatattaaggtagttttatgtacattgaaaaaatgaacatgtattttaatttttctaccagcaagttgaagtagatgcacaacagtgtatgcttgaaatcttggatactgcaggaacggtaggtaaaactaaataccaaagtatatacaccgtttgtacagtattgacttcataaatgctagtactctatagacaaatattagttaagcttatttaaaagtactgcttgcagccggttgtagtggctcacacctctattcccagcacttcgggaggtcaaggttgctggatcacttgaggtcaggagttcgagaccagcctggccaacatagtgaaaccccatctctactaaaaatacaaaaattagccaggtgtggtggtgggagcctgtaatcccagctactcaggaggctgaggcaggagaatctcttgaacccaggaggcagaggttgcagtgagccaagactgtggagattgtgccactgcattccagcctgggtgacagagcgagactctgtgtcaaaaaaaaacataagactactagttgctaaactttaaatctttttgttgttgttccgttgaatccttaattttatattggccgggcgcagtggctcacgcctgtaatcccagcactttgggaggccaaggtgggtggatcacttaaggtgaggagttcaaggccagcctgggcaacacagtgaaaccccgtatctactaaaaatataaaaaaaattagccgggcgtggtgttacacacctgtaatcccagttacttgggaggctgaggcaggagaatagcttgaacccgggaggcggaggaagtatattgcactttttgtaattgcagtgggtcagttattgaaaagtttagaaaatgtgttagaagaaaaattttcagtctcactagtacttttaaaacaatatattaccatatttcaaataatacaggcatacattcattcatcagcagctgtgtgaaatattttgattgagctgggtatgatggctcatgccttgtaatcccagcactttgggaggtcaaaggggggtggatcacctgaggtcaggagttcaagaccagcctggctaacatggtgaaacccgtctctattaaaatacaaaaattagccaggtgcagtggcaggcacctgtagtcccagctactcgggaggctgaggcaggagaatcgcttgaaccctggaggtagaggttgcagtgagctgataacacaccactgcactccagcttgggtgacagagtgagactccatttcaaaagaaaaagaaatattttgattggtatctgttctccttcaacgtatttatagacaaactaaatttgtaggtatgtgaagatgaagggaagatttgttctcggtgtatggtattcattcagctaatgtttgaatacctgatacatgtcaggcactgtgttgttaccttcaattaccttcaaatgctcacagtctagcaaagaaaaagtagtgtgggaaaatgggatggtctagatcatgctgatggagccctacagaactacagcatttgagtcatagctaatagattaacttggyagatacagttggggtgctttatacatgatgatgtattttaaaagctgcctttagtaacttttggggacaggatatttctgttccacttgagtatattttttgtatataaatcgactttggtgtattgtttttaaataggaaacctatttccagctgggcgtggtagttcacgcctgtaatcccagcactttgggaggccgagacgggcagatcacaaggtcaggagatggagatcatcctggctaacatggtgaaagcccgtctctaccgaaatacaagaaaaaaattagccgggcatggtggtgtgcgcctgttgtcccagctactcgggaggctgaggcaggggaatcacttgagcccgggaggcagaggttgcagtgagccgaggtcgcgccactgcactccagcgtggtgacagagcaagactccgtctcaaaaaaaaaaagaaactaaaatgccaattttttcaaatagtatcttgtcatagattataattttaacaaagttacataatactacagtattcttcattgagctataattatagactgtgaaaattgtaaaaataactgtcaaaacattattgttttttaacgttcctttctttctattgtaggagcaatttacagcaatgagggatttatacatgaaaaatggacaaggatttgcattagtttattccatcacagcacagtccacatttaacgatttacaagacctgagagaacagattcttcgagttaaagacactgatgatgtaagctgacttccaaataaatatattttatttcaaaaccctgattataattgtttaagtctaaatttaaattcattttaaagcttgtgtattttggttgggggggggggtgttggtttttttaaactttttccttgaaaggcaaaaatacccatacatgttttcaaatatatatcatgtggaaagtgagaaatttcctcctttgccattatcctgtgaaaattaaatgttacacccttccttttttttttttcctttgagatggagtcttgcactgttgcccaggctgaagtgctgtggtgcgatagctgtacctcccgggttcacgccattctcctgcctcagcctcccgggtagctgggactacaggcgcctgccaccatgcccagctagttttttgtatttttagtagagacagggtttcaccatgttagccaggatggtctcgatctcctgaccttgtgatccgcctgcctcagcctcccaaagtgctgggattttaaaggcaagaaatacattagattctaacattattaatttaggtgccccttcagagtctaccataatggagtttaattcctcatcacactaaatatagcagtggttctcaaaattgattttgcatcagaatcacctgtaggaccagttaaaacagattgctgggctgagatctcagagcttctgattcagtaggtcagcagtaggacccaggaatttgcatttctaacaagtttcgaagtggtgttggttttgctgatctgcatactgtaagaaccaggctgggcatggtggctcacacctctaatcccagcactttgggaggccaaggcgggtagatcccctgagctcaggagttcaagacctccctgggcaacatagcaaaaccctgcctttaccagaaatttaaaaaaaaaaaaattagccagcatggtggcgcgtgcctgtggtctcagctatttgggaggctgaggtgggaggatcacttaagcctgggaggtggaggttggcagtgagctgagatcacatcactgcactccatctagggtgacatagtgagaccctgtctcaaaataaatacataaataagactcattgtactgcagtttaattttagcaaatattgtgagagctgggagacacccatggtaaatgcttttattttctggacttctgaaacaagggaatttggggggaccctacataattacagcaacctcagggaacattttttaatttgtaaatccatttaataagtggcttgatttttagtaaattttgattggctttttttttttttttttttgagacggagtctcaccctgtcgcccaggctggagtgcaatggcacgatctcagctcactgcaacctctgcctcccaagttcaagcaattctcctgtgtcagcctcccaagtagctggaattacaggcgtgtgtcaccatacccagctaatttttgtgtttttagtagaaacagggtttcgccatgttggccaggctggtctccaactcctgacctcaggtgatccacccgcctcggcctcccaaagtgctgggattacaggcgtgagccactgtgcctggccttgattgacttttttaatacaagactatgagaaactaaaaattctattttgggagccttccgtccattatgataaaattttaaggttttttccccccatctctcataacaggatcatagcttgttttctcaaaagtttatgtaaaagtgtcttatttatgtctacattgactaggttgtgttcattttacttaacatatgagagttttctttctctcttttcttccctttggagttatcgtttgcatctccatgaaaagagaaggcagtggagataattgacatcaaagttaatacttatgtttatgttacagattaaattgttaaggctgtaaattttattatacattatttaatattttttgtggcatatgaaaagtaattcttagatttgactcttagaattcttttgatttgaattcatatagcatatttacttatttatttttactctcacaaatgtatttttaggttccaatgattcttgttggtaataagtgtgacttggaagatgaaagagttgtagggaaggaacaaggtcaaaatctagcaagacaatggaacaactgtgcattcttagaatcttctgcaaaatcaaaaataaatgttaatgaggtatggtcaaatatacttaaaatgggtcttcatttgaagtacaacattgaagatgaatggaaaatgtcttaaccccaagttaatatgtactcagggtaatatgttgatgttacaggcaaaaaaaaaaaaccctcatgttaaatgtatctatgtagtaaataaacaatactatttcagtctctattaaatacttgtacattgatatttaccatgaaaaaggaagactggacagaaaatacatggatagggaagacagattaagacttcaggtatatgaaggatgttatatgaaaaatagagtaaaattccgaaaagtatgcatggttcttgaaaggctccaagtcatgttgtagagcaaaaacttacagtttttaaaaggattttttctttgtgtgatggtaaatgttctaattgaactaagttaagatctctgcagctccttcaactaagtattttaaggagcacaatattaacactccccaaaaatttgagcttggcagttataacacctgattttattctcattccttagctgaacaattctgggcattaatttatatccatggaaatttctgttttttcaatttacttttttcattgggggggataggtgttcctcctgtaaattaaaacaaattattgtatttgcagatcttttatgacctagtgcggcaaattaacagaaaaactccagtgcctgggaaggctcgcaaaaagtcatcatgtcagctgctttaatatactaaatgcattgtagctctgagccaggtatgttcacttatctttcctctaacttttaatcactcaaccttattaagggcactctgtcatgaaagcaagtatagacttctttttgttggttctgaaaaataaatggtttatttttataagatatccatgagttagtatgctatcttattaattatttacttatcatcatgagtaaagtatttcacataagtattctttttttgagatggagtttcactctgtcacccaggctggagtgcagtggcgcaatatcagctccctgcaacctccgcctcccaggttcaagcaatgcttctgcctcagcctcccgagtagctgggattacaggcacgtgccaccacgcccggctagtttttttgtatttttagtagagatggtgtttcaccattgttggccaggatggtctcaatctcttgacctcgtgatctgcccacctcggcctcccaaagtgctgagattacaggcgtgagccaccactcccagccaaccccgtccctaatttaaaacacacacacacacacacacacacacacacacacacacacacacacacacgtgcgcgcgtgcgcgtgagccaccgctcccagccaaccgtccctaatttaaaacacacacacacacacacacccctgacatgttcatcatgtgccagtcacacacacacacacacccctgacatgttcatcatgtgccacttttttttttttccttcaacttttaagttccaggatacatgtgcaggatgtgcaggtttgttacataggtaaaggtgtaccatggggtttgctgcacagatcttgcatcggtacctggcacatagttaacactcaactattagctgctgytgtttgccaatgataatggtttcctcttcagctgtcattaaactgtttattgttaaactgttaatttattcttaagaacctttgacattcctgactcttatttcttcctatgttaattgactcagtgctgccatagcactttgattctgcatcttttcagagtttttattcctgccttccatctagggctttctgtttagtggtatatcctctcattctaatatcctataattcctgaccacatgcccattcttagcagcacacatgtgcttgagctcacacacttccatctgtcctttttaatttgcaacagtctgccaggatttagaaaacttgattgcaaacctcattcagactcagaatgaggacctaaagttctaggcatttgtgaaaattatttcaacagccacatatgtattaacaactcttctggagcttgtaacaagtctgatcaccagaaaaatataatagggaacatttttttagccgaggcatgtatgcagaaaactattcaaagtacatatttaacaattctaagtttactttttaaaatctttaattacatgtgattttagtgtaataccacctttttctgacatcagtcttaatagaatgtttaaatatggaattagaaattatataacgtgattgtaaatctgtaaaacaccatcatgaaataaattctatttgtctgctctgaacgagctttttagccactttcattgaaagagtgaggaagaacttgattatctgatactagaaaccttggttagatgtgcattctatacttatgatctaattctaggagtacattacgattgtgtaaacacaggatcacccagtttgttaatattgctatctgacttttcaatcctaattctaataaggttgacttgactaacaattttaatgtgatttttttcctttttaatccttggaaggtaatgcacaaaaatttgcacaaaggtactttccctttctgttcctaagattttcatttaactgactttcaagagggcagcagaatagacttcatctttttggaatgaaaaggtctgccgtgaattgtggtatgttgccactaatgtaatgcctagaacaagagcctagattatattcatttctaacacttttaagactgttttcttaactgtttgcttttgggtctttactttttctagcccatgtttttaattaatttttttccttttgacaggtctgaagaactgttgcccaattcaacagtgccagcattccaactttgttaaacctaccaacatcttaaatggactttcctgtggtggtaccctttaagaggcggatgaaagctactatatcagtttgcacattctaatcactttccagtatcacaagagagatttttacttatataatagtcctagagtttgcagctggtaaaaccagaggctacatccagtattactgctaagagacattcttcatccaccaatgttgtacatgtatgaaaatggtgtactgtatactttaacatgccccatactttgtattggagagtacaataatgtaaatcctaaaagcaccactattttagcataataaaagaaagtccaaagagctcctatatagactactccagataacttcgcttctttgatacttgtagcttattgtaattttttttaagaaattcaaggtcattattattgtacaaaataagcgctttgattaacacagctatatagtttttttaatttttaaaaaacctgtggagacggtgatcttgtctttaaaayatgatagtcctttcagtataatgtcttagattaaagacgttgcctttaatatctgttgggaaggaaatgtccagacttttcaaatctcttattatatgtttcctttttttgtttacatagggaacaatgtttatagtcgtgtgtacagtgggggtctacaacaagaagtgtatattttcaaacaattttttaatgatttaacaatttttgtaaatcattttcaggcttctgcagctgtagattctcmctgtgaatcccttgcttgctcatgcataagtgtatttgcaataccaaatatacaggtttagtatttttgcctgttagtgattgtttcacatgtgtaacgttttggttgagatgttaaatggtggacgagtactgtggatgtgaatgtgggaagtaattttaatcatatgtaattggtcacaaggcctaatttgcagtaactattgctgttttatttaacaatgccttgttgctttgtatgcattaatgtttggatgtaaagattgtgtgtctatccaacagggagccacagtatttaaattgaccaacctaatgttacaactactttgaggtggccaaatgtaaactaaaagccttaattaaagtggtgcaattttgtataacttagcatcagtagttcaataaatttggattgccatgcaagggcttgcattataattacttgccacttgaatgtgttttgtgtaatgttttaacagtgctagtaaataaatacgggtttaccctggttttaattgtaataggtgcattttacacagcatggtttcataatttaacatctgggcaagccagactcattaattacaggaataaggaagtagcgagttttctggtattgtttgaatatccacataaccaccttttgaacttttccttgagaaataattttgtaaatcaagcagtattacttacgaataaatgcctttgggtaatgttcagtagctatttgatgaggtaggtaaaagaggaacgatttaacatactttcatggatgttacactatggattttttaaaatacaggattgaagttagaatattgtggttataaaaatctttgagtgatgtggattaagcacttagagaatcgatatttttcttaaatatgctataattgaattctgtaagaactgaattcttatagaattattttaaaactttttaaaaattgtaaagctcttaaaaaactttttgaaagtatttgccagctactggagcaattaatcagtgataatatctaatagaggggtatctgctaatcccctaaatacacgctgtttgaatgatacatttttaaaggctttcatgttaagaaaaagtctgattctttacaaaagggacttgttttggcagaactggttttatttataatcatttgggaaaaaaattaagcccaaaaaactgggactgtgaaacactaaaattacttcaatttactatgtcctgttacatccattgataccgccattattcaataattacttttaataaatgtttgctgcctaccagctatgtaccaggcccagttctaggctcaaacagctaaatattcattcattggacaaattaagtacttaagtataaaaattgttctaggcctaaggatgtagcagcaaccaagatcaactataaaatgctgccctcctagaatttatattctattgaagagtttctcagcctcagcactattgatgttttatgtttgataatgtattctggcgactctcctgtgcattataggaattttaatatctgcccactagatgccagtcacaccaccccagcccccaagttgtggcaaccaaaaatgtttccagacattgccagatgttccccagttggattgttgggggacaagggaggtgaacttggagggcaaaatcaccctggtgaagaactactgctctggtgggaaacaacacattagttacagatgagtgttagggttacaagatggatggtttactatatagtgaataagaatataaagtttggagccagacttcctgggtttttaatcccagctcttccagttcctactatatgcctttggttgggtgccttggtttcctcatctgtaaaatgagaatgataatacctacttcataggagagtgaaatgaatgccagtgctatcctctaggtctatatatatatatatatatatattatatatagtacatatatagagagagtatatatatatatgtagtacagtggaggtctatataatactatatatataatttatttttttcaatgctgataggaataaggctgtggtttggcaaaaagcaccattttctcctatacaaaatagtaactgcagtttgggagcacaactcatgtagattgacttttctggtgcttaatgggaaaatactaaaataattgagtcagaaaaggcatgaattccttttcacgtccccaaggatacttgaagaaacttgagttttaggagaaaatcagagtggtctttcacttacatttttctaaaaagtgtaaaaaccctgtattgactttcttgttgattcagttgtttcttaaacgtaaatagctcatctttaccatatgtgggcattacaaatagaaatttttaaaattccatttataaaatgaagttttgccgtttttttttttaaatcattccgtctttagttgtgggacagcaaacttagaatcgaaactcatcactacaacttttctttgagttaaactcttatctgtgttttcattgaatttaatctccatctattctatctcttcttaaatcttggaaatgtaaaagggagttatagtgttttacaattaatactcttactattaccttagaagccttaaaagtgcttgcaggcttgtctcataatctgtcagtgagccttaacattgtgatttgtaagactaaaatttttttttcaaacaaaacaaatctgacagcctgggcaacatagaccccatctctacaaaaaaaaatttttttttaattagctgggcatggtggtgcacgtctgtacctgtagtcccagctattcagaaggattgcttgatcccaggagatcaaggatacagtgaactgtgttcgcgccactgcacccccacgatggcaatagagtgagaccctgtcttagaaaaaaaagataaataagtctgttctatttgttacagtgcatcaacacatttgaattttctttttttttctttttcttttttttttttgagactgagtttcgctcttgttgcccaggctggcgtacagtggtgcgatcttggctcaccccaacctctgcctcccaggttcaagcaattcttctgcctcagcctcctgaatagctgggattacaagcatgcaccaccacgcctggctaattttgtattttttggtagagatgaggtttctccatgttggttaggctggtttcgaactcccgacccaggtgatccgcctgcgtcagcctcccaaagtgctgggattacaggtgtgagccaccgcacccagcctaatcaatacatttgatatttcaagaatacatgagagaagagaggtagattgagaacagaactaaactttatatatgtttccttaactattgggaggaaaatggatgagtctgtgttgggatacctgttgaaacaagactactaaacagattaatcaactaattccataggcttgacattagtttatctttgaaaagtaaaagtaaagtgcttattgctaaataggtctgtattctaaatgctgccattttttaaaaaaagtattccatgttacacacattttaaacttgcttcttaaaacatccctgttggtggcctgtaggttactgaccttaggaattacaggctttatccaaaattaggcatatctacctgatttttgtatctgagaatcaataaatgcattcagtattctctaccgtgtttcaggcgctgtttacaatatcggaggtacagcagggattttctgcccacgtggggaaaacacacagcaaatgaacaaagctctattggtaacagtctgttaaactttctaagagctttccaactttctaagagaaaattgtaatgattttagaaaagtgagctgtcatttttcatatatataaatttttttattcataggtaatctaatttttctcatttctccaaaagggtacgaagacagtttttactatgttgttttactatgaacctagtttaacctgactttccttacagacccacataaatgagacaatccaaatttagtatttgggtcaaaatgcagggttttttcctgaaaacaaaacagcacacacatatattacaggatttttatgtaataatatattcacttcagtcaggtttcagtttttaaataggcagagatcaaaagcctctaatgtttttgtcatccgccattattacccattcaaatttctatttatgtctggtagttatgtcccctgtgagcactaatttcagaacaggaaattctattaactgtcaaactctttaatgtgcagtgcagtaggtttggagcagaggggagtaggaaggagtaaatgatataatccagtctggcctggcatggtggctcacacttgtaatcccaatgctttgggaggccgagatgggtggatcactggaagccaggagtttgagacaagcctggccaacatggtgaaaccccgtctctactaaaaataacaaaaattagacgggcacggtggtgtgtgcctgtaatcccagctactcaggaggctgaggcaggagaatcacttgaacctgggaggccgaggttgcagtgagctgagatcacaccactgcacttcagcatgggcaacagagtgagactgcaaaaaaaagaaaaagaaaaaaaaatccagtctctgctggcaaggtgtttaacaagtcaatgatgggaaagaccagtcaaataaactatcagatctaataacttttctaaccataggtgattcttcttccattatccatactaaagcaagtgactcataataaaaattgttattttgtaaaatatatggactgtttgctttatattcccaactattacatctggttgactattaacaggtcaatgtcagatttcctgagcaaatcaaccaataatgaaaaactatgtggctggcagaaaaaaataagtgcgtgtggtggtgcttgcctgtaatcccagctgcttgggaggctgaggtaggaggaactcttgagctccggtggtttgaggccagcatggataacatagggagaccctgtcacttgacaaaagtatctttccctactggaaatggaatagaatcggatgggtatggtacagcaggtagttatggggagacctctactgttctaaatgagactaatagtaaatgttacataactaaagcaacagatttgccagctgtgtgaaagataacccagagaggggtaatggtagagccagaattaacacagccagcttgtcagctacctttgaacatgtattttctgtgcagtcagatttgaagggttggaccttggagttactgacattggaggcaactgaaaccatgagtgtgaatgaaattattttcgtaagaattacttggggttaaaaatagtaataaaaaggaaagcctggcctaaacagtcttgggatggggagaagggttggagtacaaaggattgctattacaaagacatgggcagagaacaaggcaaatagctgagcagcaattgagaatacagcatcttttatggcaaagagcaaaatactattgttcctcttctagtatgctatagaccagcagtaattttgtgctctaaaatgcttatttttatctctctgtatatacttggtggtgaatttgctacaaatgtaaggagatgatgggatagtttttggaaataccatcctctaattagtaccaggtctatgtatatctgcagcaactataaagtctgtttcagagtcagtattggcaaacttatatttaaattcagctgtaacaagacatctttttttttttttttgagagagtctggctctgtcacccaggctggtgtgcagtggcgcgatctcggctcactgcaacctccgcctcccaggttcaagcagttctctgcctcagcctcccgagcagctgggattacaggcatctgccaccaagccctgctaatttttctatttttagtagagacggggtttcgccatcttggccaggctggtcttgaactcctgacctcgtgatccatctgcttcagcctcccaaagtgctgggattactggcatgagccactgcgcccggcaagttgtctttcaaatatatgcctttgcagtatttctctacttccccagtaatgtaaactttattttctctcaattttcgtaagtggtattttggtgctttacccaaaatattagggagaaaattcttctttttaattggattctcgtatgttgatctatttctattgttttctaaaaaaaagttagtgtcctagtttaaaagtatatattagtttcctagggctgctgtaacaaattatcacaaatttggtggcttaaagcaacagaaatgtactctttcacagttctgaaggtcgaagtccaaaatcaaagtgttaggatgtactcctagaggctctcggagagaacctgttcccatggcattatgccacatcacatgtgcctctatctttgtatctcctcctctctataatctttcttttaaaaggacaattgttttgacatttagggcttacccacatacttcaggataatctcatctcaaaatgcttaatcacatctgcaaagacacttttttcaaataaagttaacagacagaagtttgggggttgggatgtggacatgcctttgggagccattaacaacctaccaaaacattttaacaatttttcagtaccaaagactagtatgggtctgctccaagataactcaaaa

SEQ ID NO: 96210 - DNA, 330780 bp, Homo sapiens
  misc_feature (1)...(330780): n = A,T,C or G
acagttacttttcatttttaaaagtatgttagaacacgtaatgggcttgtgactattttcaagtgaattataaatgatttaaaaaatgttctaagccgagtgcagtggctcatccctgtaaccccagcactttgggaggctgaggcaggagaatcatttgacaaagcgagacccccatctctacaaaaaaattttaaaaaaggttgcagtgagctgtgactgtgccactacactccagcctgggtgacagtgagaccctgtctctgaaaaacaaaaacagaaacaaaaagctctttataattgttaggagtctaaagaggtctgagatttaaaaaaaaaaaaaatcagaactgctggggcagggtaacacctagactgctgagccagacactagggacctgacactacttactctgtgctgcctttgcaatcttccttatcaccactatctcttaagtccccctaggtcccagcctaaccatttacttattaatttctgcatgtactctggacttctcagcctgactttgtgcatcccattcattcctctacctggaacacatgtccccacccgcttaatccgcctgttctggtggttagtgggtcagggctatcccctcttagcaccagggcctgtggatggaggaactcattcaaacccaactacacagtttgtttaaggatatgttctgcatatagccttcaggatctgtttatcttccttaattagaattcctggtgtgcaaaggacccaattttccctctgttttatatttttaccatctaagggccaagtgtgctaccataaactttatgggatttttgtaaatatcagctgacaatttctggtgatctatgtgggcttttatgatcctgtgcagactaatcagagtatttagtgcccgctgtgagcataacacttagcagcagggagagggggttaaggaggtgatccttgcttaaggacccacacggtggttggagagacaggatttatagccaagaagcaatcacacaagacacaagaatgtatgtcatcaaaggggaagccaggtgctgcaggcctttagggaaggggaggtgggggtgggggcacacgagtgtccatagcagcagtagcaatcagagaagtcttctggaggaggcagagacttgaccgaggctttttcaatggagaggggttagtgagaggtcagcaagtcaacaaggtagggattcctggtcagcgaataaacaggagccaaagcagagagtcagaaatgagcacagcatgttcacagtctaatgagactgctgaccacagtttaaagtgaatggtgcgagatgataaggttgaacgctagtcagaggagtttaggttgaatgtggaaggaaggaggaagaaaacattttttggtcagggaagtgacatggtgtgttttgaacaagatggattatttgtgggaggaaaaatggagaatgggcatcttgtgcatgacctggggtgtgagatggtgaggttctggactgggccatcagcaaggttttttgaaatgcagtgcacgcaggtaatcatgtctggcatgccagctcagtgcgttcaagtgggagtgctttataaataaggtcatggagattaagaccccacaatagtgtgttagcaacataattgggttgtagcacatgtagctgatttagagctgaaatcttttgttttagcctttcctcatgtcttgttggctcagctactaagtaattgtgtgtggttttgggcgagctacttaactcctcagtgtcttggttttgttgtctgtaaaatgagttttgtttttttttttttttagagttttgctccgttgcccaagctggagtgcagtggcacaatctctgctcactgcaacctccacctcccaggttgaagtgattcttctgcctcagccacccacgtagctgggacttaaggcgcacgccaccatccccagctaatttttgtaattttagtagagatggggtttcaccatgttggccaggctggtctcaaattcatggactcaagcccgccttggccttccaaagtgctgggattataggcatgagccactgagcctggccaaaatgagggttttatagtacctcgtaggcttgttacgagaattaaatgagttagtacatataaagtgcctaccctagaacctggcacacaggaagcctttaaaagatcttattatttatttattcagtagtttgcattatcatgggaatataaatatttaaattacccaatgggccaacgcatctagagctgtgctgaatcaaggccctcaaaaaaaaaaaatgcttgctggagacatcgccaagatgagactcattcagaaactgggatggaatgtcaaaaactccaattcaaggctgagcagtggctcatgcccgtaatcccagcacgctgggaggctgaggcagaactgcttgaagccagggcttgcagcttacagtgaactatgatcacaccactgcactccaatctgggcaacatagtgagaccctgtttctaaaaataattatttaaaaaaaaaaccccaaaccctcctgcaataccataaacttgttaagatctaacgcacaaaacctggagaccgaaaccacaatttaatcatgtcacttttgagctaaaacaacttcactggctctcactgccaagaaattgaatctggtcttcttagccagccagccttcctccacagatttgggttggcctttccagcctcctcctcctctagcccagggggtctttgcctcagccacactgtgctcctgctcatttttaaacacacccaccttgcacttcagtctcccctgtgcctttgctcttacccccaaagctcattcctcatacatcatttatgccctgtaaaagtagtcacctgtttttaatagactttattttttttaagagcagttttaggtttacagaaaaattttgcagcaaggacagaattcccatatattctctcccccaacagtttctcctattaacatcttgcattagtgagctacactatatacacagttataacactggtacaccccagtgttataattgatgaaccaatattgtggtactactattaacaaaagtctatagtttgcattagggtttatgctttgtggtgtacagtccaacgggtttttgacaaacgcataatgtcctacgtccatcatggcagtatcataaagaatagcttcactgccctagaattccctgtatgccacctattcatccctctttctcccggtcagtttttaagaatcagttcaaatgccctctcttctgtgaaaacatctcagttccctcagttacaattaatctgtctgatgcttgtatagcgctttttcatacttgttatagctgctatgtttgcatggtatgaaagaagtatacacggccgggcgcgcggtggctcacggctgtaatcccagcactttgggaggccgaggcaggtgtatcacctgaggtcaggagtttgagaccagcctggccaacacggtgaaaccccgtctctactaaaaatacaaaaattacctgagggtggtggcgcgcgcctgtagtcccacctattcaggaggctgaggcaggagaatctctcttgaactcaacaggcagaggttacagtgagctgaaactgcatcactgcattccagcctggacaacagagtgagcaagactccgtctcaaaaaaaaaaaaaagtatacaaacttttcttctgtcattaggttgtccttgaggaaggaactgtgccatagatttgtcctgacatctagaccagacccttattcttaaccggtgccttatgaatgctggctgcactgaactgaacaatgagcaaatatggttcggctcagtcatccactagatacagtatttttccctctagacaggagctgctgtttgcaaatctcccccattccaaatctgagccagcaaaggtatcataaaacaaacttgctcagggaattttgtagaaaaggcctcaagaggcaaggctttagaccaggagttctgaaagtgacatgtgtacttgtgaatttcatacatgctccttggatgggctagtttctttggagggaaccgtcttctattcccttcagattttggatcagaagcagccataggagaggtggcccaggccagctttatattgttactagaccgtagggcgatttctcgcctctccagtctccaaaaacaaagcacaaaaaaggacaagagcctggttgttttcatcctcacggaccagacaccccctcaggaaggcctctggagagtcttctgtctggtccccagtctctctgcccaggtgccccccaacaattgaggatgactagtgtgttctctttgggtaaggagcaccttcccataaacacttatttttcttaattcacgctgagcttttactttattttcgctttaaagtcactgttctgaaacgttctaaaacgccgtaggaacatgcagataggaacaaaagcaaataaatcgaatcctgtgaagtaacaaagcagacgcccttctcctaacaggcagcacaaagctaaatgaaaaatatcagtcatccactagataaagtattttcccctttagacaggagctgccgtttgcaaatctcccccaccctaaatccaagccagcgaaggtatcaaaaaataaactactcccttcagctcccagactggaggcaacagtttcagcagcaccgtctatttccttgaacaacacgagcggtttgaaagaccttggctttgacttccctgtacctgcctccaaacacacgtgggggcggggtggggtggggggagatattgccccccatccccgttgccttccgcgacgccaggccaggcgcagggcaggggagaagatggggggcgccctggattcgcggttccagctgcaggcagttacctggggtagtgagtgctctctacagacccgggctaccccaacccccccgattccagaaagggccggagaaaagcagggggcgcctgccccgctccggagcagccagggagcccggccgagccttgacgaggatgagctcggagaccgcagcagctaccgcccgctagcacctgagctcccagggggcggggcctcctccaggtgtgcgcagaggaaggccggcgcggagtcggggccggcgcgggagcccgagctgtcccccagcccagaaatgcgcggggaggagcggttcatccgcaccccagcgccgcgggagacactggcgccgcctgcctcctccgggtcccggggggagagcgcaccgtgcggcgcggagggggttaaccgggcagcccgccgctggagcgcgcttaaccctttggagcccgcaggtcagccgggccaggctggggtggcggcaccccgagtcccacgcgacggccaccccgagcgcgcaagtggtgccgggcagaaccgcgcgccgggctgcagacccgccggggcgcggcgcgcgcgggccgtgggcggctcggggcgggcggagggcgggggacggcggcgggcgcgcagcgtcgccagggcgaagccggcgtgcggcgcggcgcggcgggcgcagagcgagcgggcgggcgagcgcctccgtccccggatgtgagctccggctgcccgcggtcccgagccagcggcggcgcgggcggcggcggcgggcaccgggcaccgcggcgggcgggcagacgggcgggcatggggggagcgccgagcggccccggcggccgggccggcatcaccgcggcgtctctccgctagaggaggggacaagccagttctcctttgcagcaaaaaattacatgtatatattattaagataatatatacattggattttatttttttaaaaagtttattttgctccatttttgaaaaagagagagcttgggtggcgagcggtttttttttaaaatcaattatccttattttctgttatttgtccccgtccctccccacccccctgctgaagcgagaataagggcagggaccgcggctcctayctcttggtgatccccttccccattccgcccccgccycaacgcccagcacagtgccctgcacacagtagtcgctcaataaatgttcgtggatgatgatgatgatgatgatgaaaaaaatgcagcatcaacggcagcagcaagcggaccacgcgaacggtgagcagccagagcccgggcacccgctgccaaatccgatcctgtcatggtcctccagccccctcccccttccccgcggcgctggatgggttgagggggttggagagggtgctgccagctcggtgtcgtctacacagagaggggacatgcgtgacagccactccgcgctcccctccaggccctgaatgtcagagttaattctgcatttgtggggtgggggcggccgtggagtgtgtggagcgcggtgcagccggaggggcggcgagtcggggtgattcgggttcagtgtcctcgggctcaactttccttcaacgcccccgagcgatggcaggagggccgcaagtcttcagccggagcccccttgccagcctcttctcgccttccactcctcccccgccccctcgttgactaggaagaaggtccctggtggcatccggaaaattctaggattgcccggtttcgccctccgcgccggtgggtgaagcacacccatcccctcgcgggggaggcccggcctcggtatcggggaaaggggttcgggtggagcgtgcgttcccgctcccgtcgccggctgtgcacacgtcggtaacctagcaatgcccggggagccgctgccgctgtggggctcccctccccagctctggcccgggcaccacgtgcagcttccacgccggccggggctgggtcgagggaggatggagcagctcctggccagccctcccctttggagaccgccagtgccccccaacccctgtcggctggaagcctttccgggtgagcgctcccctagggagaagcttgacatgactcgactcgtccccgctccgattgcccgccgctcgcccgctttgccctcttctcaggctttcagacccgtgcttgctttgactctttacttagcaataattggctttgcaaacgcccatctctctaccttgctgtcacctctctcacttctgcttcagtgaggagactgtggcggaaggcggcaggtgcctgggagatctgcctgggagatggcctgacccaaagctggcgggggcttcgcatagggagcctccttgagtttctgccttgtgtgcacctggataccaacctacacggagataattccctcttaggcctggaggcccctggcataatccagtcagtctatcctaggtgtaggggtgcaggctgactgccttgtctgtctctctggatgctggcttggctgatgctgctgcaatttaaaatgcaaaaaagccctaaagatgttttctgttttcggaagcctgtggaggaaatgagtcccaagcatcatgaattttcatttgcaggaagtgtcagtgcataatctagatatttgttatggggtttttggtattgcctgggtgcctatggaagattttttttcggtactgaaaaaaatgcatttgtggctgtggaaagatgttggagtaacactctgaaaatgattaagactattgaattattggtactgcctttttttttccccttggtgatggtggtagttatgttagagaaaagctgttgtatgtatctgttactcattagagatagatgggttttacaaatcagagatgcggagtaaatgtgggaatgacctcagttttgtcagaagaaatgcactaaaagaccctttgtgaagacatgatgtgaaggagtactaaccccactgggtgtgatgcagcggtgatcctgtgtgattgacactgagaccagagctcgtggacttttcttgactctccagctgactaaagcccagcttgtgaaaaatagcacatgagattcaaaatggaaacataggagtgaatgattcccctgttattgatgggagacaacctttgatttttttctcctacccactggatcctcatttaaaaaaaaaaatctttgtttttctccttctccccagaggcaaactatgcaagaggcaccagacttcctctttctggtgaaggaccaacttctcagccgaatagctccaagcaaactgtcctgtcttggcaagctgcaatcgatgctgctagacaggccaaggctgcccaaactatgagcacctctgcacccccacctgtaggatctctctcccaaagaaaacgtcagcaatacgccaagagcaaaaaacagggtaactcgtccaacagccgacctgcccgcgcccttttctgtttatcactcaataaccccatccgaagagcctgcattagtatagtggaatggaagtatcctttttttgggggaagtctttctcattttctcttttaccatctgttttttaaaaggatttgctttctgaagtgacacaaagctgtagcagtctggaatgcgagtaacagaagttgtatataaggggtttcattgtatataccttcctgtctcttcgggttgcagaggggtggctgtacgggtatatttagcccactgtctggatgtgtgtatagtagtagtagtagggggagggagtgacagcctgaaacttcacaggggcagataattaaaatgtgaaaccaacctttggttattggacattagatggttagttttaaattcagtgttgtctttgggcaatagcatgcattgaacctattgcaaacaaggtatacagattagaaaaaaagactgtataagactctgtttgaagggaatacatttttgacctttagtagaatcttctcattctgatgtttgaaatttgcttctgcaactacaattaatgctaaggttgcttctagtctgacatttggtgattctaattattcaggtagctgcagatatgagcacatgcttcctagggagagattacttttgattttttttctctgatcagtgctataacttcctggaatttccttttgacaagttccaaagaagcatttggaacgtgagcatgagggagccagtgaagggagaggctcgtgtgtgcctcttcctcctgggcccttatgagttatagaacagccttttcagtggaggaatttgcagttgctgcctttataaaaaattctgtctatgtccttggactggaggtacatttctgggtgtctcctttgtatttttaaaattgaactccaaatgccccagaatggctgtcatgtcccagatcttggaaaacgattgtgcttcagcctgcttaaccccttccctaaatctggaggccaacctccagttactgccactcttcagagaaggttgactgaggccttctttctgagcaaatggctttttaattaggcagatgattcattggtctgggtaaagtaaagcatttcctttccccagaagtgtgtttggaactgtcaggggccttagaacagttcctaactataggaaggggtgtgaatgtaggaattccctccaccaggcccagaaggatggaggggccacaccaaaaagggaggatgttggcagccagctagaaagtggagctgaaatccccttataatttgaggatctagctcggcagctatttgcatgccctctgtctttagytggctattttctgtgctaatggacaggagttaaaatgaggtaactgtctagaaagattttggagagagcagccaaatgctagggtaggatttgaggggttctcatgtgctttttcattttgcagcagatgtcccttctmtagagtgagttatggtgtctctcacatagctggggttgtgtgtgtgcattttcttttgaagttctctagtctgagaacgaggagggagctcggtaagccagcatgtggcccagtggcattgctagattcatgacaatggctgtaccttgccaggaagacctcagactggcttgacacgactctgagtaagcagagacctctttgtggggtcactacttttgtgtggagtaggtgggaggcctgatgctgtttctctttgtgcacggtaatgtgtacatagcaatttttgcatgcagagtgaattcctggatcacgctgctgtctcccttttccagttgccagacacatgtgtacaggaattaggggacgtggctgccaattcagggagaagcctgtttacaaatgggacagtttgtaaaatagatagacccttaagcaatatatgatttttttttctctttttttaatgacagtttccttctaattcagggagcaggctatagaaatcctttccaccccgggcagctctgtcaaggccccatccgcagtgggagagcaagggtcaagggtcatttgtttttacagacaggcatgacagagtgtcctgccccctggaggagtgagggatgttctccttatcagaaggaattgttaggatcagacccatctatttstctattgctctgttctgcttcacttgtgaaaatcttatggcagtgagatggtatccacttgtacctggagaccaaaactggaccaacataaagaaaaaaaaatacaacttatatttagtcttcctgaacagtgttagtatttctcagatgtgctggtttatcatttaggtattgggaaattgaaaaggaagaatacctattacttaggtattgggaaattgaaaatgaagaatggaagaaagagggagggaagagactrttgtgtttctatggagaacaacattggggcccttgactttagatttcagtggggacctacaaaaaggaaaaatggaaagggaattctgaagtcttaaggtgggctatctgaaagttggatccctgggtgaaaaagattttataatattagatgagttgagagaaccaatgtgaattaaagctgactggcttaaaaaaaataaacccatcaaaattagtaagggaataatgttattcattgcctttttttcgttgagttatgaaagctcttcgaagatgaaggttttatgaaactcaagatctctccagaggccgggcacagtggctcacgcctgtaattccagcactttgggaggctgaggtgagcagattgtgagtccagaagtgagcagattgcttgagtccaggagttcaagaccagcctgggcaacatggcaaaacccctgtctytactaaaaaaaaaaaaaaaaaaaaaaaaaaaaaattagccggcgtggtggcacatgactgtagttccagctacctgggagactgaggtgggaggatggctggcttgagcctgggaggcggaggttgcagcaagttgagattgcgccagtgcactccagccttggtgacagtgagaccccatctcaaaaaaaaaaaaaaaaaatgatatctctagagaggtaaagagtatttgtttcctgtggcatttttggatttcccagaagtatgtcaggatgaatggagaatagtctgttcgtatgctccagttttaagtaccttgaagtgtttagttaaaccatggccttgcctcttgtgggtgagtgtataggcgaagcactgtggtaaaatcaagcccaggaattgcagatgaggctggtgctcacaaaaccttgtatttggaaaggctgaaaacccaaagaagaaaaacaatcattttggcagatgtcaaattttgtgttgccagttttgacaatgtctcttaataacaccagaatgtttaggtaagtatctcttgaaggctgatctcaaagtgattcttccagacagaccaccaagattgagaaatgttaaagcctactttgaacgtgtctggtgctgatttcttatggctttttaatttaatttgtttacaaattgagcacagtaacagcatattataaactgagctccagtccggctctaatctgaaacagttatagccatcgattcctctagcagagaaagcagaggcgggagctgaagcctggctcgctgctgatyacatctgaggtattggaatatgccwtgagaaagttataggtagaatgagaaggtcctggtggcttggcctggcccagtccagacaggcgatttaggctgaccctgccaagaatagcccctgagaaaatggctctaacacatggaggcaaggatctgcggaagacatttatcccatgatgatttctctgtgtctaccacagccgggaacttagtaaggctcttgtcacttttaaacctgtaagaagcagaaacctagttcacacagtgccctaattggatgtacttttaggttttaatatgcagtgtgcagccgaagaatgagtgtaacatgatccttgcaacagaagaaaaggacacggagaggtcatttggtaggaggctccactgtgagatgaccaccgatgattacttctgccgaaaacctagcagtcacagcagtcagccgaaataggatttgtgtatgtcattttccttttaaaagtgctttgaaagtggtgtgatcgggagtgtgatgagggacatggtttatgtttccataacacatatataccttaacacattttttcagaccatttgacatatttatattattggctatttttgccaattgtgtggccttagctatttacatcccattccctgaagatgattctaattcaacaaatcataacttggtaagtgtccttagagttcctgctggtcctggtatatggttatcatttgcttctatacttaaactggcagctggccttctgggtggttgaagtttatagctatgcatgtcgtgtttcttggagctttgcaacagtggttttttgtttgtttgtttgttttaacctgtattctcaaatttatactgactgaaagtatttaaagtcatgaatcttttataaatagatatggaatttttatggaagagatttggagcagattttaaaataactgttatctccacataagtttttgctaccattcttttcctgataatattagcttttttcttttctttttttttttttgtttttaatctagtgttcttgggagtggtgggtactttggtcagttgttctggtaagtagagaattatcgtagactttgtacatgaactatttttagagaagtagaatataacaaaactaataaatctacatagagcataatttggagaataatacatgatattattgaatacatgatataatattaaagtttctactccacgtcctatgaaatgctccaagagaaaatgattgtatggttaaataaatcaggatgcttccatatactttgctgccttcttaaagatttatagtgcacattagcttagtaaaagctttgggaagttctgcagttaaaaaacaggtttccttttatttaactcagctagtccctaaaagtaatcagtcatgaattctttaaacattttttttttttttggcaaaagactttaacatcatggaaccagtggtccatggaacttcctttgggaaaggttgatatagttttttttttaaaaaaaaagcactaaagagtactagactgggactaggatcttgtcccactcacctgtcaactagctgtatttggggtcatttctcatacctttctgcattgctgtgcagccacctggcaattaggaggattgggtaagaagattgctagtatcgtttttacctctgacattctgcaatctttctttgatgattcagaagccatttcaggatttttctggtgctgcagcatccttcttgcaaggattggttctttgcaatcagaagccatgcagaatgggagatgaaggggagcccattctggataacaggaaactctattgtttttcttctcttctcttagctggttccgtttgtttttggcttctcatgttgaagctctattttagcagggctggatgttcctaactgagcgagcgttgtaaaggcaaacacactaggctctcccttgtgtgggagagctctgctggcttctgaagatagtgaaattatgctcttgtgaataagccttaacgatttatgtacaggatttcatgttacatttaaaatgttgtggcacatttcagatgtaatgtgatgtctatttgtatgtgggctttagtagtttgatatctagagaattttctaaaaattttgggaattgatgctgaaaatacaactataaatgggagtcggataaccacataaacactggtagtatatatttggacaatgccagagatcatttgtgtaactttggacattttatgtagcttttgatttctttgtagacatgtgacattagatgattgttttaaagaaaaagcagaagtggtggaaagcctcccatcaatggagatagatcatcgtagtctaggccacagatggtgttagccttgttaccaaatttaacgacgtggatggtgacccagattgttacttttcgtagctcaagagaacatgattaaacaaacttagaaaataaatacctttcagaaaggcagattaattcagatcagtggaataattaatgtagctgcatgtgtaagccaattaatattctgaatttttcccagggaaattcagggcactgatataggcactgtcagaccatttggatttctcagctaagaagtcaggaaataaaatacaggaaatggattaatctttcccttttgcaccccttctccagtgaatcttttcttgactattcttaagctttgaacttttttttttttttgtggggggggatttggcagtgtgttaatttggtgggcctttctaaaagccaacgtatattcctttgacctcttcayatagtattctgaaactcatggcattcaactttgtgtcttgctttcacttgggtggtcacatggccagatgaatttttactctgcttgactctttaaatacttcctttcccactgtgggaagggaagatctttgtggatttccttctgactctaagcaaggtcccatgccatgttggtcctcccatgagggagctggttttttgtttttttttttttaaatacatttgacccaatttgtactagagtgattgctctatttttgggattggtttagaggcagctgaacgaaacttatttttcatctgtagtaaatacctttcatttaatgtgaatggtaaaatcaaagggcagacgctgaaatgagttgcaaggctgcatgtatctggaagctgctggttttctttgcctgatagctccatgggaaagatgcagttgagcgatagagtgagatccagggccagctttatgtatgatgtttctgcctgttaccagttacctagtaaaattatgactttttttggggaagaaacgtggccatccccattgatccaatgtgtctttgttctagatagtatgtaactcagctagttttgggatttggagactaccttggggggcagaagttttcccagggatagtttttgttctttatttttttaaaaatataaacactctcaagtttctctgcagctttcgtttatggacttgcagggctagtggaggctggagtcatggaaacggtgcaactcagttcccacagtaatagccctcctagttcagtcaatagcagtatttcctcagttccacttactgaaagcaaataccattgattttattattattttttttttagcacagaggaggggaatgcctctgtatcaagtgtcagagtggggatgattacaatatcatacttcactgtgatgaaaaatgctttatttcatatcattcagtttcttataagcaaaccgacatggttgaacagttttgagtctgtgtaatctgttcctggtactcttcctcccggtgctacctcttacttctctggagtgtggaactgcttgaaattaaaaatgtccagaatggagatcttcatctgccaagtcagaccttctttgatccctactgatggctgcactcacctctaagccatctctgaaccagcactaagcgcccggaggcaaaggcccatggcccatgtctctctatccccttatctagcaaagtgcctgatgtaccaggtgctttttatttgtttatttgtttttttttttttttttttttgaggctctgttgcccaggctggagtgctgtggtgcaatttcggctcactgcaagctccgcctctggggttcatacctytctcctgcctcagcctcctgagtagctgggactacagacgagcgccaacatgcctggctaatatttttgtatttttagtagagatggggtttcaccgtgttagccaggatggtctcaatctcctgaccttgtgatctgcccgcctcggcctcccaaagtgctggaattacaggcttgagccaccgcgcctggcctatatgcacatctttatcctctggagcgtcttcaaaatacagttaatagtgaagcattctgaatccccagccatgcctgatgcagtggtaggggtatacagtagatgttcagtaaataagtattgctgatgtgcaccaagcgaatgactttcccaggagaagcgccaccatcattccttcctctgagccatgtttcagattttcttgggtggcaggtccctttgtggatttcttgcaggtccttagctgggaatgagtgggaaggtgtacgtgttattcctgaaaagcttagggtctgcggcccttcttgtgcacctctgcttaaaagagcccacagtgttggctttcatagcagagcagtctaggaaattttgtactctggttccagggctcagagtagcaagagtgctgggacctgtctgagaagcagtgctgggctgtggatgcttgcctgtggcaccagatgccttacagtggccaggaatgctgcgggacagtctactttgattgctttctttcctccatggctgagatctgagtgtagtgttaactgggcttaaaaatcaagtccgttgtatctgcatggtcacgtagttcggcatctcatggcttttgcacctagaggtgtgaaccataatacctgaaacacaatttcataacctggctccttgggcttagcctatatggtggaggttaggtctgtatatcatcaagactgtgtctttgcatggttgtcattctgttggaattgaactttcttatttctgtaggcctaggttctgtctattcttctcagacagctcatatgctgcttcttcccttcagccttctctgatacttgtccactccccgcctgcctacatctgagtacttgctttccctctggacacccctgtgcccagtccaactctcctgtacagacaccagcccctttcccctggtttataactgttgtgggaagtggcgtggagtgtgatggtctgctcatgggctgtggggtctgacagcctgactctttggctgattagctgagtgactttggatggaactagaatatgagttcctagaggctgagactgcagtctgatttgggtgtatagccttgtgaacttaatcctgtgcctggcacacaggaagcacatcaggaaatgcacgtcaaatgagtgaataaataaatgaatgaccatacaaggactccatggtatattcttgtagatcattagttaattatcaacaattggctaatgattaatgtttgcctgagaggctgactttttgtccattagtaatgacatcccaggaaacacctggcagagttcgtctttaatttcaggagtatatctttctttcttggcaaatttaactattaaagagagaagaaagacaagtacttgatactttttgaatctgtaagttataaacctgtcttctgtattcaatgttgtatattagccacattgcagatgattctatttggatggatgtgtgactgtcacctttcacataaaaattgattgagccagtcatagtggtatgtgcctgtagtcccagctatgtgggaggctgaggcaggagtcttggttgagcccaggagtttgagactgtaggggactatgagtgagccactgcactctagcctgggtgacagagcaagactctatctcaaaaaaaaaaaaaaaaaaaaacaaaaaaatgtggtagaaggggagagagcctcaaaatgaccagagtagatggactcgtgtagtaaaactttacccaaagttggtttcctaatgatataatgtgaaacagtctatgtgctatacaaataattatatctcttttgttaagccttacgtcattttgacaaaggctttacttgattgagtattgacggcttttccaaaataaaatccagctcttaattgagatttgtggctgggcatrgtagctcatgcttgtaatcccagcactttgggacacttagcagggaggattgctggaggccaggagttcaaaaccagaatgggcaacatagtgagattccatgtctccccccgccaaaaaaaaaaaaaaaattagctgggtgtggtggcgtgcacctgtggtcccagctactcaggaggctgaggtggggggattgcttgtgcctgggaggtcaagactatagtgagctgtgattatgttactgtactctagcctgggtgacagaatgagaccctgtctcaaaaataaaggaaaaaaagaagaatttaggttttttactattaaaattccataagaggaattccagtgggggtccttgctcatttggtttgtttttttacaatgtgaatatcattattttatagtcataccttatacaacgaacctccccatctagacccttcactagtgagactaccttagggtgaggatatttgggtatattagagtattagccagaactctttgggttacagattgtgggaatacaactcactcaaattggcttagctgaaaaaaaagtgcgtatgtatgtacaatttataaactcagttaaccaaagagtccactgggtagaaatggcatcagacacagctggaaaggggggggctgaaaagatgtcaccagcattctatccctgccctgcaccctcgggtttctgagccagagtctgactgacctctastaggtcagcctcacgttgcctatgtgtacatcttcctcagctcattttgaggagggcatgtggggacgtgcatttctttctttttttcaaattttattttattttaagttccgggatacatgtgcaggatgtgcaggtttgttacataggtaaatgcatgccayggtggtttgccgcacctatcaacccatcacctaggtattaagccctgcatgcattagctatttatcctgatgctcttcctcccacatttctttttttttgtttttagcatttattttaggtttgggggtacatgtgaaggtttgttacataggtaaacacaagtcgcacaggtttgttgtacatattatttcatcacccaggtattaagcctagtacccaatagttatcttttctgttcctctctcttcccccaccaccccgcaactcaagtagacccagtgtctgttgtttccctctgtgttcgtaagttcttatcatttagctcccgcttataagtgagagcaaggcatttctttcttaatctcagcttaagttcggcattttaacaatgattgcatcagaaacagagacctctgtagcagattggtgggtagttttctttttttttaaccttcctcattggtgtttgtttactttttaactgtctgacaaatgtgaaaagtacccaatacagggtgacagcatgcccagcagtagagacacttgggtgttaaataccagtggcggtggggacacgccycaacagaccccaacagcttctcaccaaagaaagttcctaaaggaatggaagaggttctagaattctggaggtggggtgtacagggagggaccatgtgcactgttactgttgagtggacagatgtgcagaagggaggggtgtcggcgggtgtccctgccccagcaagggtagagggctggttagcagttgatccaggagtagatgttagcatccccaccatgcagctacaggatgtggtcctcaagtcctgtctgctcatgtgatggaaataaggagagtggtggaggcgggggccttccttttttaattcaggtgagattggtattctcccagctggggttcctgtgggctgtaagggtgtttggctgggcaggcaaagccggaaatgggtggtatggaggaagaaacagaatagctgaagatgggatgaaggaggaactgcctgaactgatcagtgagctccacagccccctcygtgtgtgtgtgtgtgtgtttgagagagtaagagagagctcatgctcatgagtgtgtgagttaggggaaaggtggaggtgggcattgttgacacaggccttgcaggacgaagccttcctttggtggctttaattaagcagggccccagacactgcctgggctggagaaaatgactttcttctccagaacttcaaagcaattatttttgctaattttttccttcctccctgttaggtgagtggtagttttagaaatcacaggacatctgttgaaattattgaatgagtgaacgcgaggtgaggctggagggaatcaggggctgacccgagggagggcggggaggcaggtgcagactgctcagtgagtgtggtgggatcccggtcttggctggccctgtaggagcccagccagggaaggcaggaagaggtggcctaggttagctttgcctggggattcaaaggggccaggcgagaggctcatgctctttctccttccctttccctgccatgctcatcttctgagggctgacgctgaatccttttcctgtgtccgtcagggattcctgcataacatagactcacagatacttttttacagctataagaggacgtatttataagaaaggaaattgaggcagctttattcaacaaatattgattgagacctcctgtgcagagcacagcagccctgtgtttctgccttccagcccgctgctgtggctccccatgccttgttgtgaaggaaaacctacagtgtggggttggaaaacagccagatttgttttcatattttgcattcttactataaatcatcactcaaaattgacacaagtaatacatgaatacattgtttcaaataattaaaacaatacagataaagtaacaaacccctttacctacccaactccttctaattacaatgatcagttccgtgtgtcccttccgaattgtttttcacagcgtgtgtgtacgtatgtatatatcacctgtgcattttgaaacataaatacagtttgagtattttaaatttcgtgcaagtgggaacatgcattctatggcttcctttttcccactcaatagaccttacagacctttccatatctgtatgcagaaatctaacaacttcatagttggtgtaaaatattccatgtatgaatgtaccacagtttatttgttttctttgtgatgaacatttagggtaattccaaaagttttactgtttcaaatcatgctgcattgaatatccttttgtatgcttctttgtgcatgcaagaaaacgtttgtctgggatgacaactcagaagtaaactctccgggttggagggtatgtgcgtttttaatatccatgtttattgccacatcattcttcactaagcctgtactcttttacctcacaccacatctcactgcctcagcagtcatttcactctgcagagtgacctcatgtgttctgtatcttaggctgtacaaaaggaagtcttgggggttgggtctggcctctctctgggatgttagtagcatctggagcatctggttagagtagaaagtccacaaacctgagccctagattttwggaatctattttgcaccagtgaccagataaaaggcaccaaaacttattcttgtctcccttgctttcagtcccaggtgcttagatactattgtttcttttgagtgaaatattcattccaggtagctaataggtaaataagttcctaatacaaaaactgagtcttattttggaacgtttgcttgctacggactggtttcatgacaaatactgcctttatgtccctgttagttggggaagaagaatatccaatccggtatgtctctgatgtcccgtgttcttattatctgttttattttcacacacagtaaaatctcgctattattatggtgtttagggtttgtgcccttcttatttccgaaatctctgaggtggtttagaaaatagaatttgatgaaagtgggacaatggggaatggaagcaaagtctacttgccagggtgctcgaggggaactgattgctgacacctggacatggaattggcctcaaggtttcccagcagcggcggcgaaaaagagtacatcctgacacacagggtttttatcctttcgacaaagggaagcagccacgctcattcasagcagcactttctaggaagcacatccaaggaggaatctccagcgcaggtccttgtgtaaggtacattgttggagcacaatgagccatgtcttcgccgtgcttttgtcrgggtcagaaatgccgcgcaagcagatggtccctgcattcatgtttttcaggggtcagggyacgacattaaactgtggtataatgaaaatggaagtacttctcatttctataaaaacgctgctttttgattatataaattagtataggatgaaagctgggaagatgaaaaaagagtagtttaacatagccattatttaatcattcataaagtactttttaaagcatttattacgggtaaaatatagtcccattagacacattccctctttgtgctaacttggtttaactcaaaatacaaagggatacaggaatttatgcaaagaacatcctcccctgcccccgtaaaaccatatttgaatatatgtggttttattattttactctaatgtaatttaaataaatgaccaatatttttaaaaataagaaatccttgaatattcttcagtaaatagataacaacagggtataatgaaacactgtttatatttaaatgactgctttgaaacggtgtgaaagcagcttaaatgggtaaaatgctgcccttttatgtcagtaattagccccttggtcttttttcacgataatgcaaaattgtacttctctgtaggcttacacaaattctgaattattgaaatataaattaatggtgaatctttctaaagctcttttcagaatttttatctggtgggagtgaaattaaaacatccaaaattctaaattagaatgtggcaaagtagagacagccagctagaatttggtaaaagacaggtgtttaataaatcttttcctagacatccatgggttggtactagtgtggtggggtagagaaagctttggcgtgttttargttggccaaatgaatcagttaattgatgttattaaagccaggtgggacaatagtaggttagaccgcctggttttgattgaccctgaatgaggaatcacagacatgatgaggttgggattggagaggacatcagaaacctccatatgggtctgttcctttttcagacccgccagcatgacctgccctgggttacacagtgagagacgaaccgcatggggatgtagggcagagcatctgtctcccaatctgttttcttcctacccacctcagttacaactatgactccaggttgaagttgggcatctcctatctgaccaagggacagggtctaagaacagcaggggcagtgatgacaaaagattgtctctttaaagcaagctgggcattgagtcaacttttcattatctcttcaattattttctttgtgtagtattaggtcggtgcaaacctaatgacggtttttgccataatacatcttccgaaagatagtttccatcacctctccctcccctgcttaatttcataaaatactttattgctttcttcatacataccaacctgtagaaatcatttgaccatagattgccacatttattttatggaaatagccagggcacaggccagcggatgtagtagggcaggagagaatcagcagagctggctaacaaatgcagtgggtctttcctcagtttcttgtttttgtgtggttagcttgccctgtctttctgactataactggaggcacagtggttattgcctttgttactagctgacattggctgacattgctgagctaggtgggctttctatatagggtcctgtgctgaataacagtgtttcagttcatcagccaagatcaaagtcggtggtcccataagattataatggagctaaaaaattcttgttgcctagtgacatcgtagtcattgtgcctttgtaacattgtagcacaattactttattttaaaaataaatttggtagccaggcgtgcctcacacctgtaatcctagcactttgggaggacgaggtgggcagattgcttgagttcaggagttcgagaccagctggtgaaacctcgtctctaccaaaaatacaaaaaaattagctgggcgtggtggcacacgcctgtgattgcagctactcaggaggctgaggtgggagaatcacttgagcctgggtgatggagattgcagtaagccgagattgtgccactttattccatcctaggtgactgagaccccgtctgaaaaaataaaaataagtaaattcaatgtagtctgagtgtacggtatttataaagtgtatggtagtgtaggctttcacattcactcatcactactgactcactcagagcaacttccagtcctgcaagctccattcatggtgagtgccctctacaggtgtactgtattttggcttttatacagtatttttactgtaccttttgtatatttagatacaactggtgttataattgcctatagtattcagcacagtcacatgctgtacaggtttgtggcctagcagcaacaggcgatcccatataacctaggtatgtagtaggtggtaccatctaggtctgtgtaagtacactccgtgttcacacagtgatgaaattgcctaacaatgcacttttcaggaccctgttgtttatacctgttgttaagctatgcatgactgtaatctcctctaattcccatttaatctttaccataaacccacaagggagatactgttaaaaaaatcctcattttacaggtgaggaaacaaggctagaaatggttatattgcttgcacgaggccgtgctcctggtaattggcagggccaggattcacacccggacttctgactcaagcgcccacgctcaagtactaggccatgaaagggagtccaggctcacaggctgatgatgcctaaacaccaagcggaggagggtatgaccaaagggcagagccagagaggagaccatgggggagctgacggcagaaccttttgggggcgtggggggtgggggtctctctggctaggcttcacattcatgcttttgattagtgattggaaccaaggtctggggactggcatagaaactttccaggttaggattcagtcccagctttgcctttcactggctctgtgactgggtcaagccctttctgcatctgctctttctctgtggaagaggaaataaaatggctaaaggtgttatcacaggccctggctcctagaaagcactgtgctgtgagccagaggtttaagatgggcttcagcctcacagcagtcctgtgaggtaggtgtcgttagccttagctgtagatgaagaaactgaggcttgggaagaccagccggcttgctctggggcacctggtgaagagctggctggatggaggattggatagtgatgggtccctcctgccatactagaagagcttcctggacagtttgcttggattggagtttaatttctaaagccatttttttaggtgttcttaccagactgagctagtgcatctgtcccaccgaatagcctaagactttagtggtcatagagggttttgcagcggatctggtgaagaaatgaactgaaaatgagcctgctggccataggagggcctagacctggaccataccccatcatcatttagacaataaagggtggttaattcccttggaacaccaaggacagagagggggctagtttaatggtcaggatctgattctgctgcagctagaagactgaagcctgcctctacatggtggtccggggtaaaaagttcaaagctcagcacactacccacaaggcttggtggtttctttacgtgtgactttctcagccgacttgaaatccaccaggtgtctcttgttctctgcttggcccaggtgggagcccctgattgtctcttgacttaaatgttgctcagaagaggaaataaagcaggagctaaggagcacaacgatgtcagggggattctggcccgatggtcgtgcagttcctagatttggagtcgtgaaaacaatcactaacacctgcgtggtcagggacggcctatacggcacttcatcatagggtctgatttttatcctcacagcagccttgtgaacattgctgatatttgacacaccaggcagccaaggtgtggggcagttgaatgacttgcccaagagcaaacagcaagtaagcagcagaattaggatgtggacctctcctgccctttctgccacactgtgttcctcgtgtcatggagtcctccctgcaggtcactcgggtaagagaccaaggctcacagatgggagctggcttgccagagctagggctcctcaggacccaggtgatgggcttgcttctctgacatgtggtccctgacctctgttttctcacctgtaagatggggatcatagcattattaatagtcatgttgttgagaggattaaaggcgattttgcaagggaaccctctgtgaacaacagatgctggcccattgatttccttgtgcatctagtcccactttctcaggcatttaggctctgccctgctctggctctctctctcttcagccttccaccgtatcaggagagtggagactctggaggaagacagatcttggtttggtttctaggtttgatgctgactgactgggtttgggaatgaacaaatgatctcacctcccttggtctggcttcctcatctgtaaaacagagataataattctcatctcacttttcatgtgggatctttgtgaggagtcaatacaaataatgtgcgagggagctctcatttaccagaaggcattagttaactggtcaagaatagttcaagagagtcttacctcccagtgaagtttaaggtttggcagtatctgagcactgggggaatcttttcctataccccccttgaagtgccatagggttttgagaatcagtcacacggcacacctgttaaatccctgtgttcttccatgattgctgcctttctttgccttatgattttttcccttattgtggcctagtccacggaggttggaaagaggagtgtgcccttcccttcccttccctttcctcagcaaggggctagtttctactcatagctcagggctcacccacagcatagcgctgtgtggaagcctggtgggggcactgggtgagtggtgctgcagcagaaaggcctcctgctgagacgctgaggtcagcattttcagcggcagggagccctgtgactgaaagcagaaagaccaagtacagtgtgaggactcgggttggtgtttgtggccacattgatggcttcatggaagtatgttcccctctgtgcaatgaactagtagggcctgtgtcttggggcctgcaccttttgattgcaggcaccaggcccagcattttttctgtgttgcctatctggacgacaagccatacggtagttactagcgtccccattttgcaggtgaggcagatgaagctaggaggcgttaacttaaatgactctttgctgagggaataaacccataagatgacaaatgaggtctgtggtcactttcttcactgttgcagtgctgtgcccagcactgagtgtgagggatgtcatggagagaatgctgaatttggagtccrgtggcctggctttgagtccctgctctgtaactttacttcgttgtgaccctcactttcttcattggtcataaagcaggaggtaaaaatttaaatgagatctgtgtgaaagcgttttataatctacgaagctatatacacatgggcggcatcatccttatggctgtctgttgagagagggcctcgaggagaggacttggcttcatcttgccttctaatccctcactgcaaggccctgaatcctaatccctcactgcaaggccctgaatcctaattccactccatctctccatgatgccagtgccacatctgggacctacgcagaagagtcatacctgccagcacagctatggtgattgtgcttgggaagaagttgaagttgcagaaggaaggtggtagagagggactgaaagagccaaccaggccagagctcgacaggaccctccctccttccctacccttcagacaggagctgcatcaccattttcttttccttttctttctttctttttttttttttttagacagagtctcactctgtcacccaggctggagtgcagtggcagtatcttggctcactgcaacctctgcctcccaggttcaagcgattcttctgcctcagcctcctgagtagctggggctacaggcgtgcgccaccacacccagctaatttttgtatttttagtagagacggggtttcaccatattggccaggctggtctcaaactcctgaccttgtgatccacccatctcagcctcccaaagtgctgggattacaggcatgagccaccgtgcccggccatgcatcacgattttcaaaggccagcttcctgactgttccttgaactccttgagataggtatttactgtgcttgtgacatgcaaactgcaaatrattcttgcctcataatggataggcctgtaacccagccagccctctaggcaagcaaatgttatttcctagttttaagtgtgagcttaatatgtgaattaatttcacatcttcatcctcttcctaaatctgtctttgttttgtctgatgaataactgaagtaatggatttggtcacaccactagctgggtagccacctgaggctggagttctgatatgtgggtcttgcctgctttctctgcactgtggctttgcacgtcgggtgctgaagctggggagctggaatcagctggtgtgttctctgtagaactgagaggactagcaccctggggtggaagcagccctgccttctgaaccacagacttgcttgtgtttgatcttatgctgttttcttactatttctgataagaatgtgaactccttgtgagcagggacccagtgtcccatttctcttaaatcctctacagctgctggcatgggatgtttggtaaataatagaccatttaatgaagcatcactctgtctgtaccaggcaccttgaagttgctttgattgctttgcctgttttcctaataggtgtccggtggtctctctttccaatgcaggaacagagtgctggaggtagagactgtgattgcttaatgaagatatcagaacttgcacaacccacacatagggctcccatcaaagcagtagttctagggctgcaacctcttcccaaagatgttgcaacacttgtcttcagagccagtttctgcttttcattttcctttgcttctggctaaaaatgggatcctgttgtcactgaccttactccccgtcttttctttaagaaactcttgagtatttgtaagaaaatcaaatctatcttcaaataaccaagttttcttatctttgagaatcttgagtgcaatgtgtcatgggctctgaaggtcttacgttgaggaatggcaatattatcagaattacgtgtccagcttcccaagcttactactttgaaggaacacatatttacacaattctgatgtgtttattaaacaaacagctttaccacttcgcagtcacgcttctctaagtctgcagtctcgtctggcctgactttctccttgtgccaagaattccttcaccttttctctttagcctttggccccaggaaaatgggaaagtaagatattttactcctggcyaatgcctgatttttagaagccttcctcactccctggcaaggcacattttcctgttacctcagagtaaagagactcggttctggggttctgcatagtgatgctacatgcctgacccttgctagggtttgagggtccttgggaactgatgcaatcgtagaagtcacagctgtcattcaggttatttacagaagtagacagaattgcttcacttgccagcagggcgtcttgagcttgactcagaaggatatgtaagtttctgctttttttttcttgcctgtttcaaaaacgcatttttgataccaggaaagttagacaatttaatcttatctgtagcagagggagcttcatccttgctgtgtgaagctgtgcgagacgacaaagactgttgtagaaagaggcctcttgcttataattgaagcatctttgacctgagtcagtgttctgcagccaggatcagataatcagcactggtcactggcacctggcattgggacctggaggcaaagaataacagaattaattggtttccagtaagtagcagggatcatggcatgttcatactttttaaaagaagccttattgagattgagatataattcacacaccctatacttaactaatttaaatcatacaattcagtgttttttactatattcacygktaagcaaccatcatcaaaatcaactttagaacattttcatcacccaaagaaaccccatacctattagctgtcaccccattttccattctattccccctccctagccccagccctaggcaattgctaatctgctttctgtctgtggatttacctattctgaatatttcatataaackggatcatacaatatgtgtcctttttgcctggcttagcataatgttttcaaggttgattcatactatcgtgtgtatcactacttcattcctttttatggtagaataatcgtccactaaagggacataccacatttatttatctcttcatcaactgatgaacatttgagtgttttcccctttttggctattatgaataatgttgctgtgaacattcatgtgcaagtattttgtgaacttaagttttcaattctcttggctatattcctgggagtggaattgctaggtcatatggtaactttcccattttgagggactgccaagctgcttgccaaagcagctgcgccattttacattaccaccagcaacatgtggaggttccaatttctgtacgtctttgctaacacttgttattgtctatctttttaattatagccatcatagtgcatatgaagtggtatctcattgtagttttgatttgcatttctctgatgactaataatagtgagcatcttttcatgtgcttattagccgtttgtatcaaatcctttgctcatttttaaattgaatttttaaaattattggtttgtggcagggcatggtggctcatgcctgtaatcccagcactttgggaggccaaggcgggtcggtcacctgaggccaggagttcgagaccagcctggccagcatggtgaaaccctgtctctactaaaaatacaaaaaatagtcagacatggtcacaggcatctgtagtcccagctacttgggaggttcaagccggagaatcgcttgaacccaggaggtggaggttgcagtgagcctagatcatgccactgcactccagcctgggcaacagagtgagactcaatctcaaaaaaaaaaaaattattggtttataagacttcttcatatattctgtataccagttcctttttggatttatgatttgcaaactcctttctttctttctttctttctttctttctttctttctttctttcttttcttttcttttcttttctttttctttcttttctttctttctcctttcctttcctcctgtcctttcctctctccctttctctttcttttccttttctttctttcttctttttttctttctttccttttttcctctctctctttccctatttctttctcttttcttcaggcttttgccctgctggccatactggagtacagtggtatcatcatagctcactgcaactttgaactcctgggctcaagcaatcctcctgcctcagcttcctgagtagctaggattacaggtgtgtgccacccaacctgtgctaatttttaaaaatttttgtagagatgggggtcctgctacgttgcccaaactggtcttgaaatcctggcctcaagcgattccctgcctcagcttcctaaagcattggtgttccaggcatgagctactcactgctggcctcttcaatttcttgatggtatccttcaagcacaaaagtttttacttttgatgacgcgtaatatacattgttagaaggccatagctggattgagtcttcaaggttgcctgttccaactcccttgtcggagtaacgggaggcactgtgatcagagaggaggggcctttctgagggtcacagacccacaaaaccaggactggagtataagtctctggactttcaccttgggacattctcagtttccaccccactgtttctgagggtcgaaaggtttgggtgtatatgtagggaaagataattggtaggctctgaagcacacagttcatttgtttttcaataaggaagagtcatgttagaaattttgtcctttcttccagaaggtacactatatagcctggagccacactgtccaaaatggtagtcactggccacatgtcattataagaacttaaactaattaaaattaaatgaaatttaagattctcagtcataaagctgtattttggctaagcattgtgacttatgcccataatcccagtattttgagaggctgaggcaggattgcttgaggccatgagttggagaacagcctggaaaacatagtgagaccccatctctaccaaaaaaaaaaaaaaaagaaattagccaggcatggtggtgtgtgcttgtagtcctagctagctacccaggaggctgaggtaggaggattgcttcagcccaggagttcaaagttgcagtgatttgtgatcatgccactgcactctagcctgagtgacagagcgagaagctgggggaaaaaaaaccacatttccattgttccttatttatatatggccaccgtattagacgacataygggttgtttccatgattgcagccagtcctgttgggcagcactggctatacccactggcattctgtccactcctgacccagtggtgccctagacacccagctgtgatctgtcttctgtgggtccctcatctacctgctgctcaggcttcttctttatgtagttgcctctgggcttcctagcaagccccctacccagactagatggtctgtgggccctgcaggcagagacacttcttctgcatagtttttggatgtggttgccagtataaaggctagtgcctttcctcacctcagccaataggtgtgacttgcagaaatagagctgaaagatgcttgcaagaagtgtgttctttcttggagaggttagctcctaaaagtgaatgctgaatgagtggatgaattgatctactctttggactaggggaagatgttgaakaattttttatcgaaaattttattgatatgtaataattgtacatatgtatggggtacatgtgctattttgatacatgcctgtaaggtgtaatgatcatagtgggtaattagggtatccgccacctcaaacactatttctttgtgttgggaacatttcaaatcttctattttgaaatatacaataaattattaactattagtcaccctactgtgctatcaaacactagagcttatttcttccatctaactgtgtgtttgacccattaaccaacctctcttcatccccctccagcccctcttctcagcctctgataactattattctactccctgtctccatgagatcagcttttttagttcccacataagagtgagaacatgcgatatttttctttctgtgcctggcttatttcacttaccgtgatggaagttggagtactctcgagtttagttcttttggctgcattggttggtggtgttttgggtgggtacttcattttagaggcagtcagttccaagaatttgcaagatgctgagtgaagtggggcaagaggcaggagttggaacactgggtgttctgagacagtgacatgagggagatgggtgtagtcctgctgggtgccctgtgtagaggtttcctttatttcaggttcctgtaaccctgagggccatctgagccatcaatccaaggtcaacaggctatggaaaaaatctcaaaactgctctatgtaaaaggatgttttacccacatcttagtgatgggagatactgtagtttggaccaagctaggatattatagaccagaaatgagtctggggactatctcagacatgagaaaggattgaccaagaatcatagcaaattcacagtggcacaactgagactggcatccagggcctctggcgcttcgccataggcacattccaagtgccatggtgtatgtcttcatttacacaaggacaggtacttcatacacacaaacaagcaaagcaacttcttggagacattgcccaggcttagattttaatttatttaacccacgttaggcactcagtcctgccttcaggcccccctttgccactctcataattagaaggtattaagaaacctttcaattacggcaagatcaccagggttctcatttctttttcttatctccagcctatctctagaatctattttttgcagggaggactgtccttgactttaaagaaagcattcagaaacaaagagacttgttatttttgaggtcagcctcctccaccagactctgagagccttgagggcaaggacagtgttgtctcttatcactactcaaggactggtgcagagtgttcatttggtgaatatctgtraaattctcatttttaggagaactcccttttgctgggcttctcaggtatgaggtcccttttccatatggtcctgaaactttatcaattccagtttagaagtagcgacctgargaaatggaataattcttctgtccatggtgaggggaggatggggggaaggtgctcattttgcctttgaacttgataagagcagagaacagtcaggtttgtgctgagaatgtaagggttactttttcctgaattgggcagtgggtggatggagcccaacaggacatcctgggaaggattcccagagcagggagagggcaagcacagaattgtggaaggaattccgtgccataaacacagaatatcttatttaacagtggaacttttttgctgtcttctttagaggtggaaaacagttctttccaaagacaagcttaatgactgctgtgccaacacacaaarctacaagatacatttaagcatcagtttagcaccagaaatgcagtttacagaagatttgcatgaaaatcttaaaaacaggttgaaaatgtcctaggctcagctagtgcacttttaagttagtaggaacagggctctagggatgagatgatggagcagggatgtgacataggtcaggggtacatgtgtacctggcctttgaagcctcttttggggttcattttaattaatttcttgttcagcttttaccatgggcctaagtttctctggttggagcagagtaagttttcaggctgaatttcttggatcattgcctttgttttctttttcacatagcctgtggatgtctggccttttcagccaaggaaagaaaatggaaatggttttaaacactcactcacttgagccatgaatttcaaccatatattaattttgcttatttttggattttcaaatcttctgagaagcaatgaaatgacacaggggcaggccactagggtgctttggaggttctgcgtggcctggagcagtggggagaggctygggagagtggaactgtgccctcccactcgtgctacccacacagcagcctcctccctcactctctccttcatgtatgtgtgtttgaggttctgcttagcactttatttggggaaaataagttttctgaaaacttattttgtaggcaatagaggagagattggtgtatgtcttatccttactcgagttggcaaggactctgggccgaatatttagggcttggctcttgctccctctacctaggtggattatgcagtgagatctcacttgcctttaactcatagttattgcttagctcttaggagcagtagaagtaaaaatcctggtatcgtaaatgagcacaatccctgtaataagtgatttctgtgtattattggtagcttgaaaaatattaagtgttacctccattttttaaatatgaaataaagggctagatcaggacatgaactcattcctgttgtcttccagagctattttactaaggaggagatgacccagtggtgaagagtaggtagcagcatgtcaaacctggtagctttgcagtaggggaggtgggcagtacagtgggaataagctagaactaataattcagtgatcatatggggccttgcaggtttttgttattttctgcttgggtgtaggttttgctttgcaaagtctgaaggtgacctatataattcccatatatttggagctctcaggatgtgccaaggatcagcccaattctctgaacgttaactgagggagtcaggagtccttcctgacctcaagaagctcacagttcagttggggatagatggccttgagcttgtgttttagagctctggtcccaggtagtgagctcaaacccagcacagactagattaagccaaagaggaatttattggctcacattgctggccagtccagggataaactggagtcagctcaggcgctcaaatgatgtcaccaggatctggtttctctctctccagcctggctccacttcctgtatgttgattccattctcaagaattctcagacacgacctccccttgtaattgcaggatggctgccaacagtttctaggcctacgcctttccaccttccagcaaaagagagtgtgagagtctttgtcccagtccttccagatggagtcttgtttcttcccattgtctcagattgggtcacgcgcacatccggaaccagttgcaaggccagggacgtgtgcagcactgctgacgtggggccaggtcatgtgcgtcacccctcgacctggggaggagccaactctaccctaagttcctgggctaagaatggaaagagagtcaagtattggttattggggaaaggtaatgatgtaggcttgaactctggcctgacccattgtcaggacagcctgaacttggggctgtattcccacctgacatagccttaagtcagaatttattccagtatgagtacagcatcttgttaccatgtggttttagctgcactgtggatttagacaccaaatcttgtcttccctgagaacattgtccttcctagaggtggggtggaaaacttatttcaggtaagcattcggaccttgaccctaaccttaatggtgattactgttcgaggtttttcaaacacatagtgaataaggacagctggtgcaatggcacgccctccaattggctacgttacacagataaacattcttaatctttctgaggttttgtatagaagagtggagaattgtaccaacttttctccccccggttgtacatcttcactttgtcaccaagcctggattcctcatctgtaaaatagtatcccctcagagttgctatgagaaataaatgaagtgatttgagtaaggcatggcacctggaacatagtacatcgtgcataagaagcagctattgttattatctcctaatttgtcaaatgagcagggcgtattgccagataagctctttaaagttttaatgttcacattctataaatctaggaaaatctttcctccactgcccacccacacttggattttgagaactgcatcttcattgagggtaacgtgttagaaagctctcaaacattatagccctcacagaatgtatagtacttcataattcaccaagtactttcgtgtccattctctcattcaatcctagaacaatctatgatgaaacaaagcaggtatcacaattcctgttttatagatcagaaaacttagggcttagagagatcaaatgacttacccaagggcatagtggctggaaggttgcagggcaaggcctattgccagaatcttctcagatatcccatgtctgttggagcattcttctactccagtgtggatttgcctttctgatggctttgactggagaactgtattgggtagttcatcaaaataagaagscttgagttcatatagtgaaaaataagatcaccttttccctttgttcattggcttgatttattaggattgtattctcaaacctttcctgctattaaaggaaatgaccttagtttgtgttgcatgaaatagcattaagtcaagtttacaacatttcaaagttatggtcagtagcattccaattagaacctaaaaagcttacctagctgaggtttaagtcgttgatcttggaaaaggtaaagacttctcagggaggttgggctgctgtgtatgacagctagaccctcagttcttggtctgttarcatgtggcccatttcttcctatccatgcccctccataaagctttgtgcgctggtagtatttacagtactggatgataattatggcattaattatttgagataaatggagtgtgcccagtagccaatagactattgttagagtattattagtatttttataggtcttttggatagcattctatttcaagacatttgaaaatgtagaccagattagtcaaaagcattgtacatgatctgtccatgagtgtaggctctcattagaacttctggaatcattctgaaatatacccagctagataatactaagtcataccaattaaaaggaaagacttgagtttgagttatagaatgttggagagaaatctagtttattacttttaatattgaagtcaaattttgatttttcttttatggttaatattacctgggtcctaagaaagattgcaaacatgttttcttaccttttttcttgtagaagctttatatgatgttagcttttgcatttaggtctgtggtccatttcaaattaatttcttttctatggtatgaggttggggttaagaggttaattccagccacctcccttgtgggtatccagttgctccagcaacatatgttgaaaatgctttcctgtcctcatttaattgctttggtacctttattgaaaatcaatggatcacataaatttggttctgtttctagggtctctgttctgttccattgacacatttgtctttatgctatctctgtactgttattattactgatgctttgttttaagtctaaacattggattatataagttcttccatttttgttctccacccctcacyacaagattgtattggctattctaggtcctttgcatttctatctaaattttagaattaacttgtcaakttctataaaacagccytctggggttttgattgagatgacgtcgaatctataggtcaatttggggagaaggatagcttaagaacattgagtcttctaatcactgagtgtgatgtatctctttagatcttctctaatttttctcagcaatgttattagtatagaggtcttacatgtattttatttatccctaatttttatattatttttgattttattgcacatagaattttaaaaagaatcttctagttgtttattactagtatatggaaacatgcttgatttttgtatatgttgccttgtacatgccaccttgtcacatttacttattacttccagtagtttttgaagattctttagaattttctatgaacacaattattttgtgaataaagatagttttgtttcttccattctaatacttatttatgtatatatgtatgtatgtatttttcttgccttgtaacattggctaagaccttccatatggtatagaatagaaatggtaagagtgtagacattcttgccttcttcttgaactcagaaagtgtttattctttcatcactgagtacagtgttagttggaggttctgcataggtgtcctttattggttgaggaagtttccttctgtttctattttcctgagagtttttattatgaaaggatgttgaattttgtcaaatgtcttttctacatgtattgagataatcatatggtttttctcctttattttattgtggtaaattccattgaattttgcatgttaaaccaattttgcattcccaggacgcacctcacttggtcctgatatattatcctttttatatattgagggatttgattttctagtattttagcataggctttttacatgtatgttcttgagggatattgggtctgtacattttctttgtaatgtccctgtctggctttggtgtctgggttgtgctggactcataatgtgagaaatagtgtggtaccagttgctctgtcatgaccagcagcagaagtctagttttctttaagtgtgtagagtgatgactgttaggtaaagagttagaattattttaatgatcagccaagagtctctgctaagtaacatgaggtatctgtgaaatggcatacataactgttgtgtatgaagcagtgcatcagagaggctgggaaatactttaagtgggttgagcaactcataccattccttatgctaaaattgtacttatattttattagcaaaatttcttttatcactgagagaatgaattatctatctgattgccactcataatttatggagttatcagttaataaggttttattgtatgttaatatgagactcatttttttcctttctctcctctttgggttgtatttcttccaagtaagagcttaaattcatgggtcagctagtactgaccagcatctgttgagttattttgcataaatttggttacctggcctcagataagaatgtttttttaatctgtattggtggcattgttggttgctgatactgctgtagtttgttcttgcaagacttctgtttaaaagaagggttataaattcagtgtaactcagagcagaggtaaagtatagaatggaattagaagaaaacgaagcatcaatttcagtaaagtagaaatcgtttattaaataagcggtgggtgacagggaattgggagtaaccatcctggttcccatagtgatggtgcatccaggaaaaatacagggaaaaagggaatcattatggaagagttttgggtgtgtgttgtcatgctttaggaaacttgccaatttctacacctctgtcttcagattgtcgtgtttagacacacatcccacacaaagtgctcagcagtacttcttgtgctcgtctttatcccctggaatctagaggatggcacctctgggggagttattgtctcacatgatttagaaagacctccactattttctttccaagagtcgaaggaaggtgggtgagttggcctggcacctataagcagggacctacaacactgcttgaagcacctggtgacatctgcttgacaggcttcccctccccactgttgtcaccacttccatgggtggtgggtggtgttgcacggtgcccatggggtggtgtgcatgttctccaatgccacctgccctgcctcagtgctgcctcctgtaacagtctcatttgtttcgctggagtatccttatcgaaaaggtcttggggaccatttgcctaaaatgttccccagcatgaaatgtcccccacacttgctctgcacccgtgcacatcctccttttctttttttttttctgagacaaggtcttgctctgttgcccaggctggagtgcagtggcacaatcagtgctcactgcagccttgactcctgggctcaagcaatcctcctacctcagcctcccgagtagctgggactataagagtcccaccatgcccagctaattttaatttttttttttttttttgtagaggtgagggtctcagtatgttgcttaggctggtcttgaactcctggcctcaagcagtcctcttgcctcagcctcccactgggattataggcatgagccactgtgcccagcctcctcctcatttttgtagacatatcaagtctggcctccttcaggaagccttccctaactaactaatcaagctccccgtgtttctttcctttaggatctattttttggatgtgtatggtttaatatacccttaagaataatgcgtttggaattgtaattgagaagacaaggtttacgttagcagattatagtctaactctgatttttagaaaagtgatatagaatagagacttaaaaaaaatgacattctcacataggttttggatatttggagataggaggaaaaacatgtctttaaaccacacaatgggaagtgaagtgtttgcaacaaccagaacatttaggttataaagtgtcagagcagataatttaggctaaaagaaacaaagttaaatgatttggtgggggcttgatttctctggattgacccccctggactattggctgtttscttcacttccagactgtctggtaagatttttctacagaggtaccttcttattaatgaattcttcccatcacacccactctgtttgaatttctgaattaccttctccttttggtttctgtatctcaactttcttcttattgagtcttctctgacagtttctttgagggtattgctatcagagtcagacatgcccatgacaagattccaggctgtgtaatcttgagcaaatcaatcttgctggtctactttttttcttaaaagaacaaggaagcttgccttgcagggtggttagaatttgagacaatgtatgttgcatgcccagcaggtggcaggtagctaataacaggtgtgtgcttgctctacaccagggatcccctcggtctttggtctttgcatatcatagatactcagtaagcgctctcccaaaggattactgacttaacaggtagggtaatgtttatagccaaggggaggtgagtgtcatcaggcccaggtttgtatgcctatttctactgaattgtcgcaaagttatgtttcatcctatttaccaagttgtatttacagaagactagtcctgttataacaaagcccattgaaacaacacccaggaagtagaccacaagaagtcagtgggtatcttactctgtgtcctgcagggggatctggaaatgaataagggagagagaaaatgtggagtgcagaggatgctgcctggaggtgagactttaaccacatgattattctcagttatggagcaatggctttgttccaggcattrtctccaatagtcacaatcacaccatagggctgatgttttttctrtcccactgaggtgtaaacagaggccccaagaggttgcatctggaggtgcgtgagcaaaatttggagagaagtaccaagtgggcacttcacaacaggtgaagagaatgaagagatggataaagataagtgttaagcactttttggtggtactggaactttatcatgtctcttgatttttaagaaaagtggcctattgactagaatttgagactttcattatattgttcagttggcttttgcatgtatattgcttttatgtttttgatgcgttttttcaaaaccctttaaattagttggattttatgttgttcttaagtttgatgaggtagacacttttttagctgggaggaatagagaggcagtgagtgtgttaacagaacacagcaacctcagactccagcccccgctctccttttatccagcggtgtgacgttgagcctgatgcatgacatcttggcagcagaggtgctggtgctctgtcaggctccgggacccctgactgaacatgcctagggtcatgaggaggtttttgttcctgtaacattggccacaactgcacagccagtgggtgaggatgctgagatacaaactgagaattttgcacttcgacctaggctctttgctagatcaaacttcttttgatgtcttagccatgatccctctgagatatctctctccaagttattaatatatctgtgtttcccatcatgtttccccttttgtcttggcttcaaagaagctcagagctaaatttattgcttgattatagttgctggattggccaaggtttaaaatttatgtttttaacttttttatgtgattccctccccattttcattttgatagtcttattgtttattgtatatcaccttaaatactttgagaagtagatcgggtctacgtttaaaaatcgcgtatgtgggaggagagggccattcggcaaatgggaaagagattggggtgactttggccaaaaaagtttgggatagatttttgtattctcttgtattatgttattccctatcagatggtctttgcagctcatttttctgtcttcttctgtgtggtcagaatcaggggagagtttttctttataaaaatgatttgttttcctgatagaacagtgctggtgggtaacattcagttctgaccttgtaggcagacctgggattcccagagggtgcagggaccgcagcactcactcttctttgtgacaggcctgaggcagcttccctggggtccccagcctgcctcctccacggctgctatggccgkgggcgctgagcacgtgcagctgctgcctgatgctcctggacagggaaggatagattttgggcatagttactaggtgtcactgtctccttttttcagcctggcttttacaagtagttgtaatttacttgacaaacacttatttggcatttccttcaatacgctgggtactgagatggttactgcatttttaggcatttaacggggataatagcatcatcgttaataattacaaatatgatcgatccatcatataggcaatacatttcagaagaatattattaaaaagactcatagtagtgggtgtatgcagctgtagtagaggagctgaagccactgagttaccccggggttcaagatggggagcagcattcccatctgtaggttgtgttcttgagtgggaaggcctccttggatacctctcgacagtaattccaggtacttgagctcacaaagaaagtgtctggggccctcagccctttggtgtggctcccagggacgcctgagttatttccagaagtggcgtggtgggtagagtgtgagggcmggcctcgcctcccygcccctctcccctgtgtggcttttcctttctgtaattcaactgattgcttttccttccaaattgctggcttaagctttatcttatctaattttatctcctccagccttgtacgtccagagcatcattagggcctgtgcccattctgtccctcccacttctcttggtctccctccacgtcctgaggggatagaaagackgagtctgcataacctccgcatcttcctgcctgggagggcrgctagggtggtgcctgcagcctctggaacctctccattctgtgtgcccctcaacctcayggacatactggcgtttcaggacctggccctgctttctctgtccccgtctctctctgcccactggtttctgtgacccacgcccttcccaccccattctgccccttttcctcacttgcttttcttaccttctgtcacattcacatgctcactatttctttttactccaagcatctgttcctctaaatcatgaactgtagttggcataattaaatatgtaatgtgtttattttaatatcaatatgtcttttcatacacatattagtaagagacttggctgtcagcgccgggccagatcaccatttgcagatgtccactcacgccagctcccccacggaacgtttcttatgcacctcatcagttctctttctccttgtctctctttctgtctctgtgtctctttgttctgtgtacatctctctgtatgtccctggcttcctctctaacacaaattgctccaataggccggcaccttttcctctccgtaaaccccagtttgtaggtacacacaggcacccaggcaagggtagagaaaccaaagagcgcttgttcacacttgctcacacaaggaccagcagagacctagagctgcatgccacgtctttattatccttgctgctagctcctctggtacagcagcactgtgacagtttggaatttgagcctgggcactctcccctgagtgcatcrgtgacgtaaaggcaggcaggcaggagcaatcacagcctcccgtcgcctgtgtgtcccaagtgagccccctccccaaagggatgtagggaagccagtccatctgcaaggtatctggagtggagtgacaggaagcagaggatccastattattggaatagattacatggtatgtgcttgtcacttccgtttaaaggtaaatacaaatctgtctttggcttagaattctagcctcctgacctggggggtgaatattgactggcaggctttacctcccatgtagaaaagagttgcgtgccagggttataaattagagctctgcattggatggatcttcttaatgttttctgtggagtggaattagaacatgttgtttcttttgaggttgcaaaaagcaaacaaggatccctttcctcccagactagtgggaagtagactaattacttgaaatcctgttttatcagccataaaactgagatgaaagctggggcagttatgaagatcctgatatatcctagaccacaaatttctattccttttctggaagagaaaaactgcattttaggtttagataatttggtcaaattttttaggctatcaaatgcaaagattaagtttctagagtcttgaattttagcacagagatagcatcacttaaccttcccgagtgaaaattcctgccttctaggtggtggggaagatcaaacgagctgtggatgccagcatacttaatatgtgttcagtagatattagtgacagattcagtggatatgacggctgaaggcctgggtggctcttctgggcttgttggttggtttcattataatgtatatggttggacctaagataacccatgtttgtgcttctgtggacactggtgctttcagggtcttaactatattgttttcatggaaactttgaaaggactcatggctccaaaaggggctgaaaagttttgaatttccttttttctttctttgcaaaagattttacagcttaagtcatgtaattaataacaggggaggttaagagtcaaagatttttctcttaccctggtcattttcgaagctgcacttggcatgggttgaagcaaatttgtgtcttcttgaccatttacttttttttttaactgagaaaatagattctatctctaatgaagtaattgtaaacagccttgttaacatatggtactgattttttcacagaagcattgttgaaatgcatgggaactaccaggttaaaagacataaaaatagacaatctatatagtccagatggtatctccaaactaggggatccaagtggcatgagaaactgtctagagcaggagtggcaaacacggcccccgggccaacacggccttatgcctctttttgtatggcctgtgaactaagaatggtgttttacattttttaatgtttgaacaaatagctgaagaatagtaatatcttgtgacatataaaaatggtacaaaattcacatttcagttaccataagtaaagttttattggaacacagccccactcatccatttacgtattatctatgggtattttcmtgctacaatggcagaaatgagtagttgcctaagatatttgctgtctggtcctttacagaaaaagtttgccaatctttggtctagatggtgaggaattttagttctcctatgtgttaactgatacatgatttcgttttgaagttcagcttttaactttcggttatttttctttctacttttattttttactaataaagacagaagaaaaccatggctggttagtctcactgctcagactatgccttctaatgtttttgataataaaagttaaaatgcacatgctaattttatttcaaacagtataagaaagcaaaatctctctcctacattgtcctttattccaattcctttacccagtgttaacatttaatagttaacattccaaaaaatgttttgtttatactagaatatatattcttttcaaaagcttttcttaagcttagtttactagtaaaaatactcttaaccttttactatgaaaaaaattcaaatatgtacagcacaagacagaaaagtgtaatgaaccctgtgtacccatcattcagctttcataactcttcgtcttatagccaatcttatttaatttgtggaatccatttcctgtattattttgaagcaaatctcaggtatatcatttttttctcaggtatatcagcaaatctcaggtatatcattttatctgtagatatttcagtatgtatctctaaaatataataacttttaaaaaacataaccacagtctgctaacacatgagaaaaaaataataattccttagtgtatatttgagcactgagtattacctataattgtctccccacacccacagttgtcttttaaatgtcatagtttattttactctctttgaattaggatacaggtaggtttcacacagtgtgacttggttgttgtcctttaagtctattttaatctgtctgttccctctgtacacactcttttatcctccttgctacttattttttaaagaaatgaggttacttgttagaggttttacatccccatagtattgtttaatatgttcctctctcctctgaatttcctgtgaatttggtagttggacctacaggctcatracattcaagttttgttttattttattactattttttagctaggctacttcactggtgacattgagtccttccaagaggaggcacttagtatctgattgtccttttttgtgatgttagtactcattgatgtttaatgtgtagatcaagtcattccttatgggttgtaaaatgctggatactcttagttctatgatttctgtgacatttattggcttaaatgtttgatttttctccatatttaccagtttttgaagttttttttttttttttttttttwtttgacagagtctcgttctatctcccaggctggagtgcagtggggtgatcttggctcactgcaacctctgcctccacagttcaagcgtttctcgtgccttagcttactgagtacctgggactacaggcgcacgccaccatgcgtgccatgtctggctaatttttgtatttttaatagagatggggtttcactgtgttgcccaggctggtctcaaactcctcacctcaagtgatccgtccccatcggcctcccaaagtgctgggattacaggcgtgagccacagcgcctggcctgtttttgaagttttgacttaacttattagtaccctttaacagtgactggtttgttttttggtttttgtaatttttaaaagtatgatatattttagcatatttactgtgttctgctgaagttactgaccctcagatcatyccccttgtggtagtgtgwaccttctcacattggtccctgtgtctgtttggcatgacctagtagtctctgatagctttctctctttctggtacaacaagatgttttggattcatcttacacatttcttgccctggatctggaatcagccattttcttcaaggagtcagtcctgctgctttttagtgggagatagtatttcagaactaaattttgggttcagaggtacatatccataaacaaacagctttttatagtaaaaacacatasagaaaatgcatacagtacaacaccaatgtagcctcaaaaaagaacacagcagagcaccgcaggggatccctttctgaacacagtcttctcccacttccctcagtcaccactcagtgtttatggtaatgacttcctcgattttctttcctgtttgatcatttaagacaaaatacgtccctaagcagtatcacttggttttgtctgttttgaattttatttaaatggatcatgcttcctgaatttttttttttgttgttgttgttcgagacagagtcctgctctgtcgcccaggctggagtgcagtggcgtgatttcagctcactgcaacctccgcctcccgggttcaagcacttcttctgcctcagcctccctagtagctgggattacagatgcccaacaccatgcctgactaatttttgtatttttagtagagacaggttttcaccatgttagccaggctggccttgaactcctgacctcgtgatctgcccgcctccgcctcccaaagtgctgggattaccagcatgagccaccgtgccaagcctcctggattcttttatatcttgcttctttcattcaacatgagattcatttgttttcattttctttgcaatatgatactccatyggatgagtagaccacaatctatccattctgctattgatgtacagtcaagttgtttctagttttgtgctgttaaagaattgctgctaaccttgtatctgtctctggttgcacatgtgcatatgtttttgaagggtatatacatagaagtcgaattgctgggttagatgctatgcatgtcttctttccaatgtgtcatgccagctgatatgctcaccaacagcgtgtgagcattcctgttgcttcacattcttgcccacacctggaattgtcagactttaacatttctgttagtttgttgatggaaagtgatatctgactgtgactttggtttggtgtttctctgattaccagtgaggttaaacacttctccatatgtttgagtattggacttttctcctttatgacatttctattcaagttgtttcagtaagtctttggttcattttcccattgagttatcttttattgattcataggcatttttatatgtattgggtacaggttttgattggttgggtgtgttgcgaatttcttcttccactctggcttatcttcactttctttatggtgtcttttgatgaacacattcttttttttttttttaaacacaaatgctatttatttgtttgtttgtttatttatttttgagacggagtctcactctgtcacccaggctagagtgcagtggcatgatctgagctcactgtaacctctacctcccaggttcaagcgattctcctgcctcagcctcctgagtagtggggattacagacatgtgccaccatgcccggctaatttttttttttttttctaatggtagagacagggtttcaccatgttggccagcctggtctcgaactcctgacctcaagcaatctgcccaccttggcctcccaaagtgctgggattacaggcgtgagccaccacgcctggccacaagtacttttaaaattttattgtaggacgtcttcctccactttgttgggatatgtggtatatagtaaagatttcaaatatagtaattattattatatactatttagtattatatgcaacttatatatgatcttttaaaaaaagtcttrtatctttgcctttctatttaaatttcctttaaaaaaaattgacaccaaagaaataatagtgtcacattgtttgcaccttactttttcacatacaattttattctggagctctttctacattatccatatgccagtcggcttcattctttgtcatggtggcatgatatatgtatatatttttttgagatggagttttgcttttgtcacccatgctggagtgcaatggcgtgatctcggctcactgctacctccgcctcctgggttcaagcgattctctggcctcagcctcccaagtatttgggattacaagtgcacaccaccatgcctggctaatttgtgtatttttagtagagacagggtttcaccatgttggcccggctggtcttgaattcctgaccttagctgatccatttgcctcggcctcccaaagtgctgagattgcaggcgtgagccactgtgcgcggccggcatggtatttcattgacagaattaaggttgtttttcttgtttaaaattgtgctgcaaaaaactctggtacataatcttgacataattttgcgagtacatctataaagcaaattctaaacatgggaacttctgggtcaaacaatttgattgttttaaatattaatagacaatatttactcccagttaattcatgtaaaatagcagttcatacagcctaaattaggaggtctaactggccatattcagagaaattatctggatatgaagtaattttttgttaggtctaacctgtattaatgacaatatgattacagtattttcaaaagattgacacttagccattctccatgtttcaaaggaataaatgctaatttagccaaataatagtttggagcaaattttgtgggagagcctgcgcttgtgtggagcaaatcccctgtcgtgttgtgaaatgggcgcggagaagcctgttctagtgactgtcgatgctctttgtgacagctaacgtgagggctctccggctcctgagtcatcctcctccccaaatgggggactgaccagtcttttggatctctgattttgttaaagcggaaatgtttttctctcccattccagtaattctttgagtatatctgtttttcttcagatgtttcgtgagcacctgtgttctggggaatagtgaacaccgtgaggaaggtggagtgttgactatgccatccactgtttgtcttcaagcagattactgtcgcgtaggggagttgtgatgtagtgtatttgtataacggtcttttaccataagtgggtattactccctccaggacatcatttaagtcaaggcagctgagacaatcacaaaagaccacgtattttatgattccattaatatgaacatcccaaatagggaactctatagaggcagaaagtaagatcagtgattgtttcaggcaggagagagtggggtgatagggaggtgatagctaaaagatacagggtttctttttgaggtaatcaaaatgttctaagattgaccatggtgctggttgcatatatctgtgaatatattaaaagccattaaattgtgtacttaaatgaattgcatggtatgtgaattatgtttcaatgaagctattaaaaaacattaaaaacaagcaaaaaatgcaggttttttttttttctcagttgtctcagtgaagttttccctgtaggtttcatagttactttaattgaatggatggtaaagagttgtctggtctgggctagatgcagtggctcgtgcctgtaatcccagcactttgacaggccaaggaaggtggattgcttgagcccaggagtttgtgaccagcctgggcaacatatggagactttgtctctacaaaaataaaataattagcagagcatggtggtggtgtggctgtagcactagctactcaagaggctgaggtgggatgatcacttgagcccaggagttcaaggctgcagtgaggtttgactgtgccactacattccagcctgggcaacagagcaagaccctgttgcttaaataaataaataaataaataaacaaataaatattcaagarttctcaggtctggatgtagggttagatgcmagttagatataagtgaaatagccggtttacttaccaatagacaggaaagtagtcttttgtgattcccttctccactaaatacaaatcagtgctactcaggggctctttaaagaaggagttggccaggtgtggtgactcacgcctgtaatcttagcactttgggaggttgaggcgggtggatcacctgaggtcaggagttcgagaccattcctgaccaacatggagaaaccctgtctctaaaaatacaaaatcagctgggcgtggtggcgcatgcctgtaatcccagctacttgggaggctgaggcaggagaatcgcttgaacccgggaggcggaggttgtagtgagccgagattgtgccattgcactccagcctgggcaacaagagcgaaactccgactacatgtaccctaaaacttaaagtataataataataaaattaaaaaaaaaaaaaagaacagcagcagtaaaaaataaataaagaaakaaataaataaataaatgaagaagtcaatcggtaccataagaaaggacaaaaaccaaaacaaacccaaagcaaaaccaaaaactccccacaaaccagcctcccctaacccttttaactcaaagcttcgtaatgtctctgaatttataattacgattttaaagagcactgtttctcatgccccatcccccaacccatttcgggagtaaaccttttctgtcagggtgaggagaaagtgggtaaaggacttcagcatttacagttgagttagtatttgttgttctccaaatgtgcaggattcagggccctctctttggtaggtgtgtgggaatctattggtatttattgggttcttaatgcctgcctgtccttgtgtaagacactctggcagtacccaggaatacatcaaccagctgagacaaacatgaagaataattattgtcctaataatagctaacatttattgattgcttactatgtgctaagcctctaaattttaaagttgttgtaaaagcaggaacaaagcctgtgacatgtaccattgtcttatttagctctcagaatcacagtggtagaggcactctcattattttacaggtgaggaaactgagattcagagggcttagatatctcgtccagggtcacatggctggtaaatggtagattcatacccagatcagcctaacagatctgaactttttcttgttgggggagaggggcaatggaatttttaacattttcattgcacaaataatgcaaattaggcaagaaaagcacaaagaagaaaataagaatcatccatatttctacacacagatttgctcatctttaatgtttctgtgtgtttccttcgtttgtgtttttatgccttctgatttatttttatatccagtcaatctctgtcagcccatcagtgaaggccattgctaattcattaaagaccttgggactgaggacatacaaatcataatcaggatatttcatggactggggattgtgggtgggggaaggatgcagatctgacaaattcatgctgtggtctaactcagagagggtcatcttgtcccaaagtgtcccctcagtctttctctccttccccaattaagactgtcttgtgaaataattaaaaatatctataaaggggcaaattttgcagcacatataattatagaaattatatagtacaatatggacaaatgcagggctaacagtaattcttagggctttcacagatgggcaaggttgggggtagggaccggctggaggcaaagagaaggcttcctgagacagaggggactggggctggctcccacccagatgaaaacctgcaaatctcagggagaaagcttcatgcactatgaaaaggtcacaagaacctccagtcctgggatgatgcaggcaagggaaaaatcaaatgggactttccccattgagtcatcaatcatttgcctggtgattggtgggagtcacctgtgtgttgtgcctgttcccagtgggaggttagagcttcatctctgaattaatatcaaaagaagagctgtctttacaaatcaatatgcttctcacaaggggatggcatatttagatgcagaggttggcatggcgaatcggatggtttgagggtagtggggcatctgggttaaaggccctgatgttctacagacttgggtttgaatcttagctgtgctactctcaagcgctgtcacctggcaagttgcttcgtccctcattcgaggaagtggggccactggagcgtctacctcataggcttacaggtggttgggaggattaaatgagatgagcacatgcagcatttagtacagtgcctggcatagaataagtgctccatagggattagctaatgttttataattctaaaggggaggaaagatggatattaaggttggagaactatggatccttcccattgtattcacaaagaaaaccatgccatgaggcttttttggcaagtcactttaactttttgggcctaggttttcttaacagtgagatgctgggtggttctaaatgatctttcaaattctgcccatgactataatcctatgattctgcagttttaaagagcatcttaatgaatacaaagtacttgccagaatattttcttttttgattctccccacaacagtaatgggccgatgatgattcctgccattttcccagaccaggcagcagagctggcagacatttaatgactctccctcacaaggccatggagctcgtgagagagcataaggccaggttccctttacacacatgtggtgtgtaaaacggatgtacctcgattgggcttttgcccttgtcatggaactgagcccgaaggaggttcttagaggagcggggtgaggatttcaggagaggtgaytcccaggggagcttcaggccaggactgtcatagtagagcagtaatttatgggcttctgacagcttgaaaaggtcatggtgttcttctttacttataaatgaaaacaaagtaatttgggggtcagggaaagacgaaagggcttgtgcagactgacctcaaaatccctggtggttatcatgtaaaaattcgatttgtttgatgcaattagccaaacctggacactttcttctccttctcaaagcaattgggattcagggcacaggataaaacagagttggggcagggggcagggaggaggcgctctggcaacagtgggaagtccagattgtttctattgtgcgtgctgatgtaattctttttctgcaagccctctgtggtttatcactttgccttcatgcamccttcttataaagcaattacagaatcacgggaaaataggcagtagcagtgtgaatcagtgccttttggaatggagaactgatacaaactgggcttcagtttgcagagggttgaggaatgtctaaggctcgtggatgggggaaggagaagtgacaagggatcacagatattgtatattgggcctctttggccaggccctccagtccccgaggcccttctatgctgcttactggctgcatgagggctgtggctgtggccgtcgccgtgtcagctgagcttgtaatttagatgttaccactgctcaactatgaaaagtcaggatcagcagctttgtcctagtgctgggagggaggtgtgggccctgggggaaccggcagctggatttagagtgtgaccgattccaggaacccaacagagctgcactagggccctcctcacctctgtgggtctgaatttggggtaggggttccccaaaccaaactgtccagacttttctgtattgacattgagtctatagtcattagtgatcagggttccgattaatctgtgtccttattttagagtagcttttggcttagggttctggtgaccaactggtcacaaccataatttagcttctgaaaggccataagagtcagaatttgtctaacaggaatctccacagagatcctgctgcatttataattgggcatttcctctgcatttacttttgccccttgtctcctactccaagccacccccatgtgcttgaatgttgaaagttttgggttgccaggctcaacttaccagcatggttccatttctgtgattattactaactgcattgcatcatacacagagcaagtggttggaaaatagacctgcgtcctagcagtgggcaagagactcgactctcctgaatctcagtgtttttacttttaccatgggagttgtaaaatatccagcccagtataacattggctggatgtaaaacagcctagtatacaacatgggctttgtaaagtgaggtgctgttggaaagttgtttgtagtaaattgtattattacatactatacttatatagtaccaaacattggcccaaagagttttattttgttacttctttttgatctcatcaaccatgccatgcaaaaaaagaggcattttagaaaagagggaaatggaggctcatgtatgttgagtgacgtgtccaggattatttgctgaataaatgtcaaaatcagcagtacaactaggtgtctggaatcttagtccagtgcacctgtcattgtgtgctgggtgcaaggcattaaggctcactggttgtggtcctaagtgctcccctgcctttgcctgcttgccccccattcatttgttcattggctattatgagagcagctgtaagccaggccctgtgttaggaatgctgctaacgagggcaacagggctcttgctctcttggagcctattgtctagtaggggagacagacttaaaaaaatattatggcgtcaattgattctctttattttctgcatcctgtgaatgcacaagggcccagagtggagagagacttggtcccctcatcttgggctttgtcttactttctctttccttctagaaagttgtgagtcagttctttagatgggtgcgtcagggttctgccttcctgtatttgaggctttgtgtacttggtagttggagatgatggacgttgcatttgtgtgggctgaagagaattaaggaagaaasgaggcagggaagtttctccgaggaggcacattttgaacccgctgttaacgatwatggcagtggccctttggaggcagctgcctctcttgctgactgtcatgacccaaccatggcaattttcactgagactgcaccttctgtttgtgatgttttagttcaggtttacattatctgagtagaactgggaatgacaaggctatgaggtcctgcctatgcccctctaacatcgtttccccaccagaagttttctcctgaggatgtattaaatgccgactacttccttggaattgctggatagcctttccagcgtgagcaatggggacagctccagaagagtggcacatcaggccagggaggattatcccagattttacagctgggtaggtggaaggcaggtctggcttgtccccacttccatcaaggagtagaggtgatttgcaaatttctctgtggtttggtttacttctttctcttggtcctttgattctttccgccttcgtctttcctttttctttctctttgcacctttctcccctgaaagatcacttggcagaatggttagaaagtactacctttgtggcttagttgatggtgcacaaaataactgaagaagaaaacataccttggctttgcagattgtatccttctggagagctgaattttccagagtgctaaagctgaattgtatccattgtaagcaacaaagctttttttttttttttttttttwaaattatctttaaagaatccattttaaaaggaaattctctgaaaatacattacacatttaactaccttcagaagcagccggctgagaacttaacccgacattctctccatcatgccgggtcactgttaggaacatccaagattctgctgtgctcgagtgatggtgccttcaggttgcttgcccctgcaggtggtggctccagagtcttagacttctctggttcttctttcttttcctgtcccatctggatcccccaaaccctgacccctcagactgttaggtattatttctgcttgtattatctctccctttctgatttgtgtgttaagaaacaagacagcaatttatttagaaatataagaacagcatctgccatgtagtggttcttattgtagatactgcaatagtttgcataaacgttcccatttaacgtccacacagatctgtgaggtgagcagcattgtgatccttattttacagaggcagacgctgagtggtagagaagatgaccacatattctccttgcctggaatacaggaaatgaattcaacattcattcattggggacttctattgtacttgttagatatcattagttaaaaataattgatgttgggggtgttgagcagtaacagaagagttaaaaaatagaatattctcatagtctggttatgtacagggcttcacaaatctttgtgttgttttacagcacttagcgggccttaagaatgagagaaacagtctgcaaattaaatcacaatgcagatgccatcttctcactgctactgtggggtttagcyctacagatcagaggatggctgagtatagtaggcattttctttttgtcacgtactgatgtcacaatactttgtgttcttttatgtggtctaattgcttcaaacttgaatgtgctttcatttaaatccatttatgttgcttttgtcaaatgggaatgatttccatatgaatttgaatttacatactcataggcccttgagaccgtgtggatatagtgaacccaactcttggtagacttgggctctatttttgcctcagccactgacttgttgacttgctgaagggccttgaacagaaatgattacttttctggacttaacactcctcagctgtaaaatgaggtaggaaatctgatgtgatttctagttggggacattctagaagattccatattgtatctcaaatgactgttcagagacacagtctttaggtgctcactctagagaggactgtgataagcataaagcataataatgtaaaccctaacttacaagtttctttaaaagttgactcttaagggtattayacttgctcatattttaaatatttaaaaacaattaaaatttttttccttcatattcaccattggcttttcaagcatgcacagaagtggtgtgcagatcgtttcagatcaatttatcataaaatctaagttgataggtgttctcttaatgatgttcttatactgcctgttcaccttgaccctttagctttgagtagattagagagtgtaggggaaagatctttttcccttcaaatactcaaaggatcatgtgttctcttgagcagttctgcaaatccatataggacaacaggagaataaggatttaaagtgaaagatttcagtcggctgctgagctgctgggaggaagagatggtgtgtggtgctgacctgtccctgattgcccctcatagaaagcgaattggctctccccacgttggctcccatggaaaggactgatgggagagagagtgaggagagctggggatgcccttccagaatgctgaccagggcacgtgggagcagtggtgctggctggccttcaagatccctttctgcacatgggagctgaaccagtgagatacagcacctggatcaggcagcgcagaggagcagtgtggttctcctctgtggtgtgaaattaccctggaaccaccaagcagggttcaacagcactgatccctcccatcaacccaggtctaggtctcactccctcagcaccatctcgcagcttctagcacccctggaggctctgtgaacctctcaccctgcattccttgactcttcatgaactgtcggccttcctgtgtaagtgggtcaggcaccatgtgacctgctcactgccagtttcttctttgaatagatgtttatttcatggatcattttgaagattctccgtgggtgtgcaacatggttttagaatgttgggtaatttctcatgtgttctttgagatggatggcttctcagtcgtctttgcagtcagccactgtagacttgagtttctctcttgctgtcttcattttattgctccatatctgaggaaaaccatgtgaaaaatccctagacacataggagccctgagaagtggtggcagggaatgcttgggggacaaaacagattttagagttacgggtattttaattaaaaaaagagagacccagaattgtttttcacttaaatgagcaattatatctttaacttggggatggaaatatgttgtgaaatttgtttagtcagctccctctgaaataaataaaattacagtgatgatatcattcttgtttaaaatgtttgaaaaggtatcaagacaaagtgattaaggcctaactgtttgccaaattttctttaaagctccatttttggggtatttctatgccaaaaaacatcttaaactgatgaacatatagttctccgcacttgtattggctggtttttaattagatgactgttttaatagtggaagaaatacatttaggttgggcctaagccccagggtgccagatttcaatcccagaaaaaaatgttctctctgtttagtgctaatgtgcacttaaatagcacaggtgtgagtgcttttccctggccacggtcacacatgactttcccaagggctgattggttatggggttggcaggtttaaggtcaggttccccggcttgccctccacccagaggagccaggactctcaggctccctgtaagggaagaagttacccagatcatgagcctgttttgtctgggtcagactgacttgagccacagggagtgggtacagaagcctgggttgctgccgggtatgacccgaccttcgtcttgtacccactgtctccttccttttgtgagtcaccagctcacacatctacatgcctgtaaatgaactatgaggtatcgagtatgtgctacctaccgtggtggatgctgggaaggatgaaccatgcattttcctaaacccacacttcgaggtttacaaagataaaatctcatggctctttgccatccccttctcaagaaccttcactggctctctttttagttaggaaagaaggtccaaagcaaaagaaaggaaacacagggtgtgaaggctggactcctacctaacacacctgtccattccaaacaaactggccgtgcctcctcctcgatctcccacttgtgtgggtggctgtgtcatttctgtgcagcagctgatggtgaggtctttcacttggctccatggtgaatggggaaattctcccaggcactcttcctgcctcatctgtgaccgtttgtcttcccctggggctatagtttgagtactaggtggtattttcagtcttgtctttgccctgaggatgcagaagtactctatggctatcccactcctgacctatgcccaggccccctcttccctctgggggtggatcccacttgtacgggcaactcagtgcagtaccctggaaaatggyagacctggggtatctctggtctctgccactgtctcccagtgtgtgtggaggggctgtatgcttgaggcattattttactgtggcttacctccttggtgttttctccaacttggagcttgggtgagaatgctcagggcttggttgacacctcttcattgtcccagaggtgtaagggctgggtcggaagctatgccaccagaagccatgctgccctttccaccagatacttctgtttctcttctcgacatagaccaattccctttctttctttttctttttttgagacagagtctcgctctgttgcccaggctggactgcaattgcacaatctcagctcactgcaacctctgccttccaggttcaggcaattctcctgcctcaacctcccaagtagctgggattaaagacatgcaccaccatgcctggctaatctttgtaattttagtagagacagggttttaccatgatggccaggctggtctcaaactcctgacctcaagtgatctgcccgcctcggcctcccaaagtgctggggttacaggacatttccctttcttgtttgatttctcctggtatcttctttctttctctttggactttctttcctatctcatatttattttgcttggcattgtagtagaaagataacatgttaccactttaccctccagtctgaacttggaactgctgccatacactaaaaggatttactattcttaaggatttccttccatcctaaactacaaactttttcaggtcaggaactacattttattttgtgtattcccactgtaccttcacctgctgagtgcttaataaacccaggacagaattgaaggcaggctgagcctgtataggagagcagttgctttcaagttatgttaaaaactcctgggcgggagcattcaaaaattmctcatagataacaaatccagctacctgcaygtgcatgaaagcagggaactagagccactttcagacagtgacttcagcttaggaaacaaaaggttactttaaagtaatgctgttttacttatgtttaaccaattctagttgacacacttattcagaatggccttactgccaattagtggagcatgttagtgaagtttgtaataaagtcctaatttccrtgactaatgaagctttacttgtgttcaacacaatccctgctctcagttatgaagttataaaaaaatgtgtttatgctgttgctgccgctgcccgtctgtctgcctccctgcctgcctgcacagtctttaagagcactgttgctctcctcctgttcctcacgcatttcaagcacaaatccctaccattcatcaaaggcatttgctggtggtggcaggggaaatgtcacagcactgctgccacyactgccaggtatctttttaaaatgtaatgtgtgtgtatgggtatgtgtgtgtgtatgacttccaccatttctacgggaatgttttttgattagaaaaagaaatagttgttacatttgcaatttgtaaccagaaccattttctttccaatgcagttgtaacagtgtaatgataagtagggtctttatccaaccctatgacaagtcacatgtacacacgccagacataggctccagattctgtaatatttagccctatacagtcaacagatttgattccctggcagtcagtctttgcattggaagagagagtaaaaattaggactggtgagttcaaaggttcttctaaggcctaagcctttgcagtaggagctttccatactagatatgttacctagagacttgtgttaaagtggaaaatcatgggctgggcatggtggctcacacctgtaatctcagcactttgggaggccaaggcgggcagatcatgaggtcaggagatggagaccatcctggctaacacagtgaaaccctgtctctactaaaaatacaaaaaattagctgggcgtggtggtgggtgcctatagtcccagctacttgggaggctgagggaggagaatggcgtgaacccgggaggcggagcttgcagtgagccaagatggcaccattgcactccagcctgggcaacagagtgagactctgtctcaaaaaaaaaaaaaaggtggaaaattatcatacaaatcatatttgtgtcaatctttgtgagggtgtcctaaactgtaagtgtgcctatatgtgtgttttaaaaccagaatgtctagtattgtaccacagaaaaaagacgttacaaaaatagaaattgtgtcagtaatttgcttttactgctatgaacaatcatatgcaattcctacaagtcatgctgtgtctagcctcacagccccctcactctccaggcctttctgccaaactcagcttctctgtgagcatgccctgatgagttcaaggggctcccttcttcgtgccaccacctttgagtccacaacaggatggctgttgaattgaacatgcacttagatttcgttaccgtttcctaggtctttttcaaatacattccgcttctctctttagttactttttagtctccctcaagggtagggattagattcttctttgttccctctcccatagcacagtttatgtggcttttgctgcgtgaggttaaagcacattggtggcttacatcttatccatttgtaaccacccagggaccagcacatggccttgtacccagtaaacaatcaatattttgttgattaatgatgcctaaagctggttaagttcttggactcaacattcttctgagctcaatgactatttgcattctagtcataaacaggaaaaggttctgttggcagccagggagatagtaaatacccctgactctcatacattgacttaatcagaaacaacaacttccccttttcaaatttgcattgtgaatgataatatcattttcaaatatgtaggattatgacattttaaagagaatataatgaaatagaatgaaggtgaaaacttgtaattatattagagcaaaactatgtttcccatagcttatatcctactatttctatgtagtgtatctggcgtggtcccatgaggatgccataaccaaatgattgaactagaaactgagaaagacttatcaaacatttagtgtcacgggcttgtgagatgaatcaatgctgggatttccagctatgttttttatggccctgtattttacaaagctgtggaaaatattgagcatttgaacaaggctctcagtcacagtcgtataacaagatgcaggatagggctttgcccgtggagttcagtgtgaaagtggctgtggttggtggaccttctgccctttcccctattgctctctggctgctttttctggtgggtgggtgtgtgtgtgtgtgtgtgttttttttttttttttttttttttctgaggtacttcccagggaacagagaaataagttgacaaaaggcacatataaaagagagatctaggactttctaaacctgaggcccacagccctttcatttaatgctatattggcacatgtcttttttctcttcaaatcattctcaatcatggtccatttctcaccaccccctcctcccaacttgttatcagttgcgcctgaccttttgggaaggaagaatctttaaaccctgtttgcatctcagcagacgggaatgcctgcctacttctcatctagggctcctttctctgcctttagaaattcttttttattcttgatacacactgctcagattatttattaatttaaaaattaacatacagtaaaaatcggggtgtgtgcacgtgtatacagttctgtgagctttaacatataaattgttgtatctcttaccacaattaagataacagaacagttttgtcccccgcaaaacttatcctgcctcttgtagtcctattcttcctttaccccagcccatggcaaccactgatctgttctctattgctatagttttgtcatttccagaatgtcatgtaaatggaatcactcagcataatgcctttgatattcatccatgtttaggagtgtggagaaatcgttcttttttattgctgagtaatattacatttatggatatagtacagtttatccatttatctgttgaaggaaatttgggttatttccagtttctggtgattataaaaaggtgctagaaacgtacaggtttttgtatgaatatagatgttcactagcgtaaatacctaggagtggaattgtatatttaacattataagaagctaactgctttctaaaatggctgtaccattttgtattcccaccagaagtgtatgagagctatagttgcttcacattcttgccaacacttaatcgtgtcagtactttttattttagcttctgtaataggtgcgtagtagtatctcattttggttttaatttttatttcctaatggataataatgttatgttatttcatgcgcttatttgccacctgtttattattattttggtgacttggtgaagtgactatttctgtcttttgggtttctttttactgttcaatttgaaaagtgccccatatatcctggatccaggtcttttatcagatatgtgatttgcaaatattttctctcagtctatagcttgtctttctattatctctcttgctctcttttttttttttaatttttttttgagacagagtcttgctctgttgccaggctggagtgcagcgatgtgatcttggctcactgcaacttctgcctcctgggttcaagtgattctcctgcctcagcctcctgagtagctggggctacaggcatgtaccaccatgtctggctaatttttgtatttttagtagagatggggttttaccatgttggccaagctggtcttgaactcctgaccttaagtgatcagctcaccttggcctcccaaagtgctgggattacaggcatgagccaccatgcccagctgtctttctgttctctaagtgtgttttgcagagcaaaagttttaaattttgatgacatccagttactyggtttttccttttatgagttatacttttgatgtcgtatctaagaaatcttcgcccaactacagatcataaagattttctccagtttttttcctagaagttttatagttttacattaagatctgtggtctatggccaggcgtggtggctcaccgctgtaatcccagcacttgggagtccgaggagggcgggtcacctgaggtcgggagtttgagaccagcctgaccaacatggagaaaccccatctctacaaaaaatacaaaattagccgggtgtggtggtgcatgcttgtaatcccagctacttgggaggctggggcaggagaattgcttgaacccgggaggtggaggttgcagtgagccgagattgcgccattgcactccagcctgggcgacaagagcgaaactctgtctcaaaaaaaaagaaaaaaagaaagatctgtgttctacttagatttaatttttgtagaaaaagtatgaagtttaggttgaagtgcgttttcttttgcatatgaatgttcagtgtttcaactctatttgttgaaaagcctatcctttctcaactgaattatctgtacatttgtcaaaaatcacttggccatacttgactctatttccagactctattctgttggtctttgtgtctgtcccttcaccagcactatactgttttgattactacagatttattgtaagtcataaagcggggtgacttgaattctccagtttcttatttctcaaatttttgtcgttcattttaattcctttgtcttttcacataaatttcagattcagcttgctgacttctaccaaaaaagcctgctgtgattttgattgcactgaatctatagatcgatttggggagaattgatatttcaatcatattgttttctaattcctgaacatgatatccttctctatttattaaggtcagcttctgttgagttgatcatgtgcttttgacctttattctattaatatgatgtattacactgatttttgtttgaacacaatctcacgttcttcatataaatcccacttagtcatggtcaaaatgtttatatgtttatatactgcattcagtttgctagcattttgttgatgatttttatgtctatattcataagagatgttggtatgtagttttctttgtgatatctttgtgtggtttttggtatcaggtaatactggccttatagtattccctcctctcctggtttttgtagaagtgtttatgaaggattgatgtgaattctttttttgaacatttggtagaattcaccagttaagccatatgggtttggccttttctttgtgagaagttttttgattactaattcaatctcttcagttattataggcctgttccaattttccatttcttctagagtcagtttcagtagtagttatttatttatttttcctgagaacttgtccatttcatgtaggctatctaatttgttgactgcatttcttttagaatgaattctcttagttttcatccctctgagattgttctttcacctgcatttcaaaaggatgcttcttgctaggtaaaggattatagattgacagctcttttctttcagcactttatcagaattgttcctcttctttctgacctccatggtttcttctgagaaatctgtaataattcaaatcattcttctctatgctgtatgttgttttcctctggctattttcaagatttttttcattgtctttagtttttagcaatttgtttatgatctttctagrtattgatttctttgagataatcctgctggcagtctgctgagcttcttgcagtggtaagtttaggtcttttgctaaatataggaagttttcagccagtatttcttcaagtatttttcctacacaacaccgtttcttctcttcttctggaactctagttccagtattttagtattttctttttagtattttcttacagatccctgagcctctgcttatttttataatctttttttctcttcatgttttacattagataatctctattaatctaaattcacattcactcactattcctgctattacctccagtctgcaattgaagctatccagtgacattttaagttttattgtatctttattttcaaaattkttgtttttgctatcattccatttattttaagagtatttagccttacttcttggagcatggttaaaataggtactttaaattatttgtttgataattctggtatctatgctatcttggggttggtgtcttttgattgtctttttccttgcaaattgagagttttccagtttttcgtatgttgagtaattttggagtatgttctagacatcttgaatatttttattctgagtcttatttattatggagactgtttatttccttaagcagataatcgacctggttgcaaattctgacctgacttctctgggctatgtttctgactttggttcagttttcaaagcctttacagtgtcattttagtctgtttcttttgtgtgcaatctattgttcagtctgggacctgggcaatgatatcctaaagtgaaaatctgaaggccactggcatacttttagggtcggatccacaacgaagagcttaaatgtgagcccacatgttaatatgcccctttgtgatgtaactctcttgagcttccttggttccctgatgtcctcyttttgctgtcctccagctagaaagcgaggaatttagttcctctgttctcctgcattactttacgtgactgtgtccaaggccaagcgcttgaaggtcagggagaaaaagaagcaatggaaattcgccccttattctgggactacaactcttgtgagaatcattcttctttctcagagttttaggtacctgctccgcctgtgctgctgcttcttggtactgagggattgtctgggggctggggtgggagggattggaaaaaaacaaagcaatacagataatttctctgaacattaggagttcctttttttttttttttttttcctttgttggccagaaaatgagggttctcttcaggttatttctgtccatacccagctagcacttttggatggtgagctgcctttgaatccagactgggtgatactggagggggaaaacagtggaaaattctctgctggtttggtgatactctgagttctagtctcatttctcaatctatttgttgttatttacttttcagagtcctctgattcttcatgttttctgtctagcttatatatttgcatttggtaggaaagatagggtgggagttcttactccatcttgcctggaactggagcctctatattagtctgtttatttattaatcaaatcctgcatagagtgggatttaccaagcctggtttcttgagatcctaggatgtattcataatatgtatcatggaattctcaaataatgcttatgataaaataagcttaaattttccttactttaaagcagaggctggcaaatgttttctgcacaggaccaaatagtaaatattttagtcttgtggtctcatagtctctgtcataacttcttaactctgctgtcatagtgtaaaagcaaccacgaacaatacataactagtaaagatagctatggtccaattaaactattgawtgacactgaaatttgaatttcttatacttttcatgtgtcatgaattattatttttttgatttcttacaaccgtttagtaggtagtgggccagatttcgcccatgggccaaaatttactgaccactaatttatgtcatggatggctctatggccctgatcaacaactcctcttgattgaaattttctgtctgttctggagaaacaaagataggaaagcaagagaagttctagaaatcctatggaatgcttatggatacaacctgtaagccaaagtagcttctcagtcttcttttgaactccttaggtagggcacagagagagctcatagatgttttatcttaattcatctccatattactttgtaaggtaaatgctttcatcttcattttatggatcaagaaactgaggcacagagaggactgctagcatgtctcaagtcatgactaaactgggatttgtatccaggcctgtccagcaccaaagctgttgctcttcacactctaggatggcacraatctcctttttttctgttttatcttgtctctgtacaaaaaagccatgtcaataatggtataggtcattgaaagccttatactttaagactgctgcgctctggtctggacttactcatgaattattgcataactctgggcaaacctcttcatttctcaaggtcttagtctccatgcctataaaataggggattggatccctattttacgtttatttctctgtcatggtagctgtgagagttttgtcagtgagcatcctaatcacagacagcgactttggaaagagatggtacaccttgtcattggagggctgtggggagttgtagagaacaagcttcatcctgggaccatgtgtgatggctgttgacatagagctttgtagctgtcaaggaaaatagagtaaacacactacttccttttgatcttcagtttttcgcagtatgctcctagatcatacttctcttgattyagtgatagccttataaattattgccactttctttgaacccttattggtataagtcggtgataaatgcttgagaaactgggccttgatgaagtactggtatacctcgtttggaatttgttctgaaaatggtaaagcatttcttaaaggctttgttataatatgaaaatgttcattgctttttttgttcattctataatttttttatcccttttacattgcatgtcttgattacatagttgatttgatattctctgaaatgtgatggaaaagaaaatgtaaacacaaaattaaaaagcagaggaatgaagacacattttgtgtgctgcttcgtgccagatagttttgtacatatccttgtacaaagtagtggtctcatttttaccacagtgagtaagcccctggtctctacctttaaggaacttagagtttgataggcttagtggttctcaactggcattaccctctcttgagrgtatttagaaatctgtggagcagctgcaattgtcacaaatattgagggatgctgttggaatttagtgtgtgggattttatcacaatgaagaattatcccaccaaaaatgtttatagatctccttttgggaaacactgtgctgagtaaaatagtagtaatgataataaaaacacttgcatattgagcactgccattgtgttcagagaactctacagatacagtccatattctctgatatgtagctctaaattcagaaatctctaaaattgaagtgggttttttattaatccatttggtaaaatgtgacctgaattgatgtgagaacttttatttttttaaagctgagarctgtattttttatagctgtattgaagtatagtttacatatcaaaaaattcacctgttttaagtgtacaatttggtgatttttagtaaatttaaaaagctatatgtaactcttaccacaatccagttttataacattttcataaatgcctccccccmcaaattctcttgaacctgtgtgagatgatttccagatgtttcactgaagaaatatggaagtgtttgattatggagtgctgctccagatccttcctgaatgctaggtattcattcattttgaattccaaatatacccggctgcagaagtttcttgtaagagattgtggactgtatgaacacatcccatccccacaataaccctggaaagtagatgctattattgttccttgttttgcagttcaggaaactgaggcatagcctttatacaaggctgaatggaatgtcacaagaaagtccagtgggggtccagaagagaaaatctgtgaccacttggcctgtaaccgaatttgcctatatttaaagatggaggaaataatctttttgttttgttttgtttttttagttgatactaaaggatatgcataaagtatttaaagtttaactcaagatccagtggatatgtgtggaccctcactacctagtctataactcaccacacctttcactcctttgggtgtccatccttatcctctgtccccctcccacagggatgaccactgtctaaaatttgtgcttatcaggccaggcacggtggctcacacccgtaatgccagcactgtgggaggccaaggcggatggatcacctgaggtcaggagttcaagaccaacctggctgacatgatgaaaccccatctctactaaaaatacagaaagtaaccaggcgtggtcgtgggcgcctgtagtcccagctacttgggaggctgaggcaggagaatcacttgaacccgggaggcagaggttgmagtgagctgagattgcaccactgcactccagcctgggtgacagcctgggtgagggcgagactctgtctcaaaaaaaaaaaaaaaaaaaagtgcttatctttctttgattctctttagttttaccacatatgttttaattcctcagcaacactttaattttgcatatttttgaagtttatataaatggaattatactgagtatattcttctgtaacttagttttccctcaataatacttcttagatttatcggtaattcattagttttcattgttcttttgtagaatataccatgatctatctatactttgactgttggtggacatttgtgatgttttctttttttctaaaaagagataattcaaatggtgctatattgaatagtcctcctgaatttttcttgatacatatgtgctaaggattatgtaggcatgaaatttcagggtcctattgtgggtacatcttcagctttattggatgatgcctagttgttttccaaggggttatataaatttatactccctccaataatttatagatgctaaaatttttccaatctaatggttctaaaatgatatatcattctgayttgaatatgtatttctgtgatgactaatgagattgagcatcttttaatatagccatttagttttccctttttgtgaagtgtccgttgagtcttatgtccatttttctactggtttgtctttttttttgagacagtcttgctctgttgccgaggctggagtgcaatggcataatctcagctcatttcaaccactgcctcctgggttcaaatgattctcctgcctcagcctcctgagtagctgggattacaggtagttgccaccatacctggctaatttttgtatttttagtagatacagggtttccccatgttggccaggctggtctcgaactcctgacctcaagtgatctgcccaccccggcctcccaaagtgctgggatttgctgggttgtcttttgaatactcatttattaaacttctttatgtgctctggatactgatcctttgttgtttatacatgatagaaatgttttttccttctttgtggcttgtccttttgatctctttttggtgtctttggataaacagaagttcttaattttaatgtagctaatttatcattttccattaggagtttttttctttagtttttaaattagcgtttatggagtactttgtatatcctagacacctttctaagcaccttataaatatccattaatccttataacattagaggcaagtactgttgctatttccattttataggtaaggaaactgaggcacagaatgttaagtgactttttcaaggtcactcaggtagtaaatggtagagccaggacttgaaccaaagctgtttaaggaattcttaagaaaaccttttctaccatgataagatgtgcagatattcttatatgtcctctgaaacttttttgtttgtttgtttttgttttttgcctttagcatgtaggtcttcagttgctctctaatagatttttgtgtgtggtatgaggtaggggcccagtttaatttttttccatgtggattatcagtgtttcagcacagattacttaaagtctaaccctttccccacctctataatacatgccttataacaaatcaaatttccttatatgctcatatctatttctgggttcattgttttagtggtgaatttgtctctgtgtcagcactgtactgtattaattagtatgcctttataataattcttgatatcagtaagtcaagtccttccatcttgttctactttatcagcagattcttggaaagtttcctactctttaaaagcaagattgcaggataatttttgactgtaacacacacacacacacacgtacacacatgcatacacacattggggctttggaagatgatttgtcattgctattgtattgacttgtttcctgaaaatttagcagatataatttcatttgagtggcttgagctctatttatctgcatggccaaaatctcaaacacacatgatgtagtggcttgtagaaagcttttgattcttgttaaatggagaggagggagaaaggaaaggaaaatcagtctggtagattactagtgtcttctgtttaagttcagttgcgctgataattccagaaaatatactgaggaacttcaaaaggcatgtggaaccttgtgtagtatgatttatactaatcatagtatgtgtgtatgattgtataaggtgaaaaacaagataatgcatcttctatgattaagttgccttayttatcaagtaagaggtaactgtaccccgttggtcttaaatagctgatatgtggtttggtacttaatactgtctattggaggaattgaaatagaatacccagagatacccagagtctccactgggaatacttctgctccccaaatgtgatatcagagtaatatcaagtagaatgtggagtacacccacctatygaggcacaaactgccctctcccatgaccctttctctgtagaaagtattacttatactgtaaatagcagtcaaatttcaagtaacatcagttctctacatcttagccttttccaatctgggtggccaaagtgaagaatgattaggtactgaaaatttataaatgccgtgtctgagaatttctagacaatgggaagacacctccctaaggaaacctgtcagtctgaagtcttcccagctttcagagcatagcaagttcttaccatagcctggagaatatgtgatctgccagtgcctgctsccccttcacctcttactgacatcccccttctctctgcaagagtgactgccttgctgttcttcagaatgccaggcaccctttcaccccaagcatttgctctcctcttccttctgcctgtatgtgcttccctggatgggtgtttggtttactcctgattacctgggtctctgctcgaatgtcatcttctcagagaggtcctccctgaccaccctctcccataatagcacccacattcatctctgccagccctccctgagttcctacatggcacctgacacatattcactgtctgccctccctcgcttcccctccccacacactaggaagtcacttcctagaggaccagggactttgtctttttaactgctgtttcttccacacatgtgccacagcgtggcacatgggagccgcttgagagctgtttgctgagtgaaggaagctgttggctgaaaggagggcagagagggcctctggagcaggcccgtgccccaccagccctccccgagagctcctgcggcagcttgcttgcctctctgtcggaaacttgcaccatttaggcagctcttccatgagtattcttccattacatgctaagcaccttgagacaaaggtctgtcttaagttctttccctactgtcacccctgctgttttccttcagggctcggactgagcctggcacgctatttgctcatgctatttgtcttcagctatctgttaagaaggcatgcgggtagcagtcatcctccccaaggggagcagcagattaggcagcactgtaattccttaagcaaactcctggcccaactagcatttccattctgaattcctctatgtactgtctttgagtcttatggagacgataatcttggtgaraaaagggaccagccatattcactgcaggatctcccgtggatgcatagcatggtgccagaggcatggtaccccaactcagcacacactcactaataattcatcgctaaagttcactttggcctatgtgaaatttattattgktgatgtccaacattacactaaaattataagaatttatgtacaatctctgtacaggatctgtagggagcacacagtttttcattatgaaagaggcttcgttgctcatctcagctcctgtgctgttgaacaaaaggtgttagacacacacccattccctacttggggtattcacaaatgtcagacctcaaagtctcttmtgagtaaattactgcctttgcttcatttaaaggtgcccttgtgaccttaaagaattcagccacctttcaaaatagagctgtatttctactcccacctcaccagagggtgagcctcaagtgtttgattacagaggagcgagaacttactctctaggattaatgtaataagagatgaagagcagacaacatagccactcaccgaaaaccatgtattcataaaaaataagccaagcccaaagtctggatttcagaatattttcattaataaatactttattgcaatgaacagcttaattgcttaatctctgtgtagttatggacatgtcttgtatacactgcctgggctgtatacactgtgtacactgctggctggatgggcttaggcagaagcaagggtcaaggcttttgccagtcttgcaaggcaggcttgcatcaggaattcctagagactgaggagttctcattgtaggtttctttctgactgaaagaagcatggtgcgggcagagcactaggctgcgggggttagaagaccttgcctcacgactctaaataagtcgtttaacctaattgagcctcagggtcctcccctaatggagacggacacatcaaggggctgtttggatcaaatgagatcatgtgactgtttgtggataatgaagttctgtggaaagaagatgggagggtagcattgcatactgtcttggtaagacctcagacttgcttagctgcagctcttcaccctcttacggacctgcagctgagcagctaagcgtgattggaaatgtcattcagctacgatgaytggtattctttaaaatgaccactgacttcaagcaagaacttcacaccactggcattgatgctacattcaggaccattctttctcatttctagacagtgatttcatatattttcctctctcccgaaacctccagcaccttccagcctcactctcggccgatggctttacttcccatttccctgagaaaattcaagccgccaggagagaacttctcaaaagcgcccactgccacatccccctgcctactcttctgtccacagatactgctgcctcccctgttagcatgggtgaccatacacactccttgctaaggccagcttctttactcgcacaccaggttgcatccagccttgcctgttgaagtccatggcagtgccgttctcctgcctctctcctgctgtcagctttttcttctagactggatcttcccagtcaatacacacaaacatactcttgttaatatctcccacttagataaccctttattgattccttttcagtcattagctactaccccatttctcttttcctgtatggctaaatactttaaattattttccatattccctgctgcctattcctcctctcatattcctcttgaaactcatcgtcatcaggcttttgctccctccagcctaccaaatctgctgtcatcaagatcacaactggtcttcctgctgttaaatccagtggtcagtttccatccctcactgtacttgattccacatctagcatcctccctcgttaatgcactttcttctcatcttctcatggctcccaggataccacactttcctggtgttccccccacctcactgttgcttcctttcagtcttctttcctgattcttcctggccatttgttgtcttgttggagtgcctggaggagtctttaggccttctcctcctatttctatcagcactcgctccctcaatgatcttacccagtctggagtttcaaatccatccagaagctaacatctcatgcatctccagttgaggcctcccttccacactgcaagttctcacatccctctgcccttggagaggcacgccctgtcctacttaccctcccaagtgcttaccactgctcactggcttaggcgtacgtgttggccaggggttgtcatctctgtgctctccactagaatgtgggctccacaatggaggactccgtttactgttgtatccatagcacttagaagagtgcctggcacatagtaggtacttattcaatattttgttaaaggagtgaatgtgttaggtctccatatacagtggagattctagtaattcgctgtctcaggtcctgtctcaactctccctactagtattagggygccctagcctttcagagatggtctttgtcttggaactcttactaaatctatttgataaaatatgattgtttctctagaactctgttgaattgataccaggcattcaactatgcagtattaaatgtattctttatcattgatttggggaggctatttgggatagtagaaagatctttgactttagagccagatacttctgagtttaaattcttgctctgctgctaaatagctacagagccttagtggaaacatacagtcttaggccttagttttctcatttgtaaagtgaaagatttggttcatagggctcttgggagaaattacatgctgaatatatgaaatgcatctagcataatctctggcatataacaggcattctatagtggtaactatgatgattatggtccttagctatacggataatcttaggattgcttgcaattcaaaactttttggaaaaaaaaatgtaattattccttttaaatactggccgttggtctttggttcagaacataattgtctaatttaacattgtttctgtggtaaaagttagatttgatttacatttcaacttacagagcctttttcaggaatttattctgcttcaaagatcaaggacttcctttcagtgaaacttaacgacagtgcttaggaatggaatgctctggaaggattgtcttctaattaatgagaaaggagcttattttgtgggggaggttctaaaatgcctttatatgtgcactgagcataattccaaagttatacagtaaacactccatgaatacttggttacttgtttttgctccagagatacttaactgaactcctctattgattgccctgaggtatagctatggaaagtagaggtgatgctactaaatacaaattcaacataggcttacaaatatcttagaggagcttttctggctttgaactgtaaacgtcaacgkagctatattcatgataattatatcttgattgtatcttcttagggaaaggattgtcaatggtcctagctcaaaggaaattgaacaaagaagttaagatagcacatgcaaacatacacatccgtgtgtgcccaaacatacggactctctcacactgttaaataatgcatgagcaaaatattaagtgcaaggtacagtctaacgcatatcactctgcagtatgtggtaagtgccaaatgaacaggataaatttaagtactgtaatttcraagaacgagtcattagcaaaggctaaaaatggtcaaggaaggcttcctggaaaaagtgagcttggagctgggcattgacagatgagtcacactgtgcctcatgatgcagtgtgcagaactggtccagccagggtcaagtggatggctctcaggccagtccacaccctcctctgggggaactagggcaagtctgctggctgcctcagtccttccctgtgaatgcagcccattattcctgaatcacatccttgtctgccattggtgattttgggtgcttcgtgggctttgggtcaaggcagggggttcttaagtggggagggcaggaaagggagtttaggatcacgtttgttgtggggaagtatctgaatgattcatttgctgtgcgtgtctgaatctttctttggagatgagttgatgagggcaagctttggctgtggatttctctctggtgatgtgatttgatttgatggataattatggaagagaaggaaaaggagattcaggattcagacacagaaaaacctgacaaacgattcacaaacacttttctccacccacagaaacccaaatacttagwctgtgccttgtggcaggggcagtagggtggctggagagagctgtcacatgcactcacttgcccagctccatggattgtttacttggcagccatagctgtcgatagttggttatacgaatggggtgtgtttggccaggatcccgtagtctcacttaggcctttcataatagtcatgacaggttctctgtggtcagggaggctgggatagaggtgggggagctggaaaaggatgggccacctctgtcctgtccatagggtgacagccacagttctccataggaaccaaacctgcaggtgtgtcagttaaccatgaaccctaagcaggaaaataatatcgccttttttagacctccgcaatttgtgtctctgcataagacaatgagttttattgcaaaggcctagttacaaaaaagcgtgtcctgtgtgacgatgactgtgactgtcccaagctgttctgcttcggtaggacagtccaaaccagaaccaggaccaggcttgcttgacaaatcctctctaaaggaacaggtggtaggaaacttctgaccctcagcgattggactcaaaacattctctggaagtgccttagacattaccctggttttacaaatgagaaaactaccactctgtccatggactgatttgtttgaggttaccaaactcttcttgcctgtctctttctctctttacatgctgttaatttgttgtggactgccagatttacatctcttcccctgacctgttgctattctagacttgtatgtttcaaaagcatctcaagcttgccatgtgcaaaatggaatccagctctttctccaagcctggccactcccagcccttccagtcccagtggatggtgtcaagtccacctagggtgctgaccccacaagttgagcctgagaatgtcttggatttctttttatccctctaccatcgaaatcatcaacttttttggccctctctgcctctggtttrtttrtttrtttrtttatttatttatttatttatttatttatttatgttttagagattgggtctcattctgtcacccaggctggaatgcagtggcacgatcttggctcactgcagtctcgacctcctaggctcaagcgattctcccacctcagcctcctgagtagctgggactacaggcatgtgccaccatgcccagctaattttygtattttttatagagacaaggcttcaccgtgttgcccaggctggtctcgaactcataagctgaagtgatccacccgcaytggcctctcaaagtgctgggattacaggygtgagccacagtgcccagccttctggatttattttgaacctctccacttatttctctttgtctctgctaccacctccctgatctaaaccaccaccatcctttgtgcctccagtctcttctccacacagtctccagagtggccttttaaaaacaaagctgagcatgttccccgtctcaacacccgtttatagaccatctttatatgaacagaactcaggctttgtgctggcgtccacaggctgtgtgtggtccctgtctctctcctgcaaccctgtccatcttccctcttgcccatggcacactggccatatcagcatcatttcagtgtcctttgaatgataaatatttgttgccacagagctttcaaacatagttttccacctgaaaacttctttttatccattagtttgtagcttagatgtcgcctctgttaggccttcatggattcctccatctaaaaagtcctcccatatttttctctatcattatggccagcttgttttcttgacagcatcatttatgattgtttattaattgatctggttattctctgtgccaactgctggcaggaaagggctgacatttgttttgcacccccgtaggagcgtccttttattcccagctggcttcctattactgtaccttcccctcactcctccacacttgtctccttgctgttcctcagccgtgccaggcttgctgtgccctggggcctttgtacttgctcggccttcttttaagaactttttttaaatactggtatctatgtggctgactctcattttctttagatctttactcagagtcaccttttcagtgacgctagctctggtcccagtgtctaaaactgcacctgcccctgacactccatactgaacttcttggctttatttttctcctttgtgcttctccctatccaccatatggcacattttacttatgccatttattgtctgtctccccagctagaatgacatctccatgagggcaaggagtttcttctgttctttcactgttgtatgtccagtatctcgaatagctctgggcacacaggcactctatacatggttgaatgaatgaatgaatgaatgatttcatgaacaaagtgtgtccagtcactggcacatagtgggctctccttatcctttttattgtggtgagatacagtgtatcattttaacaaattttaagagcacagttcaatgacattacatttgtattgttgtgtaaccatcaccactgtctgctccctacacttttctgaaatgaaggagtcgaggaataagcaagtaattgagtgagggactcttggcaaagcagttgtacagtgtcgatctcttgacttggaggcccagggggtcctttccattgcactgtgctctggaggaggaagggcaagaagatgagtctgagccccatctcagggtgctcgatgcatgcagcaaggaagctcagtgtttccacacgtttcaggttgcctctgttctaaatgacgagggtgctgccctgtctccccttccttctgccgtgcacacacctgctcacacaggcaccatgtgtacacatcccttcctctgcactggaggaagcacctttgcartatttccagctcatgggatggtgtgaaagggatatgctcattctcctttgaacccttctcaccggatctccatcatgaggggactctctctgcctcccttggtgttctcatcagcacctcgtcaggtgagtattccattgatggcagggaagtgtttatttttaattctaaagtaaatcagattacatagaacacaaaatgttgtgttggatcaaaaccattgactatgaaattctcccagatggatgaaaggcgggggcttgttttcagcccttaaccacttcttctcacaagctggttaaattctacgagaagtccatccttgcgagcacttcgccatcacaggcccttcccttggggagctgtggcatctcccccacccccagcacactcacaccccccagcagacgggaacattctcatgctcactgtcactcacgtgtgtgctgtcccacgtgttctcactcatatgcactaattacacacacacacccaacctgcaggtttgcttttgacacgccaggaattacatgggagcagccagagagcccaaagtaagccttgagatgactttaacccctgtgaagcccacagggtaagacccctgctcagaccaacgtgacaggctcctgctcatcacgtgagttgccctggattcctcgatgacgttgcaatggtgtcttctcaacaaaacctcattgaggtcttgagacaggggcrcaggccaggcacatctaagtgttcgaggtcttctttgttgaattccacagcattatgtgtgcctccaggatgtgcctggcacatggttggcctggggtgtttggagaggactgggtgtaggccggaccctagaggagcttataggacagtgctggcggcagaggtgcccatacctgcgtcctgcatgatgttgcgagcgtgatacccgatctgtgcacaggaagctgcgggagcttggaggaaaagagaaccttgctctgtgggatgagaatgcaggtcaaggtcaggggagagttcagagaggcacttgccaacctgaaggtgtggagatgctgccgtgcatgggcaggaagrggagtggtggggcaragaagtcagggtgtggggtgggggcatggttccaggaagcttcctattttgtcttgtcagcagtagataggaactggattgaatcgggattatgctcacttctattgttagctctgatcatttgttgtttgacttcctgctttcccactagagatacgagtacatggcaagagatttctgaattcccacaccacaggtgtggccatggtgcacarcattgcaaggtccagggtcagtcgtcattttgctggtaaggaaggcataaactaacagcccagtagacaaatagcagtgtcccttcatgcggttgttactttgtgagagtaaagacatacaccaattggtttaatgtattcgggtagattttctactagtcgtgtccgtttaaaaaaatcaccagtcagttctctttatcggaaaaggtaytagacacctgtagttgagcatgtgctgagatctggtgttttgttaattgcagtatttgatgatactggcaraagtcactaagagaatcctcaaaacatcttgttagaaatgggaagaatattccttgactggcaaattttttttctgttcttaaaattaagcttataaatggctggaaaaattagttattttttccaggctttagttgggaagagatttttgtgtctggtgggaacgttccctctctccgttgatgcttgagaaagctacaagacgctgatggtgttggtggcagctttgccttatcggctgtcctggatgtcttggcctcagataagacacttaacccacagtgggagcatgctgctgcttttcaactgggaaacgttaccgtctgtttccatcacagtggcccatgacgaagttgaaagatgcctctgacatttgttatattataaaaatgccaagaatctcctaaagtttgactcataggtcagtttgctttcttaaaacaaaatggcaaccaatgaaagttttctggtgagtgttatcctccgaaattttaagtggatttaaataaagttcagtccgtggatgagaggattctcagtgaaattttcagtgtgcagaattactcgaggccattgagcagagtcattgctttctgtaatgttttcccataagaacacaagaatctccatcctccatcagactaatagtttttccagtccagcattttgccactgagaatggaattaagggagttgctgtgggaagaccccataacccttccagccatcacctcaaaaacgtaggagtgtgctttaaatatgtgtaactccccttaataagctattatggagcccttattcatatgattcttgaatttgtctaaattgcatttgcagcagtttttattttgggctgttaccatctggtggaacgtggcgggcagtctgaacagcagccagtcaggatttaccccatatcmccaccaaaggatctcaktcctttatccattcaattttcatgctgattcatttgattcactaagtagaattgataaatgcctacattgttcacctatgtgttgatttttggctctttgtaagggcattgctttaaatcatgttaccagtcagttcttattcttcctcttaatatgtaagaagtgcagcttcttcatattggttccaaaggcacaactcaccatattttctctttcattttctacaggggcaatcggagctgtagagcctctggttggtaacacccattgtagaatagtggggtgtgggcctcagagagactgagrttatcgctggccccattgtttactggccatgtggtctggagtgctttgctgcatctccctgggcttggcttcctcatctgcgaggtgggggtaataggtggcttctcataaaattggactcactcagactccctcagttgcaagtgatagcccaatttcagtggacttctgtgaaaggtgcagctgacctcaggtggtgctcgattccagggggtgctggggaggagctgtctctttcttcatctctcagcaggggttgtctctgtttggctttctcctaggatgtggtggcgaaatagccactggcagccctggatttatatcttaccagtgtggcaacccagccaaaagagacagcatttttctaatagaaaaattagagaaatcccatggaggtatctaagtgcttggcatggggcacagtctgttctttcctgttgcggccaagggaggagagttttctggccctgcagtggccagaagatggagtcacttttacccaaaccacatggggaaaggattccccacagaaacggaggttctcaccaggggaagtggagggaggcatttacaacagtgtgagattacaacagtggccgccctggagatgtgagggctgtgaggcaatgcaggcagagctcctcaggcagaattctgtcatgcagaattcccagtagatggaatccagcctcttttttccttccctttactgcttaaggaatgcagcttctttagattgcttctaaaggcacttccttcaaacattaagttgattctacctttaatacttttataaacttttaattctatgtcctctcaacctggatgtgttttggaaagatttattttaagaggggggttggtatggcagggggaaatttcacttaatctgctttttgtcattcagtcaaaaattacgtatggagcctctgctgcatacagaacaccccaaagtctgtgggggatggaaaggaaccatgagaagcccctttcctggggtgtctgtggcccgttggaatgtgtggtgggtcaagtgtgtagattctgtggtataaggtggaatatgggcaagtgctgttagggaggtgggaagctggagggagcccagagtggagcagagccccatccagctgggacaatacaggaggactagatggagggggtggtatctgagccaggcctgaggaggggtgtggttttataggcatagctgttgggggcagagtggggtggaaggaggagtggcccagcagaggtgagggagagggagctgacagcttcattcttgatgctcactttatgccaggctctgggcatttggacaagtaacagttcattgctctatycaaggaagaaccccatcaagtcatgggtgcccagccgaaagtctttaaggggtcgagtgagggcgtggaggaggcagccttcawctttcctgaaaggcacagagatgggatggtgaggatgaatctgtgaaatgatgatgattcctgggtttctggaggcggaggtctacaaggagggtggtgcaatggagccaggtggtggaagaccttgaatgccagagtaaggagtttggtggagattgttgaggcactagttcttcagggaaggcctcatgggtgtgtgttctgtgcagttgcccagggccccatgctcagcttaatgctatggtattgtcytcttgaaattcttaatacttttgaaacaaggggtcctgcattttcattttgcactggacttgcaaatcaaagcatgcttgggggatgatgtactttagaacagagctgtgctttagagaagaggttgggccatagttgggaggctgtttgcatccttttgaggaagggggagtaaagggcccagacgaggatgggtatgctggggatggagggaattcctctgacagcctgtggccaggcccgagcagcaggcggaggaggagccgccatcagctcttgactgggggacattcttggagctgtcctctaagtcaggcctgcaggtgacttccagrgatagcgttggtgttccaaacggcaattgagaagactgtcttaatatttttactctcaacagtaagctaaagctgacattggcagtctcattcaacgaatgtgaaataaccagaaaagacattccaaggcgttctggaatcaaacagatggayggagcaaacatgttaaaaacagtaaatcacaacttgaacttcagctaatcataattgcatttctctttccttatttaattttgaaacatcttcctaagtagttttttattttggttgcttttacttaagagaccttgttattatagggcaccccagttaaagatgcctcatatatgacatctgaaccaaaaaaccttatcatttaggacatgatatcctttctgaggtttgagaagtggctattttgtctcttacaaagatttgtagggaatttactgagggaattgttgagggactagtgagcaattcttgttcacatagaaatgaacaaaactgcatttacccagtgattttcaaaaacatactcccagtaaatcaaggttgctctgaactgaacttagggtctcaaccagctgcagaccagttacatcttagcaagcagggctttgagtggtgcagtgggcagartgtgtggctctgacctatcaggtgtgatcccctcctactgtgcactgtttcctgtctggcacagacacaggcaaagcacttttgctgaaaggacagaaagactcaaggtgaaggcagtgccatgcaggccccggatgctgtgctgagtgtcttggaactgaggaagccgctgatggccagtggggccagggcagggcttgcgaaaagattcaaggcttcattccagtcacatggacagactggtactgcttttcacattcttatcaaaaagggctgcaggcaggtacaaagaccactgcagcctttcctgtcctcatggcattgccctacaactggccacctaaaatgaccttctctgctcctgcatccttttaggaatgggtaacttggtaccattcagatgtgccatgctgaaaaaatgagagtgctttcttttgagggagttgtggaggaatacatgatgtcctatatgggaggcccataaggttagtgaggtaaaaaaaagaatcaagagtttttcttgctctgctcattcacccatagtgatggagagatttgatttcatctggatgctcgtgttccactgacagtgagtactgctcagccagtgctcgccgccaggtagttaggtgtgtcttttacaatgtttagcacagcgaatagagaaagtgcctggcagatgcttggccatctcctctgcatctcccatmgtaccaagtatcttgccttgtgcacagtaggtgcttgtctgtggggcaaatagatacatttgcagttgaagtaatcctgtttctctgcctgaagtaagagacattcaccatctgtagagtgggaattgtgacttcctctagatgcagggacagttttgtaataaagcatcctcataacctcacttggccctttttggcacaaagacctgtgaaggcggagaccatgacctattttgctcagcatttatttcccagtgcaaatactcagtatttgttgaatgaataaacaaatgggatacacctgtctttcttaaattgcagaagttcattgcttaaagtagccatgtatgtcttcatcaaagtttcttcagttctcaaaatcttctcatatatgtctgtgcatacacacactcactcaacccagcagttggcatacaatggccatttggtatttgttttgcaaaagaagttagtaagtggcagtaggtaaagaaaagggcactgactgggaggtgaaagatctggacccaagtccaggtttggccacctaagcaatctggagaccttgttaaggggctgggtatcctgtctcgcccagtcagaatcttgctgtctaaatggggctaatcactgcatatcttgaaggtggtttatccagctcacaagaaagaattgatgtgcagcgcttgtcaaagttaagccttgtacatgtgtgaggactttgttcttgtcaccgatatatgctcggatccccatgtttgatgtgtggctaatgtgtatgcaccttctccctagtccaccctgagagctgagggtgtcattttacctaaataaagaaatacattgttaatgtagaaaatttagaattcacagaaaattgtaagtaacaacaattacctgcagactgtagcccagagataaccactgttaatcttgtgggatgtttctttttgtacctctcctaggcaggtacwttcacatcacacacacacaaagacacggtattacttcagtcacataaccattatttttgtatcaaatttacccaagtagataacccattccaggaaaagaaagagacttaactttgttgttctgttactttctcagggcctagtgcactatgagaccgagcaggtatttgttaaatacttaatggctttctggaacatcagggctgacaagattctgagttataatctaatgttctcagytgaagtgcaggagaatgaaggcctatggagagaagcaggcccagggtcctagggctggatgtagctgagctagaactcagaaatgtgctgttgtcttgcccacgtctactctctactaataagttaagaggcacatrcaagaaggcccatctggttggtgcttctagcagagaagctgattcatgyttaattttgaccacatctctaggtttgtggttactgctcagaatcaggatagcatctgggtatctcgaagctgctgtctccagtggaggctttggactgatctcacaaagttatgctgatttctacrtcagcctacatctggggtccttctcctggttatcattgtttgtactgtatgcacagatmccacgcccttacttaataatccagccttggtggaagtatattctcctgtgtttttgttggaatataccaaccctgtattgccctgccctgcctttcgagcatcgtgaaaagaagtccttctttctcttggtggttcttgcctcatgctctcaccctccctttttgtggtgtcttactgagccagttgttcattccccagcaaacatttcatgtttacagtcctcaactaggctatactgtggaagattcagcagatgtgcaagcccarcctttcaggatctgagtcgagagagagaggggacattatatagagaaattatagctcagtttataaagtggccagtgacccaggagagcggcagagcacaggctgtggatcctgggtggcaggaggcctttgtcatggttattgggggtatagggagctgggcaggcagggatttgaaaagaggggcattagagcttgacttggaaagggggactgggatgtgaacatttggagattgcaggagaaagcattcctggcagagsaacaagtagtagatgagaagggtcacaggtggatccctaggtgggggtagctaaggattctcaggatctggttgctcaatagcagcaagttgagttctgcacctctgcaggccatgacctgggaaaacatcacctcccaagccccccactgcctttacttgtccaatgctattggtgcaagtagcctggcaagttgatacaaccagttttcctttgggacaagggacttggtgaggggatctgtggactcctaagagccttccagtggattccaggtgatttgggaacttcctaaaattgcacagatgattttgtgtacatgtgcacctttcccccacaactttcaaagatctctgttacccttgaaagtgtaggaggaagagggtcggcatgtggattaattttaaaaccatatttaaaaaactctcaaatcatgtgaagtttgtagtggaaagctccattcagtttgaaagccttcaccattctcaggcacagctcactgatctccttagtctgtgcacccctgatgggcaagattatgtctcatccctgcccagaacttggcctcagaatcttatttgtgatgtttgttcagggaataaaatagctttgatgtggatataaatttgcatgtgtgctgacttgcaatagagtggattttttttttaattgctacctctaggatcctaaggctgactttatgtggaggagacatttccaatgtccgtcttcctgcctggtccctacctgaccctccttattaagcacagggataagccttggcatgtcctgccagcaagctgagggctggggctgtctggcctgtacttgccaaatgtagtctgagctgtcttctctctaaaggactcttcagccccatgacccccaagtatagagccagacccaaatgtgcctcttcacatgttccaaggtgggcatgcttgggaacctcatccagcccctccttgacctgaggggtctgcagcagcagcccatgctcatcttaggcagtataaggactcctgtggctgcagaaccacgaggtgggactctcctcaggggctgcttcttggtgaatctgcactctatttataatcaaaagctctgccagatggacgtgaggtgcccagcagagggtaggaacactggcagctgccttggcattttgttaagtaggtatgcaagttgctggcccatcagagagctgtaaggtgctggaatgacagagccatttgttttcccttgtgacatggtctgttttataacrtggtgggtgagatcaagggagaagagtgggccccttcatagtttttcaaagtccttttttccttttttagaaaagttcaaagaggacattgactttctacagtcacaagcatcagcctgtcttggagagacagcagctgtggcatgtagtattttaaggtgatgagccaagtcagacaagtcctgatataggtggggtctggacatcctgagtgatcattctcatctaccactcctctatctgggccattctcattcattcagtagctcatggattgtctctctatctgggccrttctctttcattcagtagctcatggattgtctgtctatctgggccattctcattcattcagtagctgatggattgtctaatatgtgctgaggagagagggaatagatgcacatggatcctaccctcagcaagctttctgaacaggaggcagtggacacaaacagctgtaattagcacaaggtagcatgaagcatcgtaagaaacttggagatgtgcgctggcatggggctggggtcagaggtggttggattgatgttcctgattcctcccttctgggatgctcgtgttttatttattttatctaaaacctgcagaacctttaccacttgtttctacctttaacatcttattgcatttatagcctctctgttcatctgtctgtccatccatccctccatccattcaccatctaacatttaccatcctaagacaggatgcagaaggaaggaagactcagtgcctgctctcagggagctcacctttgattgcttccttatggtcccatttgtgttgggggttttgttccccagcttaactgtaagttccttgaaggtcaaagactgtcttcttcagtgttcttggaagttgaaaaatctgtttggtcagtggattgctgcagctgtcgtcttgggtgtatgtgcttaacaaaaggcttaagagtgtgtgtctgcagggcacaccagccttgctgtttgcagtgctgcacagatgactctattagagtcttttggttctgatttggaaatctagagtggtgggagggtgggaagggaggtggggaaaaatacaatgtctcaatagaccaagttcccaaaagtgtatctgcacttgaggctttcctgaagaatgaaaagcttaattcgtgccttttctttatgctacttgttcttttgtcttttttttttttttttaaggaaaagatgtgtcaatttcagttgcctaattcatttttaatatgggtcagagctgccatattcacacgctttgtctcatcacacctaggcttctgttgaaatgcttgcttcacaaatgaagtttaattaatagaaatagggaagtgaacacagggctgatgaatctggggagacatgacttggtgcctgcccagagaggtccctgggtcagattcctcccgagcctgttgtcagaggcagattcttacttagggagccaggatactgggagtcaggctggggcattcatcaacaatgcatagcatagatttgcttcttagcagatgtggctggcctatttacagttagaagaattgtcattgttttagaaaactttttttgaccaaaaaataaaataaccaccaacaaaaaacccagactcttgagttgaggccaggtttgaatctcaaagcaggttgacctattttcattacagcattatcaaaacttgtgattctacctccctaacatgcttttcctggtgtcacatgaattgaacacctgattcaagcaggagagagagagtgaagaccttgtccttgtctggggcggccctgtttcccactgtgctgtggtctgaacctctttgagtaatgcctcccagagctcacctgctaatgactgtgctccacctggggaggggctattgggaggggctggtccacgcagacagggctgtacctttcacgaagtgctttcacatcccctgtttgaccttgacaacttcccagtaagggaggcagtgcctgcagtgttatccttggtccacaggggaggaaactgaagctcacacaggcaggcagggggaaggcctgggagagaactttcaacactggcataccacggggatttgtgagagcacctgcctggagtccctgcctccgagaacttcgacttctttccagatcttctgctctcttatttgatttaagtagatccaaatatggttcaggaacaaagcaggccccaaactgtgtataggatatgtgggtaatgggccagaaagctcactcctctggaaaatgttggaaagtgacctctcctgagcatcccagtgacatggctggatgccctgttgagatatgagagaaggggctgggggacaaacccatggcaagggcactagctgaaggaattcatgcagaggagaggagagggcttttccactgacgtttccttgcctctattckgtgtgtgtgtgtgtgtgtgtgtgtgtgtgtgtgtgtgtgtgtgcattcctccttggaagatgagagcttctggtctcaaggggccatgccctgtttctcagcagcctcctcatctactctcttggttttcctcattctcttcgaggtaacaagtcctcacctatttttttttttgtggcaccctacagtgtctgcagtgataagagcaggtatctttaaaaaatcaaagccaaattaatctactttggttttttaaagtccccatggtccacaaaaatatttacagggactggagattatctgctagtattctaaaactaacagtaacaacgattctttacatttttatagagagcttcaaacattttagactatctttacttctgttttcctgttattcctagtacctctccagattagacaagatgatattaaatatttccatcttacagatgagcaaattcagacttagagacgataaggtactagccccctggaaaacaactgcactgaacctaggtcctttatttctgaacaagacaggcatcgtgttgaacttcatgaagaagataatctaataattgaaaatacatcaaatacaaggacaaataagagacgctgggggggtaatgtgggagaaacctaaccttgtctgagggtaaaggcagtgtgtaggtgagacatggatgctgagttggcctttgctgggtgaagagagtcaggaagattgtccagggcgtgatgtgttcctggaaccgtggggccccatctcagtgggccttgcaagccaggatgagtgctttggtttgtttttaaagctgtgagaagccactaaagggttttaagcagaggactgatgtgggttttagaaagactgctgtggctattaggcagaaacatgtggggaggggcaagaacaaaactggagagccagagcaggcagctgttagagttattcagggaaatgttcgtgctgtagactctggggtgactgaagtgggaagattcgagaactattggggtgtagaagggacagcagctagggattatttggttgtggtagaggacaacaggtaatagagactcaggattttggcctggatgtaatggggccattttctgagttaggtaactttttacattacagggtcttctctgggacctgcgggggcctgttttgggcaggagggcaggagcatggactcattttgggacatgctgagtttgaaatgcttttaaagtatgttatgtggaaacttcaggcaggaatggggacaggtggttctggagctccaaagagagaagtgggctggaggtgcaaattccagattcattgccacaaagtgaataactggaatagtggacaggaattagaccaccaaattctgtgattctttcgtctttcccgtacttcttgaggggatttataaactcaagctcaaaataggaacctgagctttaagagagatatagccacgtttggagttggtttaacaaaggctgttctgcgggtcccagagaagaccctgtaatgtaaaaggagaatctggtaggtaattggaaccaacaaatatacttaatgttatakcccagtgatggtgatctcagaactcacggttggttgtacgaatgctggttcctggtctctgtagaattgcttccttatggctgcacattccatcaagtggttctgcccaaatttactcaattagatcttggtggtgcatttcacaataagaaataattctgaaatacactcataatggtttcaaattttagatgaattctttggattaagacctaggggtatttccttggttgtagagaacacacacttttatgactccttgttatgaaggcaacagactgtgtaaaagaactctggagttgttggggcaagagctatgtggtgtttctccctgaagccctcagagggttgtcctcctcggatttcaagggacccgctctgtgaggcacactggagtctcagrggcaagctctttttcactgactcactcaccagtgtttgctgagtgtgtctcatgccttctttcttgcttgcccctgsaacatgcacaggactcagacccagccctgcttgtggcctggggctggtagatctcatgcaggtaatcacggctgaggatgagctctgctttgtgtgagttctggatgaagtctgggggagtttggagacgggagatgctccttctgcctgggggagtagagaaatgcttcccagaggttatggaaggaaattggatttgtggaggtgactgacagatmtgtgccccttgtrtcagtgtctctagctgcgacagacacatgggtcagcaggcgacccttgttttccctgagagcagcaaaggccctggtgaggatgtgtccagcactacaggactggctagctgctttcttttttacctttcagttttcaaggtatgaatttttaaccagatactttctaaccttaaagtgatttggtactcccaaggaatcattctgaaagttaggaaatttatttgtgattcattgagttgaactatcaataactgtaacagattccgatctcctttgtggaaaaaaaaagtaactgtcttctcaagtacaagaatgagagaaagggtcttgattaccattttgtcctgttcaccttttttggagaacacctttaatttcttggccacaccgtgctcgtcttcattttgcacagcaccactgttgtaactcctaaaacttacgcatcacggcagatgtgtgattctttcattctttagatctgtagttttcccttatayagaagttagtgtcttctcttccaatgtatttaaacctttaatgaatatttcatcaaatgaacttcatgtcttgtatttcattattaatgttgtttatgagaccctatcctcattagcataacttacaaactaagaggaagaatgatattttaggacagtggttggtgagagaatagttgcgcatccttctacacgtgtcaaatgtgggcctttagcgagcctgcaggaaaagctgggatgctgagtatgtgtctcgcctggggtgacagatggggtgttcatgttctgtgagctctcagccgtcccgagtgtgtggctgtccctgcagcatttggacgaactcccgccaagaggaagcctgggcatgggggtgctgtgaggcaggactgagtgtatgaatcaaggtcggccttgtcctagctgggtgacataagccaaaccccttgccgactcttcagggtcattttgatcttcccgccacccagatgtcccctggttcactgatgaccccgataactaatgtgtcattttcctctatgtgcttttcttttagagacaacgtctccttctgttgcccaggctggagtgcagtggtgcagtcatggcttactgcagccttgaactcctggcctcgagtgatcctcccttctcaacctcccaaagcactgggattacaggcatgtgccattgtgcctggccttgttttggcaaaaccatatggatgtcccatctaacactccagcctctcatttcaagggcccttttcccctttggccatccacttccacttgcataccctgggcctcatggtttgggtggctgtttcagctcctgaacctctaacttagtgtgctcctcaccagccttgcccttctctctggcctgcctgctcagcatcacccagggcctgttttccctgcagacctgggctctcctccttggccaacttagatgctagacctttcacctcacctcctcaaatccctttggtccttttcatcacttctgtgcaggacatcccagccctggatggatccasctagtggtcctggccctgcctggccatccagcctcagctcatgccactgcccctgcatccactactgttctgcttcatgagctgccttctgttgctctaaggagtcaactccttcccaccttggagcttctagaccgtgtcctctccccagatggctcctccctcacttcgtctattactttaagctccacatcatcatttgtttcctaggggagcctcctctgactgcctggttgaggtcaggcttgtcgtccagcctatacttaggattgtcacttactgtttgtgtgcttatctgttcaacacctggcccagggttgtatagggcagacctagtttcagaccttctgttccttcatgcccatgaaatgtcccagaaatcctattgccttggcatccaaatgccattgcccagactgtctcctatagtcagaaacagctcagaaagcttttatcagcatgagtgtcctagtttttggttcacaaaacaactgtggtcatcacagttctaattcctgttggttggttggagagtcagtacagagtattagctttgggccagattccttgagttaaatccttgccacttataactaggtgagcctgggcggccgggcaccctctcgtttcctcatgtagaaggtgatcatggtgcccacatcctggcattgccgagaggatcgagtgagcgggcataggtacttctctacactgagaagcactgagcacttggtgagcatccggaaacatctgctgctgttagtgtgggctgagctctgtcygctgtgggctacagaaggccctactgcctgtcctgcatttttctcttatgtatgggctttcagtaaacatgtttggattgaaatacacatttgaggaggcactggacccagacctttgagcctgtgattccaaaccctttcctcctgtgcagttgcagctcacttcccacatcactcagtcctgcctctaagcgacactacactgtcaccttccttcatcatcactgttggcgctttcacataagcaagggccccatgtatttttctcttattctctctgtctggaatactctaattctttccttgaatccaatgttctgttcacctcctcctttatatttttaattttttgttttatttatttatttagttttgagacagagtctcactctgttgccaaggctggaatgcagtggcatgaccttggctcactgtgacctccgcctcctgggttcaagtgattctcctgcttcagcctcccgagtagctgggactacaggcatgcaccaccacgccccgctaattttttgaatttttagtagagacggagttttgccatgttgcccaggctggtcttgaactcctgagctcaggcaattcgcccaccttggtgtcccaaagtgctgggattacaggggtgagccaccacacccagcccacctcctcttttaataccagcttcacaaacatccttcaggatatgtctccggactctgagcctgtgtgttgctctctgtccactcaatgctgtgtcgatttgccctagtaattggcaattataattctaagattataaactacagtatcaaaggtaagagcaatgtttcctctcccaggaactacacaaagcgtagaagaactcagtatttcctaggccttcaggaaaagcttgttgactaaaagaaataaccagttgacctggttttggtgtccgtttatttttgcgtggatatgaggtgtaccctgggatccttgttaaatctcatgttactcagcttgttttgtcaccagtgttgggcaaaactgggtgacaggctctccaccttctctgcccctttcttttctttccctgcttttccaggaacaccttgattcttctgtacgctagggtgtcatttctctcgttccttcagcagttcaatgagagttcctgagcactgcctacagtgtgacaggtgctcatctgagcgtgaggagcagcagtgaaccaaataggcagggctcctgttctggtggagctatgttctagtgggaagagaggtgataaaggaatatgtccacgacataggtggtgcttcgattctagcagggaagacttatgttgattggccaggaaagacgtctttaatgaggtgccatgtaggcagggatctgaaagaagtgaagggagcaagctgtgaggatagccagggcagaggggatgggcacccagcctggctgagagtgtgtgtgtgtgggggaaggagatgtttttaattggaatggagtaggggtgaaaggaggagctggaggcatcagaacatagaaggccttctaggaaccccctaaaagggccttggatgttactccgaattagatggagagctgtttgaaggtttttgggagcaggggacattatctgatttgtctaatgtcaccttaggtctctcatgagcttaaggaaatattaactcattcataggaggagggaagtaacttctgttttaaggagggacacttgcctaattcctctttgagtaaggcctaatctgtcagagtcgtggttggactgtgttctgaactgtagcatcccagggcctgaccctagttctgtttttttttttttagatggagttttgctcttgttgcccaggctggagtgcaatggcacaacctcagctcactgcaacctccgcctcctgggttcaagcgattctcctgcctcagcctcccaggtgcctgccaccacgcccagctaattttttgtatttttagtagagacggggttttgccatgttggcccggttggtcttgaactcctgacctcaggtgatctgtccgcctcagcctctcaaagtgctgggattacaggtgtgagccactgcgcctggccaatcctagttcttttactctcttgcttttgctcagcctgtaagtaggagtaggaagtttcaaaagttacaataattaacatattcacgcctttttcacggtctgggggagctaaagcaggtgcaggataaatgaaggaactgaaccagctaggaccaaaatcagtaatttgaaccaaacttgatagctactgttttgaaactgtcattcctacctataggtagataagggcaagagattataaaatctgatggccacgaatctaattttatgagacagtgtaatgataaaaggaatgagggaggctgataaatacagatctgtatgtcttccagttttagccagcttgtcttgtttctgagtttcttgagtttcttccctgggaattgttttaggcccaaatggtaagcaaaaggaatatggtgtaagtggaattaaataactccccccagcacctcctactttctctcctcagatgtgtgagtggtaaatactttggaagaaatacaccccaagcctggtgtgttcactctgctcccaaaggtgcttgggcagttggtggtgatgggagtgttggttgattgtagctctgtatatgagggtgtctgaggattgtaaaattatcaggaaatccctcttggtgttgaagtcatgagcaggtgcaggagaggtgaaaggaaagggcagtgggtattcttccccctcaaagtgtgggaagagcagtgctccaaggccacccaaggagctgggattttttccttctaagctggttttccctttctccccactcccaactagcacgtgggcagaaggaagtgctttatctgcctgctacagggctgggaaatgtggcccgtgtactgcctcagtgcttgggtcaccagcggagatggctgcagtcccagccagctctgcaggagcttcagtcagaaacgctgatgttaggatgcattcttcagggagctgcagcttttcttagaaggtggaaaaagagaaagaagtgagtaaggtgaagtcttagaagaaggaacaacagaaaccaagttcagtgacagcccaccaggcctggcagagtctgacaaggagtctgtgaggtagggagtgtgcacgtgtgtccgtgtgtgtaaaggctaatggaatgggagacgcccttgaacagaaaggctttcacccataagtgtgaagtctggttcgtcttagcgacaaaagttagaaaaccactttcagacaataattgtattattttacagcattcgaagcaacctgagttggtctcaaaggtggctccctcaggccttacctgaggatggggacagagttgctcaaatgctttgggattactgagactagagtcaggataagctcgatcccaggttcctcaggccatgcttttccactagccaattcagtcccttcagcaagtgtttgtcgagcacttactagatagcaggtactgctcttggcacttagagatatttggtgaaaaggtcagcctggagcttccattctactcaggagacaaatgagtaaatacaggaggtgatttagagagcacctgcctcctgtaggaaagaaagggaggttatgcaacagcacctggtaagggtggtcagggaaggccatgtggggctctgggacagaattttccaggcggaaggaagatacagaggcttcaaggcagaaagaaacatcattgtggagtaatggcaggtggctgatyccactctctgcatgcagaaaagagcagcagccttcttgaagccttcttacctttctcacgttagtacaattccacacccttgtgtgtatgtggcagccactgtcataggcatcagggatcctgcttttcttccccttgaccaagatgtgaagatttgtgatcagagcatcagaaataaagtcccttgagacttgcagattgaggaaaaaatgacaggagtcacccagatatgaaaatcagatcttgaattcstctattgatcaggcattaggcatggtgggagttcagtccgtttcagctttaatgtcctgttgttttgctattgatttctttcctcaggtttcaattggtattttttccatgttgtctatacattggtcatctattttagtgatgctaattgtttagctattaaaatggtgcattagtcccacacaactcttataaacagctgtgtagtaaggagtataatctttgtatctgtagtcccccttagggttaataattaggtttttgacagccagctcagccggcttgttttcacagtgccctgtttcccactggagaatgcaaggatgcagtcacgggaggaccaggtggacagcatttggaggatttgggtggatctaagaatattttcatttggaagaacaggatggacaccagaggccaaaccaaggagtagaggaaaacatggcacctttcccccatcccacccctggaactttcacccacagtatagggttgccttgaagctctggattaccatggagctttcaatgagtaggaggagacatccatttgtcctctgtctccagctggccccgggaactattcaacatctgggattgcttcctgcggtgccccctgacccaactcaccagagtctaccgactctagacccactgttgtcctgggcccctgcctgactcttttacccactccaggatgaccctggtttctactgacacckgcctgacctaactcggtttgtctagaatgcagttgaagttgcagcaagggagatgaggaagggtaagaattggtgaaaaaaattacaaaggtttttcatggttcctaccctcgatgagtttacagtctagtcttcatgaggacatgtgctcatttgatcataaggcattttgtgacatgtgcctggaggtgattcagacagatgggcagggcaggagggaatgctggggtgtgtatagcaaaatgtgttattaaattatggcatctgttgtcaacaaccggtttagaccttcttgatctcctggggtttcttttcagttacagaattctgtcatcattacagaaacaaggcttagccacttactgctttaaataccaaaaagagatggcgaataagattgggatccatggggctttgagaacctagtagcgtgtgtgctgtatcacagttctcttctggctgatactggagagggccatgcaatgctggggacggacagctgtactagggagtctggattcgaattctggacatccctaggctcactgtgtgaccttcatcccccctccccccactccctgtaccctttgagtgcccctgccttcttactctgcatgtgtgtgcatgtgcatgtgtacccatgagtgtgaggaaggataactccagtgttgggggagagtctgccaggagataggtgccctgagtagtggtcttctcttgggcacttaccgactgtgtcattttggaaaatggccccccccaaaagatttccacatcctaatctcttgaacctgtgagtatgttaccttacatggcaaaagggatgttgcagatgtgattaacttcagaatcttgagatggaaagattactctggatttagatgggcctacccaatccttacaagagggaggcaagagttagccggagaaggagctgcagtgatggaagcgcagaagtcaagagtgatgtaaycacgagccaaggaatgtgggcagccttagaagctggaaaaggcaaggaaacaggttcagccctagagcctccagaggagcacagtcctgctgacatcctaattttagttcagcaagacccatttctgccatctgaccttcagaactgtaagatactaagtttgtgttgttttaagctactaaattatagtaacttgttatagaagcaatgggaaacatacatcaattattcctctggatattagttgcttcagctctaaaatggggacacaaaatgttttctgcctgaaggctgagaactggaccatgtgacttttggmattccttcaagttctagatttcatgagagagaaaatcgacctgaaaatgcattaaatgtttaaaaacatagggaagaaagaaatatacaattatttaatgtctgtgtatgtcatttaattcttacaaccacctgagagagattttataattattattttcttttagtcattcaagtatttgagtgcctatatgtgccagatggtgttctaggtgttagaaataaagcagtgaacaagaccaataaaaatctcctgtctttttgaagcttatctttagggagacagatgagaaaccataagcataattgctaagtgaatcatcagctaggttggcaattgatagctgggatggaagaaaattagagcaggttgatgggagcatgttactgactaggattgcaggagctcagagggtgagcagtttgctcaagaccacagcaccaggaggtagtggagtggggatgaaacccaaaatctgttggaatccagaggcctggtctgatccttttctcaggctagtagaaggctctgcctgactttgcctatttggattcccccactttactgagggagaggagtccccactgccagctgttgttaggacaattgctatcatcctgggtttcatatttttagctcctttcccatctctctaataagtaaatgccagagggctagggctaggctgatgctgggaatgagacgaggaacacagacggcacaggtcgcttcatgagttccagaggcttgtacaggagacacatgggccggccactgtttcctgtctctctgagggagctgcaactccagcctttcatctcacaactcaagttgcttttgctgcagctgaggcctgaatgtgcatttgtaactctggggaaaagggtgttcagttatcaacaattactattaggttggtgcaaaagtaactgcagattttgccactacaagtaactgtaaaaactgcaattacttttgcgcctacctgatatttttatgttgcatggccttttcctggcagtttgatgtttatcatttcctgtcattgaggaatgtgtttttctaggacagtatgaaggctttcaggatctttagagggaagctctaaaatgtgmttctctctccattaggttggctcatcagtcagattctgatttgaaaatgaagggtgcttggcagtaagaatagtggaagtaaattttcaatattatacattaacaagtcataactaataacttttatgggttcttcccatctcagatttcagagaatatttttgggttgtgttctattgatgagggcttaaagaaatgccttgttctggctgggcatggtggctcaggcttgtaatcccagcactttaggaggcccaggagggcagatcacttgaggccaggagcttgagaccagcctaaccaacatggcacaacaccgtctctactaaaaaaaaaaaaacccaaaaattagtttgggcatggtggctcatgcctgaaatcccagctactcgggaggctgaggcaggagaatcgcttgaacccaggaggcagaggtcgtagtgaactgagattgcaccactgcactccaacctgggcaacagagtgagaatctcatctccagaaaaaaaaaaaaaaagaaaaccaaagcaaagccttgtcctgttgtgcttggtttgaaactgccattccctttagtttctgcttactgctacttctacacaaggtcaagagaaagcctggcttcagaagaattacatagtcaacccctggggctagctagctgcagaagaacttgaacttttggttaattaatggaggctgggccatagctggcaaagcgggatgtgcccatgcctgggtgttgagagactgggtcttgacatggctctgcaactgtccatgtcatcttggaagatctttctgagttgggacagctgagaaacttcatgccatttgacagttttcttgaggtcatgagcaaattaaccartcaaggaagtaaataagtaagttttggtggaacaartttgtatgttattggtgtgcctttttttttttaataccataggtgtgttcctgatgaaaagggtgtgaataaatggaatttaaaatagttttccaatgaayggaatctttcacatgttaatatatcagggtcttctgcagtgacagctttgcctgaatttcatttttcacattagcttaaaaatattttaaagtaaaacatgttaattttgaaacatataggaaccagataaaggcaatatgttttttataaaatggaatcatatcctatcattggacttttggctgttttcctcttttaaccactataaaccatgttgcattgagcatcttggggtagcaaaatcacagattcctgattatttctttagaataaactcttagccttgaaattgctgcattgaagcatatacaggattttttttatatgagtcgcaaagttatttgctttgcttttgctttttgaaagagataaaagcttagacatcttgacattaaaaaaaacaaaagggttaatagcccagactttaaagtcagacatacctgaatttgagtcctggctccaccataacaagctgtgagaccctgacaatttacttcccatctctaagcctcagttttctcatttataaaatgggcataatatccttaaactcactgtgagcattaattgaatgacacgatataagtaaaacaccataccgtacatgaattctctatatgggaattcttactaatttgtacctgaacctctccttattcactagaagagtgtgaaaacttagtttcctctctgctccacccacggctttctagcagtcactgtaggcccaaggaaacccaccaccrtcttggtgcactgtaaccagggttgaggtgtctgtcctaattttgaaagcctgccttcagacatttatatgttcagacaaactaatcaggctgaaatttctcatgcttatttgcagctagatgaagcaatccatttagttgctttggaattacccaagcatggaagaaattggtttctcagccttgagatattctgcagatactgaagtacagatggcaccagggccagcttggtaaaaccagaaacaaggggcctgagtttggccctttgtcagggcctctgtccttgggaactggtggttccacctggrccccaacataagcctcagcttttcatttggccagcatgtatcatgaagttacttcttatttcaccctttgggggactctcagctgctcagagcttttgtgttttctcttttcagcttcctcctcaattgatacggatgaagtatttgctgaatctgtttctctttcctgaatcagaggcccagaggcattcatatagttgctttctggtaaaaccttgctgatctggtatttgggctgtcattagrctgtagtrcaaaaagacgaggtgaattttgggactccagatttcagagtgtataatatctcttgtagttaatattcacaacccatgagataggaacagacagggaaactgagataccaaaagtaatgtgcccaaagacgtgcagctagtaaatggcagaactgggatttgaattcttgctgactatggttccatttcaactattactcaataccaccttttaatctgcttattataatgtatttcataactttctatgctgtggtattgatcattcattcatcagttacacaattattgcatggaaggatacaaagagaaaaagatatggcaatgtggtccttgttcttagggaattttcataaggtattaacaggagaagcaacaagataactatagatcataatataaaaatacctcccctctttgttagatagctttaacccccctgttcgctgaaggacttggttctgaatgattgaaacagataatcctccgtgattcccgtacatgtcctctgtgcccacctcccactccagcggtgagtccattgtgtttttcctttattggcaaccctaacgtgttggggcaccctctctaactccacagtacgttgtaagtttggtgttaggagagaaatgatctcaggcctgcacagcacactctttttctgttccctgccttttaaggtcatgccctcttgtcatgaatataagaatgcctgtgcccccttcggagaccggtgccactttcaggctgtgtgcatgctcactgcccctccatcctccttgagaaccatcgatgtgcacagagggttgtactgtttctctgtacatcccatcagcatggcttactcaagctttgcttcctgtcatatgtactaaggttttcaatgtgaaaatatgaaattacattctcatactaaataggctcctttaatccacactccyctctgagaaccaatccactttaccaagatctacccctcttggggctgtgctccctggttaagaacarctggtttagtagcaagggagaaggcaggagatgatttaaaacagaccctgggattctaaaagtcctgggattttataattcctgggattctaaaattagctgggaagattttgagtagcggaaaagagcctgccaactttagccatcctggataataccattctgttttagcttgatcactaatttttctgaccccatgtagaaaacgtatgtaaatcatggtggtggtagcagcagtagtagtaacaacaataatgataataatcatggcagtagctcccctttttttattttttattttttgagacggagtctcactctgtcacccaggctagagtgcagaggcacgatctcagcttgtcttggctcactgcaacctccacctcctgggtccaagcgattcccctgcctcagcttctagagtagctgggattacaggtgcccgctaccatgtctggctagtttttgtatttttagtagggacggggtttcaccaggttggccaggctggtcttgaactcctgacctcaggtaatcggcccgcctcagcctcccaaagtgctgggattacaggcacgagccaccacacccagcctgtgttagattagtgttagagtcaccttattgatctgtcaacactaggtcttatttcttcaatctatttgtacccattaagaagcctttcctcattctcccctctcctcacccttcctggtctctgataactaccattctactctctatcttcatgagagccacttttttagctcctacatataagtgagaatgtgatatttgtcattctgtgcttggcttatttcagttaacataatgaccctggktccatccaagtggctgcaagtgacagggtttcattctttttatggcagcataatattccattgtgtatatatgccacactttcattatctcttcatccattgatgggcacttaacttgattctgtatttgactcttgtgaataatgctgcaataaacatgggaatttagatatctctttgatatattgatttcctttctgttggctgtatactcagttgtggaattgctggatcatatgatagttctatttttagttttttggggaacccccatacagttttccatagtgctgtattaatttatatgcccactaacagtgtgtgagggttcccctttctccatatccttacyagcatctgttattccctgtatttttgataaaagtcattttaactggggtgaggtggtatctcatggttttgatttgcatttctctgatgattagtgatgctgagcatttcttcatataacctgttggccgtttgtcttcttttgagaaacatctatacagatcttttgcccattttttaaattgggcttttttttccccctattgagttgtctgagctccttatatattctggttattaatcccttgtcagatggatactttgcaaatgttttctcccattctgtgcattacctattcactttgttgactgtttcctttgccgtgcagtggtgcagctttgctgagctatttctctccagcggacgaagttgtccctcttggagagtgagatgcagttgcgtcacaggatgttgtcatatgctgggcatgtggcacaggtgaggtccctagagccgtgaaggccaggagggctggttgggaagcatagacctacatagcatgaaactgtgctcttcattttggttttgcatctgcggctttctgagagacctgagctgacacatggaacagatatggttctcccttgagaaattgttccaaatattttgatgtacttcagccagtcactgaaactctttagagtgggaataatgctcatgcttgccttgaacagcagtggcacagagtgattgaaagcctgagctttgaagccagactgctggggtttgaatcgcacctcggatattaactgctttaccttgggcaagttttgtaacctctttgtgcctcggatttctcatctgtaaaatgagacataataagaaatgtaccccttggggttgttgtgagaatgaaatgactttctacctttaaagcacgtagaacagttcctgggacctagtatatatagatggtattacactgtgaaatcatttgattctctaaatcaaatgagaatgcttcataaattgcaaaataccactcagtactcttagcgacagagggagaaaaaatggaatattgtgttggaagctatagtttataatcccacttcatgtggcagcaataaaactggcaagttattgatggggagcccacaaacatgacaggctccccagaacaatgatgcctcatctgtgcatgaatacccctggggaacttcaaaatccatatcctatggttgatttccagattcactgaattagaattttgcagggatacggggtactcaggaaggttttgtttattttttacagaaagatttccaggtaatcctaatgcagctgatgtatggactggtgtttggtaacttctgacctggatgctctaacagttggttatatttaatgggatgcaggaagatttagtagagggcctgacagcaggtatctacatttacataaattttcattaggtaatgcggatggagcaacacaggcagatttgtctggaggaaattctagacatctaaagacacctaaatcctggggctgagagtatggctctatttcttattgaggtcagttttcactggctgactgattcccttaccatgaagcacarggttgatgggtactcttaattgtgtgaaaagtgggaagtgggaatagttgcaaagggagttggaagtaggcagttttgaatcctggcttgcctgctgcatactggatggaagctgcagatggaggaaacagtgcagaagactcactgagcaggcatttggatgactggccagcagatggggagtggagctcagtagatagccattctgcactcttcaggagagaagaacaacctggggccatgtgttcaataaagagatggggctggcacattgttgaggaggagaaggaggatttcaaatggagggctttttgaagaaggcattgaacacctccccacccacccctgccctgcacttctccctgtagctcagaaaccttttaatagccatgggaccaacatctagcagctggcttggttttgctggtccttgctttaaaatggggatacatatccctgctttacagacctgctgtggagttggatgaaatggtggatatgaaagtgccttaactgtaaagtgctgtacatacttacagaagcattggctaccatgtggagatggcgtgccccttggtattagtaggaggggacagactctgaccctctaccaggggtaaagccccaaatctaaagatctagaaacattarcaccttcatttcaaggtctgatatgtaagaggatggacattcctaagatttattgtgggcagagtagcatgctcacccctgatggtgacagtatccgtagtgggttctcactgtgggctgttgcatttaggccactggttatgcctgcttcccagagctcacatgtaactccattcctttctcctctactcaagaaggtgcacttatgtgtgtatgaaacagggacattattaaaaaggtaacctgaatctacctaattaaaagcacaataaattcaataggttattcagatttccatactgtactgttagaaataaatgacattcacacactgcatagcagttgtgaaggtgagaaccgcgactgtgggtagggagatcctccagacatcagcaattcccatgtagtgtgagaccaccgtggagggctcctttgtgtgtctggcacygtgggaagttcttagggggacaaatgaggtatcattttctggcccctcaaagtactttcatctttccaggaatgtgtaattatgtgcccaaatgagtggaaggctcctaggttctgtagttgttcagagaaagaagggactcgaactaattgaagtgattgaatgagcagcacactgaaagctagctgtcaaatctgtaattataacttctgtgcagtgcatttgacattttacagcatttctataaggataatgaattctgatgccttcagaagccagataggtaacaaaaatcagggaagcagttaggaagactacacttggatggttagtattgtggtgaaccagaatgcgtgtggcccacctttaagacatggcgatccaaaatttaaaacagaagcatagcacagcacttctgattttcaaagaacttttacgaatgtcctgtttcatgttcacagcatcctatgatgcaggtctgttctccccttccagagataagaacacttaccaagatcagtaaaggtggagatagcatgtgacctggagactgcaatgccagtgctcagagctgtgagatgctttccctagaggccctgggtcccaggaccaagcccttggggaaagaaggtatcatgctttcctgaagtgtctgccctctccccagagcttccctagttattctctgagcacagctctggggagatgggcctctggacctgtttgtttctactgttaccccgtgacttaaatgggcccaggaggcaaagactaggaaacaccaagaaggctggtgtgggaattgaagaaaaccatcaactgtgtcaacagactggacccaataataggaacaaagtgctgaaatcagctttgcagtcacatttagttggctgacctgtgatttctcaactgtctcttttttatcttttaaccatccatgtcatttttcactgaaagaaaaagagaaatgcagagatccagatggagtcccttgaacccttgagccaaagtacagaaacccctgcactgtggctggatgcccctgaaggagggaggccatgtcagttacgattaatgtgagcagcttctctcattccagaaatgtgacctctggttacagcaaatgtgacaacatgaattaccttcaattatggtgaactacgtttaactacatgattgcctccacaccttggtgggaactggctgctttgatagccttgaccatggaagaaaaagacagtagaaaagacttggaaatgacaggcacctagaatctgagtcaagggtacagtggcaggccaagggctgtgggctttctgtattatcagtaaatgtgatatgtggtttgggctttgattcccaccagtgcttgagaaagggatagttacccactttattgagctaaaatttacttaaaacatatgcctttaagtatatattttacagatggatgttttgataagtatatacactctgtaactaccaacccactcaagatgcagaacactgctatcaccataagggtcccttgtgccctatctagtcagtcctcacccccaattcctgacccaggcaaacactgatctgctttttactactatagattagattcatctttttactattacaagttatattcacgtttcataagtgaaatgatatagaatgtaatcttctgtgtgcatcacaagtttgtcctttttatggctgtatagtagtccattgtatggatataccacaatttgtttatccctgtacctgctgttggacattagagtctaaacrttggaaacattgttttggctatgaaaaataaccaggttttggctattacaaataaagtggctatgaacattttatataggtgtttgtgtacacacatatatgcttttattacccttgggaaaaatagcaaagactgcagttgctgggccatattgtatgtaggtggggttttggccctcattatttttgatgctccctggtgatacacctgtgaacgtattatgttacagggcaaaagggactgactgtgcagatggaattaagcttgctgatcaactgactttaagataggaaaattaccctggaagtgggcaagcccagggttatcacatggacccttaaaatcagaaagggagggcataagccaatcagagagacatggtagaaggagaggtcagacttaaagagtgagaactcaacctgctgactttgaagacagggaaaggaggccatgagccaggcattgctgatgtcttctagaaggtgagaaggacccccagctgtgacagcaagagtggggacctgtcttatgtaactaaattctgccagcaacccgaattagtctgaaagtggattctcccccagagaataagagtccagacttatagttttagcttttgcatgtagctctatgattcattttgagataattttatataaggtatctgtgaagtaagagttgaagttcactccttaacctgaatatccagttgttctagcatcatttgttgaaaaactatgcttgttgaataactttggctcctttgtgaaataaattatgtatgtgtgtttatttcggaactttctattctttcctattggactgtatgtctcttcatacaccaatcccactatgtcttgattaatgtagctttatggtgtatctggaaatcaggtagtataagttctccagttttacattaggttctttgtatttccatataaatttaataattggcttgtcaatttctataaaaatagccctgtttagattttgattgggattacactgaatctatatctcaatgtagggagaattgacattttaatatcaagtcttctgtccatgaacatgtatatttctcataatttatttagatttgayttaatttttttcaataatgttttgtggttttcagtttcaaatgttttgcataattttctaaatgcatccctatatcatttgtttctgatgttattgtaaatggtatttatttcaattttcatttgtttattgctaggatatagaattaaaagcagcttttgtatattgactctgtatcccataaccttgtaaactcatttcttagttactttttcggtgaattcattaggattttagacatatagatcatgtcatttgtgaacaaagatagttttccttctcccgttataatcggtaagcctttaatttctttttcctgccttattacattatttgaaacctctattacgatgtggaataggagtagtgacaatggaatccttgtcttgtttgtgatcttaggggaaagcactcatttcttcaccgttaagtatgatgctagctgtgggtttgttgctgatgtcctttattaggttgaagaagtttctttctatttctatttctcaggagcttttaccatgagtagttatggaattttataacactcttttaacgtatctattagaatggtcatatggttttcttttttattccactaatatagtaaatagcattaattgatttttaaatgctaaaaccaccttgctttcttaggataaacatcacttgattgtggtgatggtgccttatccttttgatatattattgaatttaatttgctgttattttgtaagaatttttatgtctgtgtacatgagggatattggtttatagttttctttctttaaatgtctggtattgttggcttcataaaataagctgaaaagtgtgccttcttcctctgctttctaagagactttgtgtaggattagtattatcccttaaatgtttgacagaatttaccagtgaaatggagtctggagttctctttgtggaaagatttcaagttaagaattcaagttattaggccgggcgctgtggctcacgcctgtaatcccaacactttgggaggccaaggcaggcagatcatgaggtcaggagataaagaccatcctggctaacatggtgaaaccccatctctactaaaaatacaaaaaattagctgggcacggtggtgggcacctgtagtcccagctacttgggagactgaggcagaagaatggcgtgatcctgggaggcagagcttgcagtgagccgagattgcgccactgcactccagcctggatgacagagcaagactctacctcaaaaaaaaaaaaaaaaaaaaaaacttcargttattaaatagatataggactactcagattttctgtttctcttcatctgagctttggtagcttgtatcttggaaggaattttccaatttcatctaaggcatcaaatttattggcataaaattattcataatatttcctgattatattttcaaagtctataggtattctagtaattgtctttcttttatttctgataccagtaattcatttcctccttttctgcgatcagtctagctggaaatttctaagagtcgttgatgttgaaaaaaccacctttttcttcccttgatttttctctattgtttgcctattttcagtttcatttacttttgcgcttgccgttgttttttccttctttctactattttggatttaatttggtaatcttttctgtggtagaaggttgcacaattgattctagatcttttctaatatcggaatattggctatacatttccctctaagtactgagttacctatgctcagtttttttggtatgttgcatattatttcactcaaatgttgaaaatattttatttatcttctttgacccttggattatttagaaatgtgtttgtaaatttctacatatttgggttttgaccaacatcaaaaggtcaatcattgacttttaattccattatgatcagggaatgttctttgtattcttttaaacattttcaatgtattaatgcttgttttgtggcccagcatattgtctatcttggtagatattccatattaactggaaaatcatgtttattgggctgttaatgggtagaatgttttataaatgccaggttctataaatttaaccaagctgattgatagtgctattcttttgtatacatactgattttctttctacttgttttatcagttatgagagaggaatgttgaagttcccaactatacttgtggattgatttatcttttcagttgtgtcagtttttgcctcatatattttgaagctttgctcctggatgaattcacatttagggttgttatgtttccttgatgaactgatgactttatcattatgaaatgttcctctttctccctgttgatgttctttgttctgaaatttattttgtccaatattaaggtacacctaccttggaaagaccagttttagttgggctttattgttcactatgacaactctgtcttccagttgaagtgtttgtgtcatttatgtttgggttttaagtctaccatcttggtacttattttctattttttccatctatttgttgttccttttcccctttttctgccttcttttagtataattgaatattctttgacattccattttatttctactcttgccacataagctatatctattttatatgtgtcttctctgtatacgtgtatttaccatttatagggctcttcatttctttgcatagattcacatttccatttggtgtcattttccttccatttgaggactttgctttaacttttctgtagtgtatttctgttggcagtgaatcctctcagcttttgtttgttgaataaacttcattttactctcatttgggaagatattttcactggatatagaattttggattgacagtttttcttgcagcactttaaagatgccattctatcgtcttctggcttgcaaagtcagaactttcttttggccaggaactgtggctcatgcctgcaatcccagcactttaggaggctgaggtaggaggattgcttgaggctaggagctcaagaccagcctagcacaggcaacgtagcaagaccccatctcaacaaaaagtttaaaaaattggctggggatggtggcatgtgcctgtaataccagatgctctggaggctgaagcaggaggattgcttaagtccaggagttggaggctgcagttgagtcatgattgcaccactgcactccagcctgggcaacagagattgagaccttgtctcaaaacaaaacaaaacttttctttgattctgtgtacataatgtacacataaggtttttttcttcatttgatttcaagattttttcttgatatcagtttttgggtacttgattttagtgagaggttttctttgtttattcacctctggatttattgagcttcttggttatgtgggttatagtctttatatttattaatttttcaatcattattattttttgcttctacccctctgcccagaacttcgattacatgtattaacccagttgatcttgttcataagtcattgagtttctgttcatcattttaaaaaccaatctttaattaattttggataatgtaaatgtagccatgttcattaatcttttcttctgtagtgtctagttcaaggataagcaaatttttttctataaaagatcagatagtaaatattttatgctttgtggaccagatggtctgttacaatcacacaactctcctaatgtatcacaaacacatgcatagacaatacaccaaaaaatgagtgtgccagtaaaactttatttatgacaacaagctacggtctgggattaggtctatcggccatagtttgctgaactctggtctagtccactgttaattccatcacatgtgaatttttaattttaaacatcttcatttctagaaatttcatttgatttaaaaaaatatttgatatttcctctttcattatgcatgtttttaaaaatacttgaataaaattatgatagctgattgaaaatccttgattgctaattctattacctcctcatttctaagtctgtttctgtttagtaattttccaaaaactgcttatgggtcctattttcctttttcatgacaattctagtaatttttgattgaatgctgggtattgtaaaaattatattgtggagcatctgaattttcttcctttaaagaatgtgtaatttgttacggttgacagtcaagttacttgttgctcatagtgatcctttcaaagactgtctttaagcgttgttagggtgggtttaggatcaccttttagggtctctgcctaaaccccaagggatcaacaacatcttttgactctgatagttggaaaatcaaatgaatgctaaccctatgcgaatgctgggatctgttcagctcacagtttcagagttgctttttgcttagcctcatggagttttgtcctcacatctatgacttagtattcagcaaagactggagggtttccctcttcagatttctggattctttgccctgcagtgtctagccacctcagactccctacattccagactgtttcctcagctcagtgagacctttgtgttctgcttggcgcccccactctctgcttcacgtttcagaatgaacctccaggcagaaagctggggcagtcgtgaagctcacttggtttgagagaagggagcccatctctcaggcattacagtcttcactgtctgtcgttgaatactagaaatatttgttttatatttttccccagttttcaagttgtttaaggcaggaggataaatttggtccattttatttcatcattgccagaagtagaaggcagtcgtcacctttttaaaggtgatcatttataaacaggccgaaaaatgcagttctgtaggattaaagggaaatttcagtttgagtttttaaaagtgagacagttaataggttatgtaggtaagagggcactttgcttctgtgcaaacaccacagagtatgctgctgagttgctctgattaaccctaaatttgtgaatttaagcttataaattaaattctctataatgtatttatcaagtgccaggacagagctattatggtttttctatgctttgcattggcttctgcaaattaagtttcatttcccttttgaccacaaagaagatggccctattcaagacttcctcgttcataatgcctcagtttgttatccctccctcttccctcttcttcctgtacttcctgcttctcagtaatgatagttgttcttgtgatctagtagagtggaaagagcgtagtatctgaataagaaaccagacgttgtaattctggagccacatctgactctgtgacttgggatgagacactccagccctcagcatctgcttcatattccttatttatataattggcacggccatctgtgtgtgtgtgtgtgtgtgtatggattcaaatattttaaaaaggatgtgagaactctttggaaaccataatacatgctgtgagtgtaaggtgtttttgaggtcactgtgaatttcctcactgagactcaacctaacaatggaaatgtcttcttgtcccactaaacgctcctgcagaaatacccagcttctgcttggattgagaactgtcactttctgacacttcttccttatattgtatygatacaaggtttcgggcagtttctgctttttgtgatagctgtgctgttggatctcacacttgctctatcaatctgtatctgtaaccaggagacagaaatcacgtagtaatttgaataactaaagttcaatataagaaattaytaaccatagtggaattggagtaatgaaggattggctagtaagaagtagaactctaaagaagataggaatagataataagatacagctaggtgtgctggcgcatacctgtagtgccagctactaggaggccaaggtgggagggtcacttgagcctaggagttcaagaccagcctaggcaacatagtgaagcccccaactcaaaaaaaaaaaaaaaaagagagacaagaaagtacccttagggctgagatagagcacttgaggaagacatcgtcccggggctgagatccagatcttgttgcacagagcttgactgtggttcactgaatggcatagaaattgtttttgtgtcatgaggatggtggggaagtctctctggtcctgtgctggtagaacttgctggaaacctatcctctggaatttgccagaaatccgccctctagggtgccaagggaagatgtgggagatatctcactggaggcgctccatttagaaactccccgaggtgtaggaggtggggatgctggagaaagtgctggccagtgggtgctgttgtccacaggcactgtaggagctggccctggagaaggcaggtacactgcaggagtgtgctgagtgagcacagtacaaccaggaacaaaatgctttcttcctgttaaagcgtcacactttgccagttgacaaaggaagaatatttataaggcccacattcgtttcacagaacaagcaaacagggtgtacttggaatggagaggtaatcagtgtataactggtacacctcatggctactcagcttccatacgtcccttttgtgtgaactcctgtgtgtcataacaactgtctctacctagcaagatgcagctaacttggttacaagtgaagaagttatcaccattccccaaaatgaggagacacacagtgccaagagtcaccatactccttgctggctatcttaattactcctcaaattcatcacactcctgtggaatagtctgttatctacacactaaattgtacttcagtaagttaactatgttaatttcccacaacttgtgtagaagatcaaaatgggaaggagagagaagaaaatgactaacacatttaaataagatgcaaagataacaggcaaatagaaaatatgcaaagttgctgcagccttcattttttaaattggtcaccagaccatcattgacatccgtggcttcattttttccactatctattttatgtgtcccctgctctcagccccatcacctgctgttcaggcttcttcacctggtagagggacccaaaccttccttcctcaggggttcaaatcttcagttctcctgcctggttttggttgctgtaattctctattaacctttactagaagccatggaaataataagagatgcaccagaggatcacccgggttccagacctggcctctttgcctagattgggtagaagcaacccggttgccctgtgctaatcataagcaatcacaacagacagtagattaacccaccctttcctgcctgttggtttggtgrcataatgggaccaaagtgtccaggtgctcatcccgtgtttaaattcggtggaaccactgctttatagcctggtggaagaatccccatttcctcccttggggaccaagatctccaaaccagtrggcttaaagttgctgagacaggaatgaaatattctgtgcattgtttattagcgagaggagccaccctcrctttcaccctttgaattctggacccacatattgtagctgtgagagaggctgcaccatatatgggtttctggtccaaagcatatgctgcattctatgaaacagaattctactcttcaggttattttgttccaactggcgctgtaacttgggtcttttggaagcctttctacttttcagttagggcagccacttctgggtgacaaggaaatgtcaaactcctccttggcagttcttttttgacactgtatcgatagcaggtttgctgcagtttctgtatttttgttacagctggcctgtcagttctcatacttacctgctttccagtatgacttgatgtgtgacatcaggtaaatcctttcctctctgtggacctttgagtctccacggaagagtgggaggtttagacttgatgatccttgggaaactttccccttctaaagcattcttgctccagtgaccctgcagggtgagggtgagctcagttgggatggtgcaggtgaagtgaattgtgaatgctaagggctgtgcacgtagcagggttgaggtatgatgtgttcttctcactatcagtggttgtgatcagcgttcgactttgaacctacctggagctgaagaaagggtaccggccccccggttcatatcatcatgtctctgtttcaggacccctagaggcagtgctcattctgtggaggtgggggaagggacaacattgtggagagaaggctagaaaaggaatgaggaagaggttgacattcccagtctgtgtcttcctgtcccctctttctctgctctccctcacagaggcwcacacgcacattctgtctctctgccatccaaacagatgcagctgctctggagtcaaccagacttaacgaggagacaactcttctgctttcttccgtcttcttcctacccaccccctgacctaatgctgtgcttgcctgttacagcaggcctaggaggaaatgcactatgccttccctgtttttgttttgtgtgtgttttgagatgcagacctaaaaatattctgctgtataatcggttatccaatcagccatgygaataatcactgtgccagagcctataggaaatgaggcaggagcctgaaactcagaagcatgccagctttgccttgcctttttttctttttttttttaaatgtgctcccttgggatctgggtttgagggttgagataggaggatatgctgggtgggtttccatggaggcaggtgcaggacactgatggtatgtctccctggtgggttgaggggaaagaatggttggtgtcacagtaggagttttgcacgtarttgaggcagtttgacttatgcctcttgaacctctattccctcctctgggccttgcttccagatgctgcctccctcccccagcacacctgcctggaatgttctctctcctcctctctgcttttccaagtcctgccgatcccctgagktctasccctctatgttgtcagcaggaccaaccattcatagcggctgttgtctcacgatactcactgttgatagcagaagcatccagctcccatacctctgtgtagggcttgtgtttccagagtcactgtgtgctctcctctccactgtctcccccarttctctccaaagccctccgatgtcagtgggtggggtggaggtagtgaggggaggcaggaggaggtaggtagtttagtgtttaggctaagagcacaggtcttggagtgacagatttgctacttccrtgtaacctctgttaaattctttaccttctaagcctcagtttcctcatctgtgaagcactgaaagtartattttcagtttcataaaccctagggtttaggggygttatgacaattaagtgacgcattgcctgtaaagtacttagcataatgactggctcctaggcaatgctcaacaaacatgaggtatgacattgtaattatcaccatcccactttacagctgaggaaaaggaagtgtggggagcatgggcgacttagttcacttgtacagtaattgactacccagcaaggactatgggtggtcaactaacaggattattcagggctggctctaagcccaaccaagtgctagatgctgtactggaacagtgactcaggcactcagctagggacgcagctggggaggtagatatttacatgtgagcctcaaatgtactgggggagatggaatggaggcatgtgtgcagtggaaagagccctggacttggagaccaaacagaagccctgtaaggagagtcacttgtctatcatttccacccttttgtccccagcacccaggccaagcccaggtatgttttaggtgctccatcagtctctgctgaaggaatgaagaggagccccgagccacagctctggctgggcctctgacctggggaaccttgaacagctctttgcatccaccaagtcacagggacctcctcagtacagggaggggttggacctgtagggacccgccagctcttgtggtcccacttggtagactcgacagctcctagcagctgcacagtacccagtgtgtgtctttacctcagttgtgcttttggagaagcagttggagaggtgagggcatgaagggctgggctgacgggcaccaaggtcgcccaggtgctggcagtgctgcagacagcatgtagctgtcctcagatggcccaggtctggctgggctctgcaggaacacttcagctcatgggcagcctggatttgtgctgatgcggagacttccctggcagccacagttgctgctgttgctgctgcctggtcagagttgagggctctgacaacagccaccacagctcgcggtctgtccactgctcagaaacctcacacaagaaaacttctgagactgcctctgaggccctttagatcctgagagccccacactcacactgcagcctccccaaatacagccagaacccacccgcttctggttttccatgtggaccatttattgcacctgcccctcctctaggcatagcactgcactttgggctccacccggtcctgctcagatgttgtgctccttaaggaatctctgctcgttggtcagactgactgttttcctccaagagtgcactagagtgtacttgcttctgtctggcgctttatcatctgtaaggcagggcactacagtagttgacgggctggctttgctgttgcacagactgagattgaaattctggccctgctgctccctagctgtgtgacctcgggcaagtcacttcacctctttgacctcaatatcattattggtgaaatggggttaataactcttaggtcctagggttttgtgggatgatgcacttgtacccctttgcaggcagcccttacccggcagcccccactgccaacgtctctgttgtgttcaagtctgtttcatgagccagtgtaacctccctccatgcagaaacaacgctgtaaagtattagcataacagtaggtccattgggcagaaaccayaccaataaaacgggcacaccccacagtggctctgatttccacacccttcccaaccccgcactcccaagccttgcccagggctttccatggactgagcctcagtagaaagaggttgaattagattttgaattttctcatgcctcctgtctcctggccctcagaaaattaaaatccagcattggaattagtcatggaaaaatccccattttctttcctttcattcctctgtgaagatcataggttcaggttatttctttgaattaattggctaagcctcagtgaaacatgggtaatttacctggcactgtgaggtgctggaaattataaccagtgctcctaaatggatatgcagcaaccaagcaccttcatggtgctgatgggtttgtcctcacagtgctgggagatggctaagcgggtgctgtggctattaccatccttactttagaggactgggactcaagccctcatcttgtggctctaaggtgaatgtcctttccctaacatgtctgaccttctccttcctcggcattgggaccctgggtaggagggccagtagaagatccctcagcagaacttaactggccaccagtccagagtggaaggctgctgcttgtttaaaattttaatccctttctttaagtgtgaagaatactgggcaagtgtaaaagaagggaagacatggtctcttccaaccagaaatgtataaactcgctgcagtgcctaggacacatgcgtctttattgaacaaatagttattgaatgtccgcttggtgccyggccctgtgctaagcattggtaatatggtggcaaaatagaaaagatacctcttaggcttctggccatgggcacagacagttaacaaggataatcaagttacagattgttacaagtgctatgaagaaaatttatgaaaaattaaatagcaatgtaagtaggacacactaaaataatacactaagtatcatgtatcagctctggctgcctccctctctttaaagcagagaagtccaggctctcaggggtgcgacagagccaggacaggtgtctagtgagcggcctttccatgggcagtgtgtatggaggggcctggaggtgtgggagtggccattttagaagggtgttgagattaatttctaccgttagaacccagttctcgtccatctctcttttcttcttctttgtttttgagacagggtcttactctgtccaggctggagtgcagtggtgtgatcatagcttattgcagccttgaattcctgggctcaagtaatcctcctgcctcagcctgcccagtagctaggactacaggcacaccaacacacctggctrtatattttttctgtttttgtagagatggggtctcacagtgttgcccagactggtctcaaactcttgcgctcaaaggatttcccctcttggcttcccaaagtgctgggattacaggcgtgagccatgattccccacctggtccctctgttaaagcagaactcacagaagaaagcccaaaggaacaaaatttgtactttcatgatgtgggaacatctcttccagttgagaactctctaaagcatttgcaatcatagatttgtgtaagaacttgatttgcaccctaaattttgggatgtatttattacataagcagatatacctggatttgcataacagaaaggactattttggggtgacttatgacagatctgctatgtgaaagcctccaggaacttttagcatcagttgagayctgggggaaacagagaggaaggagcgtgcaggcactgaggccagaggaagaagggatgtgcctgtcctcagtggctagccatgacactgccagaggagcactgagaagggagcaagaagagcacttcctaagtggcgagaatacccagctgcaaacaaaacctcagacacagcctgaagctctgtgtccttttgtgcagccccttccttaccccattgagtagcagcttggagaagagctttttattacagatgacacctatgaatgcaagtgagggaaaagaaccgactaagccagagctgtgaattcccagaaatcaatatggacgggactggggatgcagctccctcagcttctctctccatggcccctatttgaggctgaatctaggaggccctgtgtttttgatacagtgtctcactctttttctgaggcacttttcaaaatttctgtcccagtgctaagcctgggcgagctccacagagctaacctgtgtgtccagagccagccctggctgtttttccagcttttccttatgccaatagtaagattagggctggggacagtggtggcgagagagtcaagtgtgtgtttctcaaaagttgccttgggagaggagtgaggtgaaaggaatcaaggcaataagtgtaacataggcttaaacatacttgcatgaagaaaacaaaggacttaggtataaacaaatgtttctaagacagggcacaaaaagcaatcatcataaaagtctgatacagtaacttcatcaaaatcaaaacttgtgttcatcaaaagatgctgttaagaaaaagtaagtaagccactaattgggagaaaatatttgcaaaacatctatctgatgaaacatttgtacgcaggacaaataaagcatccatgcaacacaataataaacaagcgagcgatttttttaaatgggcagaaaatttaacagatatttttaatagaagatataatggccaagaggctcataaaaagatgttcaacattattgttttcagaaaaatgcaagttaaaaccatargacatgctactacacacctaccaaagtgactaaaatgaaaaagctaataaaactaatgttggtgaggatgtagaacaactggagactcttaacgcatcatcggaggggctgtacaatggtccagacactttgggtaaactttttttttttttctttttttgagacagagtctcactctgtcacccaggctggagtgcagtgacacgataatctcagctcacggcaacctctatctcctgggttcaggtgaatctcctgcctcagcctcagcagtagctgggatcacaggcgtaagccaccatgcctaactaatttatgtatttttaatagagacagggtttcaccatgttggccaggctgatcttgaactcctgacctcaaatgatatgcccgttaggcagtttcttataaggcctgtgacccagcaattttattcgtaggtatttgcccaagggaaataaaaacatgtccacaaaaatatttatacacaaattattatagcaactttattcataataagaaaaataatgcggccattaaaaagaacaagatcatgccctttgcagggacatggatggagctagaggccattatccttagcaaactaacccaggaacagaaaaccaaatactgcatgttctcacttataagtgggagctaaatgatgagaacacatggacacagagggcaacaacacacactgggkccttttggaggttggagggtagggggcgggagaggatcaggaaaaacaactaatgtgtactaggcttgatacctgggtgatgaaataatctgtacaagtttacctgtaacaaatctgcactcgtacccctgaacttaaaaaaaggtagaaacagcatagatgtccrtcgggagaatggataaacaaattatgatatattcatacaatggaatgctactcagcaagaaaaaggcatgaactgtgatagagggaggtaacataattatgttcaatgaaagaagcctttttttttttttgagacggagtcttgctctgtcacccaggctgcagtgcaatggctcgatctccgctcactgcaagctctctgcctcccgggttcaagccattctcctgcctcagcctcctgcatagctggsactacaggcgctcgccaacacgtttggctaattttttgtatttttactagggacggggtttcaccgtgttaaccaggatggtctggatctgacctcgtgatcagccggtcttggccttccgaagtgctgggattacaggcgtgagccaccgcgcccggccgaaagaagccttaaaagagaaagcgcggtgtatcaaaactcactaaatgccacatctaagatttatgcatttctcaatgtgtatattttactttaaaatactcataaccaaatattaaactctagatggtgatatacatgtgtcagggtttaggggttgagtgtacagaggtctgcaccttcttttgaaatgtatctaaaaataagatagattgatggatgggttgagggatgacaaggtgtgtgataaagctaggaaaatcctagttgcacaatttaggtagtggaattgtgggtattcactgtacaattcttgtagcttctctgtgtatttgaagatgtttgtaatacaggttggaataaatatgctcaagtggaggatgcaagttgcagtagcatgaagggaagataattatgatttatcaccctttgttacacagtgctattttgtttatcttctttaaaattccattaaaacccaccacaggagcctttgcaatgtagctgatttatcaaattcagaagaatacttccagcgtctctgactcatttgatcacctggatacctttgagttaatcttccagccacagctctgattctccccttttgactgtgatcatcctgaaggtgtttccctcaatgctgagtgcttggagccgctttagaattgctttcactctctgttaatttggagaacaaagaatcaataagtagaaggagattgggaaattagtgatcggggacggtgcagagttcataaataatttaaaatatacaragttctggcttttcaacagagattttaataaaagatgaacaaggtcatcttcttccttctgatgaaagttacccatctgtagtgccatggcggatgctgtgtacaagagctgaaatggtggttcctgttaactttgagagctttggacaaaaatgccagatacatccttctasatagcaatatcaggcgagcctttgagtggggaggggaagttataaaccactgtagagaatcacagagtgaaccgaggacagagattggatcaacactccattccttttctgttttcttggaatgaagtcagagcaacattgttttcatttttgtttgcagtgaacctaatttttgaactgatctatgtagtaataagcacaggaaaggaaaagtggaagaaaggagattcagcacattagctagtgaggtcttgcgtgataacgaagacaacacaagcctgagccctcctggctagtgaggttggctctgcctgcctttgcccatcccaccaccttctccygtgctgagcctttcccagccagacagtgttttgaggggcctttactacccctctccctgccagccccagcctagctgtaatcacccatctggaaggcgtgttttcctggcatttacctcccattatatggcacttcacttgggaagtgctccaacagaggcactctgctgtatcccaagaagccctcaatggcattaccgtaattctgtttatatgacgcacccccaaattcttgagctgtggctgtgacagaatcagtaattggaaatagaatttctgtgatagtcactgagttcccccaagtattaggcctgggagtggacttgtccaggtggtatccgtgggattgtgtaggggcaaacagcgatggataccctgttgatatactgagagatgctaagaaatccaaagcattccagtgacagcgaacattgcattgatagaatagggatgtaagaaggctgattaattgccacatttgataaaggsttggagaggggatgaagggggaagaacgtgtgtgtgtgcatgcacgctaaggagtaccacgatagtttgtgtgtttcttccattgttttcagccctggataaagagggcccacctgtctccaaatccctggtagcaggcagagctcagtacagtaggctatattgggtatagggcatctatgaggcaaagaccatatctcactcacatccgggtcttgaggtcctgacattgagagtgtgccctggaaagagcaccgaaggttagtrwgggcagctgcgtctgagcactggtgctgatgctggtgggatggactacagagtctgtccccactacctttggaagagctacccaattaaaactgagttggtggaggtattcccactgtgtctcccacaccttctctcgagggttcagatatgtcgcgttctgacttcccagcagcctgcatcatgcctcttgtctccagcacttccctcactgtgttcttgctctactgagtactctcagctgtgtggttgctttaggacccaagcggtgctgttccctcccctaggaagatgtgctcttctgggatttgggagcattcatgacatcgttctctgtaccaccctacaagcatccctttccctaccaggtttgtaatatagtcaacttttagggagggggacatgtgttcatttattgttttattaattattaagtgcccttgctgtgttgggaatagacaaggaatttgccgaaactataatccataaccacccagatttctattagaccttcatgttcatttacagataggacttaattttcttaatcagttaccaattgttgggtgactggttccctgttaatgtatggttgggtgagtgggccagctgggtatacagaggttcagggtattcaatgcagaaaggacctgaagatccatggaggtcatgtggtccaactttctgccttcagaggaggagtgtgtgtggggtgcacatctgagaaaatttacagactaggctggggtggggataaaggagagtctyatctgtaggtctgctgctttgggtttctttagattagcttagaagctggaaactggccaacgaaatgcacagaattgctggaattctggagaagagtttgcaccttactctgtactttctaattaaaagggggacccctcagaggtgattccgattctggactcccactggtgtagtgtggcaggttgagtttgcygccccgggcacatcccctcatggtcagagggatgaagaggagggggtgaatgtcaggttccagaaaagcctgctctaaagtcatttcctggtcatgctgatctggaaatagctgagaactgtgattgagacccaagttttgcccccaaagctagctttatatatggttgtagcagtcaggacctaccagatggaggggrcctgtgggatagggataacaggtgccgtgtgcattggcacacaggagggcaagaggggagagagggaaaggctgcgaggggaaatggagagagaaaggaggctcttaggaaaatccctggaggagggaagacttctaacctgagccgaggccctgagccagttcctctgattttttttttaaagtcaaacatggataaagtcacactcaggtgtcactgtgaggggaaaggtggagaaaagtgactgtggtttcagtttcagctttagccaccatcttggcttatgatgttagatcagttcttgcctctctctgagcctcaatttacctatctatattttattagttgaggaatcctgaattgtaacatgaaatggttgtatgtttccaatctctgcttttacctgtgccttgttggatctccctctccccttcctagatgacctcttgggcagacttcccattttcagttaacgaaacgtcagtgttttcatctgatttaagactccttcttgctcctgccttgccactgtagtaagggggcgtgggctgctctccctacctctcagctctgactcctccattagtgagaaggaggcagagggataggagcaagtacctttatgcttaactgggcacaagagatgttttcttcctggttggtttttgcagcttctctagctgaaactggccaggcagcagcacccttggtctgacaggcatctacgtgcagattcctgctgaaattctgtggagacctctccacctcacaggtcccaatagggatttgtggctctggttcagccactctgatccctgctgcacagcctctggttgctagagtaaccttgcatggtggccagttcccctgggtgagatcccagagagagctcaagcctagccaccctgtggggcccacttaacttgcaggaagctcatgggtctctgccaggtcaaarggtagcatggcgactgtcctagcacaggcgagcggagcagcggttcaggactgtagccaaagctgagagttccctggggtctgaggtgctagtttatccatcttgcaaacgtgattgtcttgatgattctcttaagtccccgtttcttagatctaggaaggggacctccctctagctgttatcctcttccacaaggctgccaacatgctgatgctgtgttccctctcaagcctcactagcctgtggctgtggatgggtggggggtgggggatggtggaaaagggatggttgattataaagggctggcttagtgagccctgggctggggagatgtctagttccatctgttggtttcttagaaaatgaggtattcaggccgggtgtggtgactcatgtctgtaatcccagcactttgggaggccgaggtgggcagatcacctgaggtcaggagttcgagaccagcctggccaacatggtgaaaccccatctctactaaaaatacaaaaattagcccagygtggtggtaggcatctgtaatcccagctactcaggaggcagaggctgaggtaggagaatcgcttgaacctgggaggcggaggttgtggtggccctgagatcacaccattgcattccagcctgggtgacagagcgagactccatctcaaaawaaataaataaataaaataaaataaaatgaggtattcagttcttgttttcagcagggagccctgtcttctctaatacctgggtaacaggaagcagtcacccaactctcctttatgtacagaatgaagaattttatcataacccrcactactataccttagatacacacataagcacaagtgtcagatgcagaccctgtgccttttatttgtgttgtctttctgtgctttygctgttctctctgtggttatttgtcaaagtatgagggtaacttcttgtggaaggacagatgttaagtattctttaaggccattgtaagctccccatcttccaaaccttagagagtcaacacacactgttctgagtctgctgtgtgcttacatcagtgctgacagaccaaattatagtactccctaacccaattctaaaggatgaatgccatggcacttaaagtattttgcagaaactattattttaacttattttcacagtggctatgggttttttatagtcttgtaggaactttggttaaatrcagagtaaaaactgaagctgctatgggaataatgagggatcaggtccttcaaggtcttaaaaaaaatctctaagtagcagtttcttttgtgcctgcaattctgaattgcagtgtgtccctccagacaaagctgagcgccatatgtgactgtgcctgtttgtgttttcraaagcctcagcggtcactgccatttcagtgcctgcaagtcttgacaggaagcagtggtaaaagactgtcagaacctgtttgtaaaaatgtttgtgtttgcaaagatttttgctagtattccatgcatatcttagctattaagcaaaaatattataccattcatcttagaagaaggaacaaggctaggtaatcactagcattctcttttctttttctggcagagaactgaaagccaagagcattctatctcatgagcactacaggtctagggcaggggtgagcaaaccttttctgtaaagaattgaatagtaaatattctaggctttgtgggccgtgtggtttctgtcacggctactcaggtctgctgccacagagcaaaagcagccttagacaagaaaacaaacgagcgtggttgtgtggcagtaragctttatttaygaaaacctggctggtggaccagaggccataatttgccaacccctggtytagtgaaaagaacaagtttcgagttgtcaccgatggttgaatttagcccaagayggtagctttgcttgtctgattaccttcatgccaacccacattttctctggctgacactaaccaggacagaagcctaggctggtcttccattttctcttaagaaagtgatcagtttatgggattgtatgcactttacctcacccacagcagatgttcaggaactgagtatccaacataggataaaatacagaatgaaagcatcctttaacattgagatgaggttgtggtgaaggggaggagttagcagtctgtcactggggtgactttctggggagctctaatcagtcwtgtgtttctgctagcagcagcatcccctcctcattcctcatgtggcatacattgcaggtcttcctggygcagatgctttctttgctcacacacattccctcccttctttcgtttttctccccccagcacacaatgctgctgctgccacacaccatttcaccccatgctggcccacaaagaagacagaggttgatgacatagcatgcaacttcagaaagttcaccactttgagccccgatgtataaatggtagcasttggtactaactctgccagtgcgttcaaaagtcatcataaggacaatgtgatatttatttaaatacatattgcattgctgactgacagtgtatttgcagtcattatccatttctagagacaagttcatggcaagcatggtaaaaagctggacctcaggagggaactgaggacaaagtaagccctgatgactctcactggcctcctgctgcacctgtccttatatttgacctgttaggttggttactttaaaaagccagttacggggaggctcatttaaaaagacataacacctgtgaaagattattttaacgtggaatatatgactggacaattatttgccaatctgatgaagtagggccacaggttttgttttcattattctgtatctactgatcagcatatccacttgcttgcacaggctacacctataatgtccacaacttccagttgcctcttatgtamcaatagaacaagaacataaagatacagaggaaagctgagagcaattctaaatgtctatggttttttctttatctcttgttgttatacatccatatctgattcaacaataaaacatgtaacattgcttatcyagtacttccaatggattcagcctggtgttttggaagaaacaactctttcttttgcactcgtatctcattatttgagacagtacttaattaatttaggtagttactaatccaactgacataaacttgggaaccaaccaccaactcctgataagcaaacagctcaactcttggggaacaaaaacgtgtaagctctttagaaattaacaagtcatgagagttcagtatggcttgggcgttagtcattaccttttagccagagggaacaaagaatgccagttcaaatgacaagttggttaaaaggaaatctgacagcttctagagtgttggaaaagaggtcaagacctgagcttctaccctcaatggctcaaacaggcataccttggagatatggttggtttggttccagactaccacaataaagcaaatatttgcagtaaagtgagtcacacaaatgtttttgtttcccggtgcatatgaaagttatgtctatactatactgtagtctgttaagtgtccaatagcattatgtctaaaaaatgcacataccttaattaaaaatactttattactaaaaatgctaatgatcatcygagccttcagcaggtcataatctttttggtggtraggggctttgccttgatgttgatggctgctgaccgatcacagtagtggttgccgaagaaggctggggtggccgtggcaatttcttaaaacaaggaagtttgccacatgatagattcttcctttcatgaaagatttctctgtagcatgggatgctgtttgaccgcattttacccacagtagaacttctctcaaaattggagtcaatcctctcaaaccctgccactgctttatcaactatgtttatgtgatattctaaaccctctgtttcatttcaacagtgttcaccaggagtagattccatatcaggaaaccactttctttgctcatccataagaagcaacccctcatttattcaagttttatcttgagattgcagcaattcagttctaccttcaatcttcacttctaatacttattctttgctatttccaccatgtctacagttgcttcctctactgaggtcttgaacccctcaaagtcatccatgagggttggaatcaacttcttccaaactcctgttaatgttgaaatgttgactttctttaatgaatcacaaatgttcttaatgacatccagaatggtgaattcctcccagaggttttcartttactttgcccagatctgtaagaggaattgctatctatgggagctggagacttatgaaatatatttattaaatcataaggcttttcagagtcaaaattactctttgattcatgggctgcagaatggatattagcaggcatgaaaaccttcatctccttgtgcatctccatcagatcaggtgcattgttagtgagcagtaatattttgaaaggagcttttttctgagcagtaggtctcaacagtgggcttgaaatattcagtcagctgtgctataaacagatgtgctgtcactcaggctttgttttccatttatagagcatagagtagattgagcatcattcttaagggccctgggattttcagaatgataaaggagcattggcttcaacttagtcaccagctgcattagcccctaacaagagagtcagcctgtcctttgaagctttgaagccaggcattcccctctctagctagaaaaatcgtcgatgggatctccttacaatagaaggctgttttgtctacatgaaaatctgtttagtgtcaccaccttcatcagtgatcttagatcgtctggagaacttgctgcagcatcctcatcagcacttactgcttcaccttgtacttttatgttatggagatggctgcttttcttaaaacttatgaactaagccctgctagcttccaactttctctgcagcttcttcagcctttatagaatttaagagagttagggccttgctctggattagactttggcacaagagaatgggctggtttgatcttctgtccagacccttaaaacattttctgtatcagcaataagggtgtttcactttcttatcatcatttgttcattggagtaacacttctaatttccttcaagaacttttgctttgcattcacaacttggctaatggtttggtacgaaaggcctggctttcagcctgtctctgctttgaacatgcctccctcactaagcttaatcatttctagcttgtgatttaaagtgagacatatgagtcttcctttcacttgaatactgagaggctgttgtagggttattaattggtctaatttcaatgttattgcgtctcagggaatatggaagcccaaggacagagagagagagatggagaacagctggttggtggagcagtcagaacacacacatttatcaattttgttcacagtcttctatgggcgcagtttgtgatgtctccaaacaattacaatagtaacatcgaggataagtgatcatagatcaccgtaccagatacgataaaaatgaaacagtttgaaatatcacaagaattaccaaaatgtgacacagagacacaaagtgagcacttaactgctggaaaaatggtaccaatagacccgcttgttgcagcattgccacggatgttcagtttacaaaaaattgcattgtctgtgaagctcaataaagtgtgaagtacaataaaatgagatattcctgtataataataactattgtgtgcatactatgtgctgaccattgcacattatctcatgtactccttttaaccgtgctttcactgattagaaaaccaaggcaagggctgggtgtggtggctcacgcctgtgatcccaacactttgggaggctaaggtgggcagattgctttgagctcaggagttcaagaccagcctaggcaatgtggcgtaaccacatttcttaaaaaaatattagcctgtgtggtggcatgtacttacggtcccggctgctcgggaggcggaggttgtaatgagctgagattgcaccattacactccaccctggggaacagagactctgtcttaaaaaacaaaaacaaaaacaaaaaggctgagttagagaagagcaaagtgcttgcccaaggttatatagcttagaccgagtggggattttgaactcagactgcttgactccatatttactgtgctctccagcttagggcaaactggtagccgggaagtcatccagctcratttcagcttgcctcctcctgatttcctggatgtctggtttttaaaaagttaatagcaaactagtatagtgttggctccacagacgtgcttttcagaacccacctatttgccctttactggtaatcaggggtaatcctgtcccatatctgtaccctgatatgtctgggttgtaaaaagtgtaagactggatggtacagttaagctatttgttctggatttgggttttttaagtttggcatttgagcagaatcacaagttgtagaaagtagtaatttccagacatttgagatctgattcaccaacattactgtaattaaagaaaaacctatatttgtttgctccrttttgtctcactaggatgttttataaataataaacctagacatttagaaaatagcatctattcagctggttaagctttcgtggcccttcatgttcagatgtctcaaggtgatatgagtgtgcctcaatttatagggagtgactatggayggtgaactatattgacatataaaggcagctttaaaatacagactacagaaatcaagtggcttgacaattcccttagaacatawgtttatgaagtatagagctcaaatgtaatgatttcagttggttacagagtattaatgaattttgaattgaggcaattgtgatcaagcttgttgccttttctaacatgaatcattattaaaatgatgattgtcctccatagttatgaaagcattaaaaaagcatctacctatgcctgaattaacgggacagatgtggttttcagctttcacctggccaacaggacttccatggttgtgatttcaaggtgcttgtttatgtatatggttttgctggtattttctgagtcttcaataccatttcttgtaatagggtgtgaatgggtgtgtgtgtgcttgctagtatgtccccttggtccttagcattgtgggaatgtaaagtgaagctgagtaggatgtctcaatgtcctagaatcctccagcctttggtttttaagaggtacccctgtgcgagagctcgtggaggcccttctgtgtaacattcacaacacaaccrccacattcagtgacagcaggtgctgagtgcaaaccgtgtgccaggcatttcccaccatcagtatcaatcctcaattccagaaagttggtactgttgtgaccatygagaggatgaggagaccgttgcttggagactttcagtgccttgcctagggccacacgatggaaaagagcagaaccaggaattggactgctcttcaccatcctcatggctgcctggagggcaggcagtcttgggcttccttaaaagatttttgttttgggagggctcttcactgtctcaagaaagctgagggaagaattcgtctcatttagtggatgaggatacaaaaacatatgttaaaaattacagcctcgggctctgtggaccctgttcaggtgccagagggcttttctcctatattgagcacctttgccacaaagaagctagaggaggaaccctcccccgatttcaccttgtgagttacaggtgtctgacagccctgttcttagctaagaagtgtgtgtgcacctgactgcaaacagccgccatgcctgctggaggacacatgtgacacacagtttctggggaccctcctgggcctacagactgcagtctcgggtgggtacccatggcccaggacttcacattcctcacactgccctgccctgcttctcttctgtctgacctgatgccccaggcttagggtggggaggggatgctggtgggtgggttgtcattttcctgtcccagtcaggtattttgtattgtttctcaatgagccatttcccatctggatttgggggggatcagggaagatgggtgggttatgagttagtttgctgggcatcttcccttttttctctgtccagctcccaggtgtttgaggctttttcctgcctccaggtgctccaaatgtgggggctgccctttctctatctgggtttcagcctctccagctcctgcaagacagtgctgttggatctctgtagtgcctcttggtttggccactctgggatttgtgagtcatagtcttcagtttggtgctttttcctactccatcctgccttctgctattcatgccccattgcaagaacaggcattcttccttcccgtataaacttgcaacctggttccacccattctcctctcttcttctccagatagtcgtagagatcgctgcctcccaaaatagccccatttgattccttaggacmggcaggaaactcgctgcccgaccctgcctgagtctccgtttccttagctggagagactgtccttgctctagaaaccaaccaccggaaattcacctccatccctatcacttcctggggtagttctttctgaccattgggtttgcttcttgggtgtctggctctgcatacagttagaagctctttaaataccttttaacttcagggtttttgtggatgtgtatatggtggagggagagagtgtataccagtgagcatgagagcaagagttactatttatcacaactggtgtccaggggtggctaaagattatcgacttctagagttgtgtttttcaactttttttttaaatcttagtgagcagtaataaatacattgtaactcycaagcacacataaatgtcatctgaaacacgtttgaaaaatatatgcgatttatttgttttttgagatggagtcttgtgctgtcacccagggtgcagtgcagtggtgcaatctcggctcactgcaaccacggcctcctgggttcaaacaattctcctgcctcagcctcctgagtagttgggactacaggtgtgcgccaccacgcccggctaatttttttgtatttttagtagagaaggggtttcaccctgttggccaagctggtctcaaactcctgacctcaagcagtccggcctgccttggcccccacgaagtgctgggattacaggcattagccactgcgcctggccgaaaactatatactcttatattctgatatttcctgtgcaatgtgatattttccatacaattttatttcatttttcaaaaattgctggatacaaagcactgaattaatttcatatgtattttatttaaacaatcctctctcctccattacagtatacatttcatggagacaggaattccatgttattctacttcctataattgatgcttaatacctattgtcaactgattcttttctctgtgcagatcctctggagaaatattttgttctgtgccaagaaacagtttcattcaacggttaaggtgacttgtgtcactgatctgatttccttcttttacattaactatcaaaaatctcagacttattaataaagacatgtcttcacaggayacatctttacaatggtcttatttttattttattttcctcgctctttttttttcattttaccttattcttctgtcctaaatatttaaagtttcagctgattttaaagtaaaagatgctcaatgggaaargctcacacaaatcagagctacctaaaagtagagttggaaagtcccaaggatctttttctctgaggcaagsctctttgcttctgggtgcttgccctgcagactggcttatgaagaggtcaccatcttttcagattccaggggcctgtaatgttcataccactgcagtattcgtattacacactgtaataatctggaataataagatcgtaggcactctttcttgccctcacatgtggatctgccttctccttttaaacagccatgtaaygttccctttctcrcctactttgaatttttatattcttgctgctctaargttttttttttggakcaaggaaagcaatttaaaacataaaatttactttcaaaagaagagtagagataattaaccagcccttgccacctaactcaatataatcccctagtaactcctcttggagccaccaggttccctgggagtggaattgcctgtggaaaggcctgtgtgggttctgagcttgggaaatggtgacggagccctctctctagcctctgggaggtgtcaaataatggatgagagtgaccttggactggcaagagcaggtcagtgcaagtgacatgggtttcttagatactcctcagctcagtgtgggtctcccgagactcagttctgcctgctgacttgctcattcatttccattgcagggctgcagttgggtcatgcctggttttttggcctcccaatgtctcttaattaacttaatattacttggtratactaaagcaatgatgaattatgtgcatggagtcattaatcttctgtgtaaatatctcaaacgctgtgtcttaattatagactccatacttaaaatattttaaagcttctattcatrtatttacttagaaaggtatgatccgtgtttctatggtgtcggcacactcagtgggaaaatggtgtccatacattggagacgttcgtatgaaagagtagtttctctgatgagatgagtgctgcctgttctccactgacccacagacattcttagccttagcaatgaakggagttggggtaagattgggcctggggatctgggccctctttcaccttctgactgttctgtctatagcaaaccatagagagtttttctggacagtccaggaaggtgtaagagcagctttagatgaggcagctgtctccctcatagcagagccagccctaagccagggcagggcctcctccgggaagaattgtgcacctccttcagggtcatcagtgagttaggtacattgtgagtatactaacttagtatttagcagttactctgcaccgggcaccatgcygttcctgggtggtggctggtggctggggcagggcagtgagtgttacatagactagacacagcagtaatagccartgttccatgagaacttgccatggggtttgccacacgaagacactggctcttgtttacataggctgcctcatttgcacttaccaacaaacctgggtagcttctggtgtctgtattctcattttacagtgaagaagctgcagtgaggaggggtaaagtcacttgcccaagtctgcatagctaataagtggcagagccagaacctgagcccactgtccaaggtgaaggtgcttcctagcatggtggccacctctaggtaggagctcagctgtgccacccactgggacagatacactcccaacagctgtgattgggtagggtggctccacctcccagatgggtcctcggtttgctgagtgttggttggataacttgactaactttctcagcagtcctttgagcagctgaggtcatacttagatgtgacttacgtgagacaacagaggagtccaggtgagagctggcaggcatgggaccagggtggagttgtagttttccccaccaggtgggtggagccaggtctcttcaaaccagagggcacaattgctgtttgtattgttcacgttgactgtagcaaaaataactcagtgcctgtgaacctcatctgtgaaatgtaaataaccccttctctgcctatttgttttttgagacggagtcttgctctgttgtgtaggccagagttcaagaccagcctgaccaacatggtgaaaccctgtctctactaaaaatacaaaaattctccacctatcttactctgtagcttgggaaatcaccgagataagaggttggaaagtgataactgtccaggcatgcaagtagtatgtttataggaacatgactgagcaacagggaaatgagatttctctctctctctctttttttttttttggagatggagtctcgctctgtcaaccaggctagagtgcagtggcacaatctcggctcactgcaacttccgcctcctgggttcaagtgattctcctgtgtcagcctcctgagtagatgggactacaggtgcatgccaccatgcccagctaattttttgtatttttagtagagatggggtttcaccatgttagctaggatggcctccatctcctgacctcatgatccacccacctcagcctcccaaagtgctgggattacaggtgtgagccaccgcrcccggctgaratttcatttttarctcagacgtcaatcaacgtagccatatacagatttgaaaagcttttctttatctctgttaatggagaaaaagaatgactgctttcttgtcaaaatgaaagtgttcagttttaaacttaaccagttcctgccrttttgaaatgttcactcatttcttactttttttttttttttttttttgacacagagtctcgctctcacccaggttggagtgcagcagtgctatctcggctcactgcaacctctgcctcccgggttcaaacaattctcatgcctcagcctcccaagtagctgggattacagactcgtgccaccatactcagctaatttttgtatttttagtagagataggtttcaccgtgtttggccaggctggtcttgaactcatgatctcaggtgatccacctgcttyggcctcccaaagtgctgggtttacagccgtgagccactgtgcccagccaccatttcttactttttggcaaaggaagtagacatattggagggttgacctgaactccatagattcccagggagacagtgtatgactttgatcagcccatgtagggcacattcccattgccatccaattttacctgagccattgggatgggatgcaaaggcctgacatggtttagaaataaagcataactctgcagtgccaactaggatggggtaaatgggattctggcctgggtgacaactaagacaagattgctggcccaggtgctgagaaatgtagcccgagataatggttctgtttctccttttgtgtagagatgggatcttggaatctagtgaggtgaagtacccagctctctgctttggtactgtgaggggattctgcagaggtagatggaatatggtttttgtcctcaaggcactgacaagctgcaaatgatacgagacagtgtatcaataggttcaccttcccaacccttctctgctcttgtacttggttggtgctcaattgtttgttgatatgatttaccttcatgatgacatgtcaaaacatgtgatataatttttagctctggatggcaaacagtttcaacttggatgccaactctacccagtgggtgctgcctgaatggcaaaacatgtgacactgcctcagggtgccaggagaaagagtgccgtctgatgaccagtgggaatgtctgttatggccgggggatgggggttagaagcagcaggcatgtggtggtcattggttcatcctaagtacattaggctttcaaaaggggaaaaatgatgctcagaggaaatgaaactccttagtcttcccttaaagggtgaagcaggatttagacaaacaggagtgctttcagtcttggaaaagagcagacgtgaagaccgtaccttccagtgagtatgcagatatgtgggaggctgtgggagctgagggactggaggcacgtggaggaggaaggggcatcaggaggggcaggggcactgtcctcgctggacccatgacagacgtcagttggttgttggtaggttgagtgtagacagattgcagaggtcctcrgggatgccagatggaggaatttagatgtgatgcagtcctgtgcttctcaagaagccttcccagatgctccggacacgattagctgctccatcctctccgccccaaaggagactcctagtactctgcttgagcttggattcttgtctgctgtcctgaaatgtttatatattatctgccatcctccttgaggatatgaacagtgttgtagccatctttgaatccccagtgctcaggatcatgcctggtatggagcagataaccagtgagtggtgttgaattgagctgaaatagggtccctgaactgccaggcgagatgggatggaagtgggcagtgccttagaggtgaagctgggtgcggaagtgggaggctgccaagcatagaatgtaccctctgccaagggagctcagagtccatgtccctgggatgcacgggatgggaaggaaggcaagtctgaagcrtcaagtttacaagagtgtgcacagcacaggaaaccagttgaaattgaagatggcaacagagaacggaaaagattgaaggagggaatttggaaagctgagcctagatgaattcccagaggcagtgacttatagggctcggaggccctgtgtatagggaaccaccgctgaacctgtgggtcagagggagtcatcaaagatgttgtctcttgagaaatgaggagctactgaagattctctctctcagatacctcaacattttagagacatggagtgatcctacagcccattgtattaatatttaggtgggactccttcatttgcaggtgacaaaaactgaacccaaactagcttaatttggtggcttttataactgaaaagcccaaatggggaggggaggggagagaagggaatttttgacttcaggctcaacttgatccagggatgcatacagtggcctcagggccaggtgcctgcttctgagtttygctggctggctggctgactggcacactttctcttcattttttggcttggcttcccttggtgggtgttagctcttcatctctatgtccccctggcaactctaggcttgtggtctctcagggctgaatccagccaacaaaagaacttcttacctagttaccccagggaaagctcccagacttgctctcttcggacccggttggtgtgggttggagcttatgcctatccccgaaccaataaccttggctgcatgccaactcttattgcccctgggatgagagcaggaatggagcagttcctgggggaaggtcagggtgctgttacccttggagttttgctgggtggcaaggccatcattactgccccatccaggctaactgttgtagtcttggcagcaaagcagaagctgcctttgctctgccggtgaggaggagagctccctgccagcctctgccgccccaggcatgctgctgccctcttcccacagacygcatgtccttgaagctgggctccgtagagtggtccaccaggtcaccctgctggccacctccatttgtcatccctgggcacattctagacagcatcttgggccrgggccttgccccacctgggtgattgtggggtcactgaactgtcgtgggatctcaggagaaacctcttcagagagtctgcatccacagggagaagtgtattcacacttmccacaggctggggagctgtctcacctatccttagtcagggcgagccttccattgtgaggtgctttatagtttgcacagctctatccaacttgttacttaatctggcttttaccataacactggtgggcaaggcaaagcaagaatgattgtccctgttttatggatgaaagaactgggaatcaggaggggtaaatgtctcaaacggggcaacacagctgtcgagactagcattagacttgggggacacaaatgtcacataaaatgtgtacttttaaaccgaaggtgragaaagatgagggcaaacagactactgtagccagtttctkcatgtaaatgtggtgttaaattacccattgttgttcctctaagtgcatacttcattaatacctgcaggggaaaaaatgacctctatttacagccaagcatctckgrgccgacgcctgcctgcccaccagcctcctgtggtttacccaccaaaattttactagaggttgaatcggcttgtagaagctgtgtgatagcgctgcggctcccctgggtcacctcctgaaacgtgtagggtcgtgagtgggagggtgtctcagcaagcccagcctgaatgtgcacgatggcctcaatcgacccagccacttgaaaaagcagccgctgctctcggttcytgctgttcttgcttggtcagctcttccctggggtctctgcgccctcacagagcctccctgtgaagcctgtccttggagactttgctcaccaggycatagacaattgttgttttccaactggaagagatcatctgatttagtctgttcatttcacacatgagaaacgaagaccaaaccccgtaccgtggcacctggggccctttgtgtctgccctccactgtgtccctgcagcctgtcccttcccttcccacctgtcctcataccttgtgcttcagccatgtggactgctcttcgccctgaacagcttgccttcgtgcrggctcctcttctggatggaacaccctgcctggagcagggagggccatgatgagggagcaggtggctgtgctgagcctttccctgacatgcactcatggatgttttcctggaacagagcaaaaccagggggcgctggtatcatagaacttcttagtgggaagggacatttaataatagttggtcaaaacctctcattttgcccatttatttattcatttataaatgcggaatatctatttttgtgacaggccttgggaatgcaatgatgcatgaaatagaaatgatctctggctttaaaggaatgataatttattaggggagacaaatattaaagaggcaatttttaaaaattgacaaatagctacataattagggtgtacaacatgatgttttgatatatgcatacactgcggaatggctaaattaaactaattaacatatctattacctcacatgcttatttttttgtggtgagaaaatttaaaatgcagtcttagcaattttcaagtatgcaatacattgttgtaactatagccactatgttgtacaatagatctcctgaacttactytttctagcttttgtatactttgaaattttttatatgttgatcaacatctccccaatcttcctgacccccacctctggtaatcatcattcttctctctgcttctgtgcgttcagtgtttttagactcctcatataagtgagatcatgcagtatttgcctttctgtgcctggcttatttagcttagcatagtgtcctctaggttcacccatgttattgcaaatgacaggatttccttctttttaaaggctaaatagtatttcattgtgtatctataccacattttctttacccattcatccattgatgaacatggaggttaattccatgtcttagctattgtgaataatgttatgaagaacatgggcgtggcagacatttctttgacatactgatttcatttcctttgtatatacattcccagaagtgggatcactgcattatatggtagttccactcttaattttttgaggaccctctgtaactgttttccatagtggcagtactaatttacactcctatcaacagtgtacaaagcttccctcttctccatatctttgccaacacttatcacttgtctttttgacaatagccattccaatgaatgtgaggtgatggctcattgtggttttaatttatatttccttgatgattagtgatgttgagcactttttcatgtatcttttggctatttgtatgtcttcttttgagaaatgtccgttcaggtcctttgcccattttaaagtcagattgttttcttgctattgagttgtttgagttccttatctatttttgatattaaccctttatcagatgaatggtttaaaaatattttctcccatttcataggttgtctctttattctggtggttttccctttgttgtgtgtaagcgttttagttagatgccatcccatatgtttattttggcttatgttgcctgtgcttacagactcatatctcaaaaatctttgccctgtctaatgtcaagaagcttttactctgtttttctgtagtactttcactgttttaggtcttaatgtttaagtctttgatccattttgagctgatttttgtatatggggtgagagaagggtctgatttcattcctctgcatgtggatgtccagttttaccrtaccccttattgaagagactgtcctttccccactctgtattcttsgcacctctgtcaaagatcagttgaccataaatgcctggatttatttcttggctttctgttaaagaggtaattttttaaaatttaaatttctattgtgaattacggctgtggaaaagtataatgggctttgacagcatgtaacagcaggctctaattttgtctgggaggtcagtaaaggttttgctgagaaagtgtcatttaagctgagccttgaagggcaagcagagtgtagtctgatgagaaagagggttggggagactgttttagaaagaagggaacaggatgtggaatggttccactgtggcccagggccacagcatgaatcagtggctgagttgggactagcagaaatcagatctatggctccaagccctgtgttccttgcattcaaccccgctgggtgcgtttttggccctgtatcacagagctctatgcttattcatctaaagagggaagttcatgtccatggggcaggcacccttggtggataaagcagggayggcaaagacatggaggtgggaaggtggctggcatgtgtgggagggagcaggttggcccatgacttggagtgaagcactctgacagaggagaggtgggaaagttggaagaggaatctaggcaaggatgaaaggatgagatccttaaccaagaagctgcaggttgggatagcaggggaggccaggtgagatattgagatcagctgttgtcctrrcagtttgactctttatttcaggcttgttctaaaaagggtttatggtaacttagatacatacatatgtatcctgttttttgtttttgttttttaaatacatatgctaggatcataaaacctcatgctgtaatagcctctacmtgtctagatctatagctttattcctttcggtttttttcttctctgctttctagtagcacctatgagtgccttacatatgtctgatgctacagttaaagacacaaagagagggcccctttcaatagagaatccaggactgcagggcacagaaggaatggaaggtgtcagtgggagagggggacttctggcagagtataagccagaaagccttcccaaagcyttgggscacatgggtggaagagcaaaacagagaagtgactcttacctggctgcatcaagcctctgttcaccttttgacagcagcttgggagctctgtgaggacagggttctggctttgctgagaaggatgcaggtgctyggggatagatggatagacagatggacaagtattcatgccacagcactaataagaggattcttaaaataggaaaggaaagtaccaagtctaatgaaggattttggcatctcccacctcctgctagttgacagtttctgtttctcaagattctgtacagcattaactggtttggagattattaactagtttagagactactgatttagagcctctcctgttggtgaaatttcactgtttaaagaagacacatcaggttttagaattagatttcagcctytgtttctctagtggcttgagttctcgtgggcggggtagggggagggagtggggggacatccgtccatatacagggtagtttctggacgttgttttctaaaggaaggtttgactggccctgcctactcaggatctcctgccagggagaagaaatccctgctggtgggtgactgagtgccacaggtgtgactctgcctggcacacagagggggatgagatgcaagaatcatttactctttccctgtacctggggaagggctgttaaggtacagctcctgctcaggccttttataccagggacgcctcatttcatgtatggttctagagggttcctgctggccccttcttctgccatcccagtctttcatccttgacagtgcttcttcctctgtgcttccatcagtcgtggccacagacctcagtgtcctctatgtgtcacctctcacctagctgttttggctgggcccacagtcccaccttgcctgttaggaacctgactttcttgttggcttccttttcaaattgttaattcaacattcttttctcaaatgaacaatccttttgtaaggcgaataattatcccacttctcctgaacgacgttttgcaagatttaaaaataatacttcatttgttgaatgtggagggatacctgtttcataggattcctttttagtggcaggattgaggaccgggatgacattggcttctagacaaactggtctgcctgctctccaggctgtgattgttcagttggcatcatggtagaatctctgtaataaagaattgcattaaaggaagtttgtatttcttatgaagaatcccatcaaataattcactaaggattttggaaagagaaaccaaattctttaaaaagcagggagagggcaaaggagaaggaaaaagaacgttaaacagttcatttatactaatggcccttgtgttattgtggcaaaatttcttctaaataaaagtcagagaggaaaaacaagctttgtttgggaggtgtactgtctgttctctgccttgtttttctgctctgaagtatagtgtgctgtcttgacstaggtatgtaactgctatgaatattgatggcagcaaaagcttttttttttctctctggcctagtaaataaagcagcaaggataaaaagggatgaattgtaaaatcagtgtgctgtttttagcttctctggttcccttagaactcttaagtctcaaacatattgacaatctgcctttggtggtcagggtctgatgtgagcactgtgggttggcattttcagggatttttgcctctggttgaagtaacagagttcctttttctttgagctttcagagttaatgttatggcttcattgaggccttcctgtatctttccctctatccagtggcaatgctggtccctgctcctcagaataccgcagtggcctgagtgtgtgatcgttcctccagcagccacgcctcgcatgcctcccgagcaagcactcctctgggggatatggcagggaatggggcaacggggaatctggacagtaagcaaggaagggcatcctcrtagctctgagcgtggcatttcatgtagctgtatgaagggcatgggggaagaaggcatgggggcatgggatgagcctggctaagaacaggactggtctgaagtctagagsgggcatgagtatagaggttggagatgagctaggctttctaaattaaattataaacacactgatgctggctaactctcaaamcacacacacacacacacacacacacacacacacaattcgttcactagactgtyataatggtgttctgaggagcaaagggagctttggagggcaagtgtttagaaatgacaggaaccacaacagccctgtccttggaaggaagccctgttatatgaccagtgaagagtggagaatgggggcaaagactgggatgcatggccatggctgcatggtggtcaagagggaggatacctgtggcacgacaaagggatgttctgcctggcacggccggtgacagaggggaagcgattctggcagcagacagccggagcccaggggcagcacaggcaaggcttccatttaaatgcacaagggtgttggggatactgcaagcaaacatttaataggtgacggttcctcaaagggtcaggcttatgggaatcatcctaaaatttgtgtttttaaaaatgtttctgartataaagtgttctcttcagaaacataaaatttattttcaaatacacatttgcctattgcataaaaatatataatagtgataatatatagcaaagtgctttttttccccctggaatccgttgtgaaaaggcaggggtggcctgatgggagggctgaagatagagaatcgctcttgtcagttactacttttgtgactcttgagaaattctctgtgtgtacattcaaaacttccccctccacacacctyccccccacaccaacagactaaatgacaggtaccatagtggggacatttttctggctcctggtacagtgcctgtcatttagaagtggtgttcaygtgtttcctgagcctattttattttgacctcttgccctaggcattttaatgagtgaatttcatgacctccatttctctaaggtattggtaacttttcgggtcccactgatattagtataggactctatagttcatattggaaagttacagttgctgatgatactttgttatttaagtagcttcatgccgaggaatgcctcttgcaaagttaattacacacatctctgttggtccatgtttctattgaaactgaagctgtataaagaaaacatttgtaaaagaggaaggagtcaaagtttttagacttgctgattggtatgttttccacagctcatggagttgcatgggttggaactggaaaggttctaygagtcatttagcccgtgagcagcacctgtgaggtctgtggcagtcagatgggcatggctgctgggatggatactagaggaaaggtcagaggctctgcctaggtttcctgggaaagtgcatgatgacctgtcacaagttcagccgggagaggcggcatgccaataagcaggcagggtgtttgccatcctgaatttacttcccttattgtgtggatgcaaaaacttatatccagaggaggagaaggacttgtccaaggttaccttgctactcagtgacaaagctgactgtgacttcgaactcagacataaacccaagaggaagagagggtcaaaacagatgcatcttcatttyttccagaggatgaatttcttctgttcaaagacaccattggaatctttgttgtacccttgtgcttttctgggcctgatttggcaacctcaggaggaaagcatgctgcrttttgcaaatgtgtgcaaataacaaacatgcctgttatgtcctaggcagactcatcacacgcattggggcagttggcaaaatgcagtcatgcagcctggaacgaaaagtgttgcacacgtagttgcttatgagaaattcagtgttagaatgtaaatgccttcctggcccaggggcagtgtaattgttccatttctcataatgaaactttgtttggagggaaatgcttatatgtctaaggtgttgattctaatctctgttcctttttctgtctcctcttcctcccctgcccctgcttttttggtatgtttctttgtttttcttcacaggaaaaagtagaatatgccttcctgattatttttacagtcgagacatttttgaagattatagcgtatggattattgctacatcctaatgcttatgttaggaatggatggaatttactggattttgttatagtaatagtagggtaagtctcttttactttggggaaatgttgatttggaaaatgggaggtggaggttggggggggtggtggtaacaaaacagtctttttagggaaygtggttgctcttttatgccagctgttgcaccagaacctctcaggagttcttttaaggctggtgatgctgctgtcagtctctgggcagatactagtttgaaattctctcgttgttactcccgtttttagtaacatgttatagaagggagtctgaactcctaatatgagaggctttacctaacacggtcttggatctccagaaatagaccaaccctgttggtgattagagtcaaatgagtagagcttttaatacttagtgccaatgttaagttaaaaaaagtaaaaagtaataaaaccttcatagcagtaaggtactytgctatttaacatcccttgagcaaagctattaattttyttttttttttttttttttttttgctgacttgcgggagaaactctggcatactactgttccattttaaataatgaaacaagtgtctggataatgtcacrtatctggcataaaatgaaataagctagaaaatgcagagaagcaggtgttccaccaaaatcctgttgcaggaagaagacatcagtagttttagtgaaaggagaatgttaaaataaaaaatagtggcctgtgttattttagtccttccacacctggaaatgttgccaggaagagaaaaatgaatccatgttacaggaatgctgggtctttggaccaaatacccatgtaggaagataagatatatcctttttcccagtcttagttatgctagctgtaaagtgagttgctcctcaaattatgtttctgtaaatagcctctctgttttcatcttcatgacttcagtgaactgccttttgcagttgagcaaggtgatttttcttgtggattatccttttatcatgaatcttttgccttttcattggagactaattctgctgggtattgggagagtggaattggttgtgggccttcctaggtcctttcaacctaggaagttaatatgagatcctaattgcccagtgggacaattagacttgtgggaaacaagttagcttttcaaaccgcccccgccgccaatacattgtcatttaaggcatcattgcaaaagaagtgtaccaaaatgaacaggtagcagatatgtgccgtactttcctgtatttggtggactctgtcgaggaatggcaagccgaagccttgcaggtatgttggttctgggataatctggctgtgcctcttctgccactggactttttgttcagctaggaatggagatgcttagccccatttcttgcgtcaccgtgctatgatcacctcatatttctgcctggagacatttttcacactacagcacagcacaaggacagggaaccaagtggagcatggtggtcttattgagttaaggagacagacaagagtttggggaggcagaataggggaggggagggagctatttagagaaagagcttcataaatatgccttagagtactcttcagttttggctgagggctaagctacgcctacacggagttgtgagtccatgaggccaggaaagaccactactagggaaaagagaaagatcagggagctgtaaaatgaataataaccagggctcacaaaggactggaaggcattcaaattctgactaattagggtggaaagacctcattgaacaccctggactgtcagtagagaccccacagggccactggtagtagtgctaaactggctctagagcaggggctggcaaactgtggccaatgggctaagtcctagcccatctagcctgccacctatttttataaataaagttttattgtaacatggccacactcatttgtttacatagttcagtttgagtagtttaggtctacaaaacctaaaatatttaaatatttactatttggccttttacagaaaaagtttgccaattgctgctctagagtacagagactacctgaaatccttgcttacaatgtttgaaaagaagtctgaaaagaagcaaactaggctgggcatggtggctcatgcctataatcccagcactttgggaggccgaggtgggtggatcacctgaggtcgggagttcaagaccagcatggccaacatggtgaaaccccctgtctactaaaaatgcaaatattatctgggtgtggtggcgcatgcctgtaatcccggctacaygggaggctgaggcaagagaatcgcttgaacctgggaggcaggggttgcagtgagccaaaaccatgccactgcactccaacctgggtgacagagtgagactccatttcaaaaaaaaaagcaaactgatatgctaactgaactgcctgccagaacataactcaacattctttaaaggaagacaacaaaatccagacactgaacatatgaagaaatgtgacccataaccaggaggaaactccgtcagtagaaacagatcctgaaatgacagagatgatggaattagagaaggacttcacaaagctttaaaaactgctgttataaatttatggacttaaagggatacctgattatagtaaggaaagatgggacaatataaaaaaaaacaaatggaactttaagagatgaaaaatatatccaaaatgaaaaattctctggtttggcttaacctcagcttaaacactatagaaggaaaaaatatcagggaatttgaacatatggcaataacatgaagaataatgattgaggagaaaatgaatactgcctctgtggcctgtgggggaataacaagtggtctaacwtatatatatatttggagcctcagaaggagaggagagaaagaggagacagaaaaaaaattttgaagaaacagctccagattttccaaatgtgatgaaaaatgaaactcacaagaagctcagcaaagcctgagcaarataaacatgaaaaaagccacatcaaggcacatcataattgtaatcaaattgttaaaaaccaaagataaggagaaaaccttaaaacagagaaaagaaaatctcagactatttgtcaacaactatgcaagccagaagacaatagagagacatctttaaagtactggggaaaaatgtcaacctaggattctcactcagtaaaatatctttcagagttaaagtcaaaatcaaaattttttcagacattctagagtttcagaattcatgactaatagacctgtacctcaatcagtgttaaagacagttcctcagggctgaaggaaaatgacacgaggtagaaaagtggatctacacagaaagaaatgaagagtaccagaaagtggctctacacaaaaaagaatgaagagtaccagaaagggtaaatacgtgggtacatatacagatatttctcccctcgtttaaaaatttctttaaaggtaattatttaaagcaaaaataataacagtgtattgtggtgtctatagcttctatagaaataaagtacatgacaatggtagcatgaagaataggaacagggaaatagccatatggtcttgtgatgtacttatacagtagttggaatgattaaatattatctgaagatagactgtgatacctttaagatgtatattgtaaaccctagagtatggattggtgagctacaacctgtagaccaaatctagtttgagcctttttttcccccaccattgacaaagtattttatttactgcctactttggcaaataaagcttcattgtaattcagccacattcagtcatgcctatggctatttggtattataatggcaaagttgggtagttgtgacaaaccctatggcctgcagattctaaaatatttactattcggcactttatagaaaatgtttactgacacttgccttagagaagccactaaaaaagaaaatcccaggtctatctaataagcctattgtagagattaaatggaatttaaaaaaaacccctaaatccaaaacaggcaaggaagaagaaaaaaggaacaaaggacaggacaaatagaaaacaaacggcaagttgctagatttaaacctaggtaaatccttattaaaatcattatcatgaagaaaggataatggcctttctttgtgtccatgtgttctcatcatttagctcctacttataagtgagaacgtgtggtatttggttttttgttcctgcgttagtttgctaaggataatggcctccagctccatccacgtgcccacaaaagaaatgatcttgtccttttttatgactgcatagtattccttggtgtatgtgtatcacattttctttatccaatctgtattgatgggcatgtaggttgattccatgtctttgctattgtgaatagtgccacagtgaacattaacatgcatgtgtctttatggtagaatggtttatttttctctgggtgtgtacccagtaatgggatttctgggtcaagtggtagttctgttgttagctctttgaggaattgatacactgctttccacaatggatgaactagttcacactcccaccaacagtgtataagcattcccttttctctgcaaccycgtcagcatctgttattttttgactttttaagagtagccattttaactggtgtgaaatggtatctcgtggttttgatttgcacttctctaacgatcagtaatatgaactttttaaaatatgcttcttgaccacatgtatgtcttttgaatagtatctcttcatgtcctttgctgactttttaatgggatttttctttttttcttgagaagttgtttgagttccttatagatgttggatattagacctttgtctctcattctgtaggttgtctttttaccctgtttcttttgttgtgcagaagctcttaagtttaattaggcccatatgtcaggttttgcttttgttgtgattgcttttggcatcttagtcatgaaatccttgctcattcctatgtccagaatggtattgcctaggttgtcttccagggttttttatagttttgggttttacatttaagtctttaatccatcttgagttgatttttgtatatagtataagaaaagggtccagtttcaatcttgtgcatatggcttgccagttatcccagcatggtttattgaatagggagtcctttccccattgcttgtttttgtcacctttgtcgaagatcagatggtcgtaggtgtgtggccttatttctgggctctctgctatgttctgttggtctgtgtgtctgtttttgtatgagcaccatgctgttttggttactgcagccctgtattataatttgaagtcaagtagtgtgacacttccagctttgttgttttgcttaggattgccttggccatccaggctccttttttgttccatatgaattaaaaaaattttttttctagttatgtgaagaatgtcattggtggtttgataggaataacattgaatctgtaaattgctttgggcagtatggctaattaattgatattgagtcttcctatttgtgagcatggtatgtttttccatttgtttgtgtcatgtctgatttctttgagcagtgtaaaaccatgaaatttatagtagaaaatattggataaaatctttatgacctcagtgtagccagagatgtctcgggacacaaaaagctccagccatgaaacagtaattgaaaatgttgactttatcaaaatttaaaacttttcttcaaaagacagtgtgaagacaatgaaaaagcaaggcacagattgtgaaaaatattcacaatacatacacttgtattcagaatatataaagaactcttacaacccaatagtaagaagacaacccaataaacaaataggtaaaagatttgaacagatcttcacaaaagaagatatgtgaatcatcaacaaacatctgaaaagatgctcaacattgttagtaattagagaaatgcaaattaaaactacagtgacagtactgcatacccactagtattactaaatgtaaaaagactgaacataccaagtcttaaccaaaatatggaacaactggaactctcatacaccacttgtagaaatggaaaatggtataatcactttggaaaaaatgcgcccatttcttacagtgttaaacatagacttaccatatgaccatattaccagttctactcttaggtgtttatccaagaaaaatgaaaacacatgtccccaaaaaaactttattcataatagagaaaaactggaagcaacccatatatccctcaacgggcgaatggataaactcattgtgatgtatttgtgtaatgggatattacagaacaacaaaaagaaatgaactgctgataaaacaacgtggatgagtgtcagaaacattatggtgagcaaaagaagatgagccaggagaacatactatgtgattccatttatatgagttctagaaaaagaaaaaaaaaaactctaccgataaacagccaatcactggatactcaaggctgagcttcaagggaagctctgtacaaggctgtgcaaaaggggcacaagagaatcatttaaaatgttgaaaccttccctatcttgatcatggtgtttgttgcttaggcttatgcatttttcaaaacccattgtacactttaaatgagtgtgttttattatagataaattaaactgcaatataaagtgatttaaaatgcaaaaaaaaggaaactgaagtagaactggactctaagaaaaacttcagaacatcagattattttttatctaaaatatgtatgaaattggagtcaaagaacagaagaaaggttttaaaaaagaaaaggaagaattatratgtcttcatttgaatcaaattcctactcactacagtttccaactacagtctgtatctcaatccactggatttttccattccaacagtgacctattgcttttgtcaagattcccaatagtcaagacattaagaaagtaattgatatttctaaaatgttaactgttaatgtgaccacaagaggactcagtgtgtctgccagagctgaagttattcctttagagaaaagtttgatctaagccaactcttatcccatgcctccaaatttcaataaagatatatttcaagcattcaggctctattacttaagctttttttgaagaacgtgaaggcttgtatgtgactcctcattctggtgcttctgactttagtcagtttagacagctccttgtcttttttctcccaccttggggtaaacttttaataacaatctagagtcagttactcctttctcatcctgtccttatctcttcaggcccgtggcactttttttttttttgagaggcgtggtggtgaggaacagaatcacggaatattagagtggaaaggtcattctctgagtcgttaaatccagttttgtcattttatagagaggagaactgaggcccagagaaggagagggactttcctaatatctcataactcttaggagtggaaaccagccccggccccttgcagccctgcactgtgtgggaacacagcctgcttctctctctgacttggcctctttggtggcaagagagagacatttttcatgtgttttcaaggacattgctgaagaacaaggaataaagggaccatgatgtatatgttgcaaaacatggatacttgaaagcagtcttcagtcactacctgcataaattactttgctaaccctttggggtgaaaattcctgtggcttgcacatttcagaagagtttgaggttttctttctttctttttctttgtttttctgaagctatgaatttgttttggaggagagacttttcactttagccttgctgcagggatttacagtaatcttttaaaaactatgctgaagagagagaagcctgtcataaatttgatctatttcctcagtcataactagggagagctcaccatctgaagctttgtaaaggtagagaccgggcttgttttccctcctggctgggttcgttgctaattgctgtactgttattaaaacaaagggctgatctataaatgccccagaactacacaactatacccaatcagggctgtaatcagaccacccgatgttttatggactcggtgtcttggcaatccagaggcacgccagtgggggcagtttctgctttgtctgctcattaaacttyggacaccttttctttgttgctgggccagtcattcccacaatctgattggccagagttgatgctgtttgaaatgggcaaattttatacttactctgaaaaacgagcaataattccaaagagtatttgtttaaaagagcaaaagtcactgttaaatgagcagattgcctgaaaatagatttatctgaacgttctgagactaggaaaaaatttattgtggctgccaggtacaatattattcacatttcaagagagagaatgatgatattaataccttaccttaggtaactgcctttagcctttgcacagctccttagtatctgtgatttacatcctccaaatatccctatgaaggtgaaggttggggtgtgtgtgttagtgactacattgactacatataacatattaagatgtgagactttgaagtcattcattgattgattcatcagatatttttggagtacttcctatgtgtcagatactgtaataggcactagactagaacagaccacatgcacaaatgagcagaacagactaaaactccttgctgttacagaacctgtgttctagtggggtccacatgcctgtgtttacatgtgttgctgctagttgtgtgaccttgggcaagctacttattcctatcgagtttgttttctcgtgtgtaacatggtgttcataattgctgctgcataacattttgtgagaattaatgtgacaatgtatgtgcagtgcttagcacatagcaagtgctcatgaatggtagccaccaagatggctgttgtcattttagtttgcagcagttccacttgtcatcattgagttcccagggagtcccctcttctttgggaacagacttgctctctgttgctccattgcggtaaaaacagatgaggttaatccctgtcccaatcattttggagatggcgtcgtttgtattccaattccacagcccagttcttgtctttgtcttccttttatttaagcagcagccacacagaattagcccttttcaaaaataaataagattatcatcctgttttgcgtccctggggtaacagactctaacatttctttctctttctcttctttcagattgtttagtgtaattttggaacaattaaccaaagaaacagaaggcgggaaccactcaagcggcaaatctggaggctttgatgtcaaagccctccgtgcctttcgagtgttgcgaccacttcgactagtgtcaggagtgcccagtaagcacttattgtttcctagagtcaggagtgtgctggttttttcttccaggtgggtttcagaatcactggtgctttgaggtgagttgctctgtgccagccaggggtcagcagatgaccatggcctccttcacagttgacaggacactttggcttgcactgtcacgttggatccccatgacagaatgacaggcagttattgtcattctgattttgtggacgaaagaatcttctcttgcagaaagacaaggtgaggtgttggggtgagaccttggsttcaggcctttaattccagtctatttttcctctctggcaacatgctgccatccacgcctccactcccaggcctgcccctctgaaagtggtgggtttgtggatgagggtgttggagtacttagctgcgtgcctttttttttttccccaaatggggagcatcagagggatggactcctggaaactctgattagatcctctactatcaggaactgtgctacccagctctgggggaagggatgaatgcttcttacctggtgacagggcacaggagtacctgccttgaaggctgttgtgagaactgagtgagataatggagggagagcccctaacaggatgtctggagcacagaggctctcagtgggtgagagagagagttttagccgttaggccctaccataccactcagtgccaggccccagtgtgcttctggctccaggcccccaggccaggttaaatcatacctgagttggaatagatgccctgtctgtgccctggccaacagctgcagcctcttatccttccataaggtgtttggggttgcctcactgggctctgcccctgataggactcctgtgttggggacttccatgggtagaagtcctaacacctttctgagggctggtgcgtctgagcaagaatatgggattgcagggtgtgcctgttkttcacaactcataaagccatcagaagaacacagatcacattttttgcctctccaraagttcttcatgaaatttttattaaatttgttggcacttagaatgcaccaaaaatcctctggaaaaaaaaatttccaaatttaacattttaaaatgtaggaagtggtgttttatgtgtacttgtttttccagatggttcatttattttcattgaaaaagatcagcacaagtcaaaaccacagaactgtgtggaatcaattgagaaaaacagaaataccttggaaatgactggctctgttaagtgtaacacgattaaatgagaagttcagtgagcaaacatgttcttccagatttagttgttatagcttaatctaatttcaaagtaaccacgacagctttttcccccaaagagcaaataacaggacagcctgtctatggtatgtgttgtgtgcagactttgggggctgtggctgtgtgcktgtgtgcgtgcgagcttctggccagtgaaaaatccaagaactcacatagcattgtgtctgcttccttggctaatgaggtttttactaaactagtgcagtgctcctagatattgagaattagttttaaactgtatttcttcctttccccaacagacatcactgtttgaaatttgatagggagatttgtatgtaactctcccccaggtcagcagggaaaaatgtgagtctgagtcttgtatgaggacttttgagcttatatttttaaccacctaggtagggaacatcccagtctctcatcaaactcaaataggcttttgaagaaaaggatcagaggttgtcggatgtgctgtttctagtgctggttggcagccgtggcctgctgatttcttctctagtacttgaagttgttaaaaatgtccagsaatgtttgactgtttacacttatcttggaattgtttagtccctgctaaagagaatccagactgttctgtaagacataattttgtgtgcatgtgtgtatggaaatatatattcattcagtgaaaggtaaatttatttcacaaggtggtgaatcaggcatttgtggagttcttaagcacccacattaagagactgagggagaatgggcaggaaccgagaacccaccctggagaccaggccttctgacccctgtgttgacgtcccccattctctccacagccccgcgacctcagcactactgtgctgctcactgtttaacttcttaccttctctttccctgtccttccgtgttggacagggaaacatttatcaaagttcaagaccatcaaagtggaaaagaatcctaaagatcatctggtctacctgcatcttttagacaaggaaactgaggcctgttggaggtagtgactagtgtaagttctcacagctagtgagtagccagacagaaccagacccacgatctccacatttctgacccggtgttcttcccacttctgcctccttgactagagtcccatgagatccactgagatctaccgtacatgttgattatgtacaaaggagcggaatgcaataaagtatacatgttcacagtcggatacaactttatcatctcataaatgtgacaaatctgaaatacagtagttactctaaatgtaaaaaatattcacaaagcttactgccatggaatttagaagagctaactgctgggggttagttttgcatggcccattggtgtctcaagaaaaccaaaacaaygatagaaacctggccatggggattggaacgggtgtcgtcttttcctttccatgtgttccttgtaggaggtaaaaatattgaaaatcatcctaattgatcatytttgaaaaaaccatgtggacatttacatatccaaagatgtagcacccagagttttagttgtaatagaggttgtagcaaggcagggtcgtgctgagtctgaaatcctcttactgctcttccctcaccatcctctcccctgcctcctcctgtgctgcttatcacggtaaagatttgtcattattgctaagtcttctctttgcttgctgtattctggtttccgatgtaagcatctcagcttcttgcattctttctttcctgactatgtattgggaaagtgagatgatagcagaagatggaaagtttgaaggtggagagacaacagggaaggacagggaaggagaaggtaagaaggaaaagagtgagcagcacagtcgtgctgaggtcgtggggccatggagaggatgggggatgccaatgcaaggtcaggaggcctggtctccagggcaggttctggattcctgcccattctccctcagtctcttggttcctcacaaccaatcctaatcctgagtgctgcccccatccttcttttcatgacctctttttctgtcccttggcgggtagccttacccacactctggcactgagtatgactccatgggtagcttctattaggttggtgtgaacgtaattgcggtttttgccattgaaagtaatgggtctgagtctgaggatttcagactcagcaagaccctgtcttcctaagacctccatggcagcaaaagttttaaatgtaggaaataatcgtctctctctctctctctctcttttttttggagacgaagtcttgctctgtcacccagactggagttgcaacctccacctcccaggttcaagtgattcccccacctcagtctccygagtagctgggactacaggcgcacaccgccacacccaactaatttttgtatttttggtagagatggggtttcatcatgttggccaggctggtctcgaactcctgacctcaagtgatccatctgcctcggcctcccaaagtgctgggattacaggcgtgagctacctcacaagggcagaagtaatcatttctcatgtgcctgtctctcaagaccacatttcagcttcaggacacgtctaccttaatgttacataataccaacatcatacttaacaaggctcaagtcagtctcaacctcccccttcccctcccacctcyctcattcctggagaacctccytttggaatgcttagttttgttggggacactgggattttgcctcaagaccctggctcaaataactggtgtgctccataggtaccttcctctcattctgactcagttgctgagttctggtctcwtcctgatcttcaccctcacctaccccagcattcttgaactacctctctgtgtgtctggcctgctgctgtcctgttggtctttctaaagcagctgccttttgctagtgatctaaagtttggcttcatgacctggattcaacacccacaaccctggctgcaatctacttttctttcgtgattttcttttccactaaccaccaatcaagactcaccaccctcaagcccatactgtgctactctcctctgtgcttttggtactctgttcttcttccctgaagttgcctctctcccatgcccacctgtggaaatccaccccacctggcctttgggctgtgcccagagagaagctgcctcaggaccctttcttcaccccattcatccctacttgtcacctgcatggaccttgggggactgaacaaaggatgatgaacatgggaataaagacaaagacaaaagagtatatttggaagaaggggtcagggggctccttgcttctagtgaacaagagccctgagcttcagagcctttcacattttactgggtaaaggagatagggagagaggggagttgttgtcggtcagcagcttgatttacagcagacttgcaagactgcattcttctaacaacaggctctagatgtcccagtagataacctcaatgagcacggtgccagggagtgattgccctcagcaaacctggcggtaggcacagtcgtgagtttgcccacatcctgcattcatgataaacagtttgctgtttgatcatatagcctccagtggaatgctgagttggtcacaatccctttggccttttcaactcccaacacctattaattttaactattgggatatttatatagcatctatgtgctaccccagggtagagttatttgtgtttaattctatgtctcctagaatataattttttgagggaaaacattttacataaaccrtcttcatattgctccaaagcaccaaaccttatgatttccacatggtagatgtttaagagattttgtcagatggatgaagaaatgcataaatgaatgatgaactttgacattgggcagtcccctccctaggccttagtttttccctctgtctagtgagggagtttgactagatgatccttaaggttccttttcagtctrtctcacatccaggcttaatattaatgaaaagctttgaaatacctctttgaattttattactatgtgttctaagtaaaggaggcatggttaggaattatatatatgattcattggagtgccttcctggctcacaaacttatttttttttgtctttcctaggtttacaagttgtcctgaactccattataaaagccatggttcccctccttcacatagcccttttggtattatttgtaatcataatctatgctattataggattggaactttttattggaaaaatgcacaaaacatgtttttttgctgactcaggtgagtaatgagaattgtagctaacttaactttaaaatttttttgttttccccaaagcaactttcatggtttggggaaaatctaaaacaaaataggaaaaaaaatgcccaatataccagcacatttactgagccagttctcagtgtgagctatgttcaraatagatgagaattcagtctccctttccaccccgatttcctgtgtaatgtgtcctggcaaacaagataagagacctccaaagtaaaaacatgaggcaaaccaacagcattgtgctatctaagcctaaggaggatgctgtaagcgcaggtgcagaggaaaagaaccatggatgctgacaagaggaaatggcagattccgctaaggagggagcatttgaagggaaccttgaaggacaagcaggatcctgaggcaacgcagatggggcggtagggtgtcccgggctctggcaagsgttctcaccttccrctggcttggatttcctgatgtttctgtcctgagcggtacagcctgtttgctctgtttgcagatatcgtrgctgaagaggacccagctccatgtgcgttctcagggaatggacgccagtgtactgccaatggcacggaatgtaggagtggctgggttggcccgaacggaggcatcaccaactttgataactttgcctttgccatgcttactgtgtttcagtgcatcaccatggagggctggacagaygtgctctactgggtaagtaccctggggagagagtttatggagtgttctttgcttggataagtgggttttgtgagctagagccactggagaggtggctggaaaagaaaccctgaagtcagttatttgggaagggaagcagatgctgtctttaccrgcagtcttcatcatcctgctcctcgagggccttagtttcagttgcaggaagctgcygcgcgatgttggcttctggctttagtcctctacttcccagtgctgcctgaagacctggtgccaagggtgcccagtggtcccctttggaggaactccaggaagccagggctatcctgattcaactcttaagagagccaaagggtcactttccaggtaaggaggctcctggactgccacaggctaaggttaatcatttatacatcaaggcaggttgctctactagatcctaaagggaagaaagggaatgtaaatcggatccctttcatgcttttcataactcagtataaccttaaacccagtgtgagtttctcccatgataatatttcccattctttagtattactataaatcatcccagcacaaaaccttagctgtcwtcctttctatttgaagctacagacctctggcagaaagggtaggaatggcacgtagacttccagggctggtggacccatccagcctgccatgaaaacagttggacactctttcaaggcgagggtctgattcctcttgttcctgatagagccagaaagatttgctgtataaaaataagtgctatagcattttaacagccatttcccagggctgagtttgttagaatgcaaatgaaagctcacagaagtttagaaattgtttttcacggtataagagttgctggtaaagacagctaacrtgtagattttgagcctaaatccaagtccaaaggggagtaaccaggattccaatcatgagttgttaaaaggaaattagtaataaagtagttctgaaatcagcagcttttagacagaaggcctgtaaattgataagtagcttctggtagtttctaaattttagatacttttcaggatttcctatactccataacttcaaagaatgtaacatataatggttataaataggtttttgctgcccttcagcagctcacaggattgtagatgtccctatatatttaatatgaggcaaagaagttatatttttatctttaatccccaaagtcagtctagtttgatcaggtttaagcatcaccaacatgttatatcttgtttttcctacttccctttctttttctgattgtcataggagtgtgagtgtgtgtgtgtgtgtatgcatgtgtgtgtgtgtgtgtatgcacatctgttatttatattcataaaacgtcttttcataaagaggaaggaggaaggagatgatattggctgagccaggggcatggcttctgtatgcaggagggccctcaggttaggtgaagcattcatttttgctattatttcctaaattgcaacttctagtcagattagttgagatctcaattccagtcttcccttgaagtttttcataaatagaaaaagcatcatcaaaatagcccaaactgatacttcccctccccaaacagtacataaaacaacattttgatttttttaaaaatcaaaatctgtgactcttctcagctttgtttttctctctattgacatggtgaattgtcagctgcagagccaacatgccttgactgatgaaaaattttatactttatgttatattccttcacatcgattctcagaattttcctgttgccaagcaagtgtaaaacctgggagtagatgattaaaggagagggaacttcaggctcctagaagcraaagtttccgcttactttcctgagaaggtttaaatatcatctaggatgatataattaytatttttattattaatatgacaatcacgtggttaatactttgacagtataattgcactctccataaattacacagcatctttattctggtggggatctcaagccattcataaactttatcccagtctgtatccctttatagaaggtctgggatcttgaagatggagacagtggcgtagagaccatggaacattccccgagttctacagcaaatggttgtggtccttgatctagaacagtggtctataaaccttttcataagggggcaaatagaaaatgtatttggccttgcaggctacatggtcacctcagcaactgttcagcccttccactatagctaggaagcagccatgggcaatacataagcaaatggatgtggctttattctaatcagacttcatttatggaccctggaatttgaattttgtatgatttttctgtgtcatgaaatattttgcttttgattttttcccccaccaactatttcaaattgtaaaaatcatttttagcttgaggccatataaaagcatacagcaagctagatttggtctgcaggtcatgctgtgggaccccctggcctagactagaacccagcactctttccttggcattcttccacctgtcagcagttgatgaatccttccagaacactagggggcagctaagtaatgtcttcccgactgttctctaagattttactctctgaaacacatcaggattgtttttaattacctgttgattgcatttattagctcatcatagagataggcaggggccaaggaaccaagccttcctaatatttcatgggccacagtcagctggaagccacaccgctgtgatacacagcagaacatccctgcccagcatggtgcctggcaccgagcaggcactcaataaacacaagggatggtcatcatccttcaagtgtaccaggcatattgcctcattagtgtagatgtgccatgtttgaatatctatttttatccacaactagggcataaaggggacatcttgggagataaaaagagattagattttaaatattgactacaagcacatttctgaatcctttaggcacttacatatggtggacaaagtctttgcgggtcattgttttgcatctagtcaagtttatattcagtcagcgttctcaagctcatttatgccttgcttctcactagtgtctggaaaatgtctggcagggtcttgagaagggaagtaaaggtgggtccaatatgtagaaaggcacacttagaacaggactatttggatgtgtgggaagtgggatcattaagttctggtggaaagaaacctatggtagagttctttgataaagtgagttccataaatataattgagctgttgtttgactcacatgtgagtgtttgttgctcacagaggcagtagggtgtagggcagggaaagagtgtttatttagcctggttgtgtgaccttgagtagttcatggaacctctctgggcttctcaagatgcagaaataaacttacatgatttaatttttcccttcaacttagaggaaattttttttccttcaattcaaagaaattgtttttaaatgcaggaaataaaaagtattggtttcaggagacagctatccagataaataatttcggtgtcttgtcttagcaccaagctcttttctcagtgcacactcctacggaggtgctggctgtcagaccttcacgggaagtactcatggtcaagctgacagtctccttcattcagggcacctaggaaatctctctgtaaccagccgagggcttgcctttttcttattgcatgctctggggtgttaaaaccagtataccaagtttccagaagtgttttcagcagctagaaaaacagccttgcattggtctataacttgagacatgaatatgcatttcaaccttttatttttattttttacatttttttgagacggagttttgctctgttgcccaggctggagtgcaatggcgtgatcttggctcactgcaacctctgcctccggggttcaagcgattctcgtgcctcagcctcccaagtagctgggattacaggtccttgctaccacgcccagctaatttttgtatttttagtagagacgggtttcaccatgttggccaggctggtctcgaactcccaaactcagggtgatccacctgccttggcctcccaaagtgttgggattgcaggcgtgagctgctgcacccggcccatttcagccttctaaaagaaggaaaactgaagctaaaaagaaaattatttcctgggcaccagatgacaccccttgatgactttgatataagttttttaaaaattagtctaaattgaagtccttcagtggaagccagtttcttcattgttgataaagaccatacaggcaaaatcccaagcagtckctattttcacgtgggtatttttgggaacagcttgcatgttctgatttttcttttgtatatggtaagatccaagaaatgcttggctctgaaaagggacttggattgagaagggttcaatgggagcaagaccgttctcagagccgaagyttgtctctcttgccccaccttctgacttagagatttggaatctccagtggactgtattcatctccagccttcccctccaggcctcaactgtcattccaagtgatacttctgatttgagcaaatgtgaatctgatgaacacctactcccaagaaattaaaagggttttaaattttttaaaggaaaattttccctcccaagtagagaagacagctgttactagagccattctctggaacaccagactgaggcctgaaggagggttggtgaagcagatggctcagcagatgacggttgctagggtcatggaagagtgaggtttcctgatgggagccctggacctgtctgycctcccgtcaccttgttgggcaccttctcccctgctgcatgcacctctgttccaacacagagggaaacaagcccaggtggggctctgtctcaggtgctgacccaggccaggcacaggccaccacaccaggcagccagttccttcttcatatatgggtttttcagtaagtttagtggtatagttgctctggatgaattaccctctgccttcctgctgaaattagtttatccaacttaattagatcaacaattgcagccacagcccaggctcattcattactctaattgccaatgtaagatgtgcagactgatatgagttctattaagcacatcaattttcatgtggccaaacaggtgtttcayaagggatttaatgccctctccctagacttcagcaacagatgttaggtaattttttttaatgttcactttccctatttggcttctcgaggcaaacattgtgaaatgcacgagcctcattctgtaaagttaaaacctggagccagatcatatgcaggaaagcacatgcttaacaccctaagggcttgcacctgcaaggcaagagcgatggctctatccagactgtttgcagttctcattggctgaaaattctgggtgttgtggcagggtcataccttgggccatccattctgtcccctgactggttcttaacacctccttcctgggaaaggtgttttgctgaatttaacattgacctgtgctgctggaaagttccatccagctgtgatccttaaagccctgtttgctctagcttcctttggccaggtctgccagggagactgtgtctgaatgtgcagcatgagcttgtccgggaataggggaatggggttcctcargccacaccctttcacctctaaacccagtcagctcacagctggagccagtctcccaggggggtcatctagatcaaagctaagtgtggagaataagggctgcttctcctttctgtgggtgcagctaagaaaaagcccattccccaaagagcccgtggcttgtgtcagctagttgaccttgaaaaaatktctttttcacattcattttgctgcattcattttgtttgcactcacaggttgcagataatccagatctaaggtgggtttggtttccttgggtaggttggtttccagtagaagattattttaggagtttttaaaaagagtttatagagtcagatggtacaagtttgtctctataattaagacttttccaccatcacaaactttaaacacaaagtctaaaatcttgggcagcatagaaaataggttctagctaagcaggagttttgtcctctaccaagacctttcctgaaaatcacttatcaagacagtttcctgtaagaaaaagccatatcccagctgattttccttcctggggccaaaatctgctattattyggcctgaaagccttgatgactctgtgtgtgtgtgtgtgtgtgtgtgtgtgtgtgtgtgtgtgtgtgtgkatggatgcttgtgtgtgtgtatggggaatatgtgattaatgtgtgttggctgctgttgtctctgatttggctactgttgtttctgatttaaatctaagtaaatgtttaattaaatgtatagaatgctgtctctaatgtgaccctctctccttattaaatcctcttattaacccactcctatgagaccatcttatttcttgcagatgaatgatgctatgggatttgaattgccctgggtgtattttgtcagtctcgtcatctttgggtcatttttcgtactaaatcttgtacttggtgtattgagcgggtaagctacacctctttcatcttgaaagcagagtcctgaggacagttgccaagaccacacaagctttgctggatgagggccgccaagaggggttgccagacattttatgtgtcctctgagatgctttcttttctgctgaggcttcccaaatcaagctgtttcctggaacctcaccaggcttcatgaaggagaactatagaacgattattgaccagaaattaatcagcattgttgcttgagatttaaacaatttccatagcatgccctttttttgtctgttctaaagtgagatacatttataattgctttatttgtctggatccaaatataatgcagattaattgttataaaacgatagcaaaatgagctggattgggtgggcttttggtagtccccatttgtagatttcagccgctgagcttgtccttatttgcagaaaaaaaaaaaaaagggaaggacctaggcccagtccctgtcctaggagcactaaccttcagcaaagcactgagaggtttggcagctgcaactggggctctgctctttagtaaatggataactgataactgatctccttacattttacaggtaaatgatgcgataggatgggaatggccatgggtgtattttgttagtctgatcatccttggctcatttttcgtccttaacctggttcttggtgtccttagtgggtaagcagtcggatccgtgttgcaccttctcctgctgccacgtgtgaggcaactctgcgtgtctcctagctgctccctgacagcttctctgcatgtgtttggactctgatgtcctctcagtgtgttgcttttggattgaactgtgattctttctgcctgtatctgtctgtgagattccgtgtttccaatgcttgccaaacactgttaatttaatgaaaacgttcccccaaagccagttgtgttagtatgtgaacgtgtagaggtggattacaagtgagttaaaggaattccagccttggtctcccccaggaaagaggcttttgtcccttgtcattttgtgtctattagtacataactccttgtcgttttgtgtctattagtacataacctggcccctttaggtcaccacagtgcattataaatacttccaggggagttttagattttactgtgaaggagaaataagcctcaagcacataaatactggacagtttcaaaatcttccttagattgggattctttattagcttggtgttctagtgctgtcattgtgagaactgtccctgtgattcagttttaaccgaaacttacagaatccttctcttaatgcagagtgatgatcgacttttgtgcacacatttcccatggccttacagagaccccgtcattcagtcacgatttttgaagtttgcttgtttatcacttcctctctatggattgactctccataaagagggtgcaacagattctggcctggaaagggaactccttatgttgcaggctctgccttgcccgtagctggagatgccatcccagaacccttgtgggcagccctgcatccacaccgcctctcagacacccccagaaggtggggtgctacagagaagggagctgggggctgtatggctctctcacaatcagctccttcatacagccattgccgggttgtggggggcaggcaggataccaggaggccaagaggggcccacgtctcccagaggagcctctgtcactgcgctgcgcccaggcaccctcaggaagtagtgttgatggatttgattccaggcaagtttatctcctcctcactcactttatcttgctctttccgaggctgtatctcggggaagtgatgtcttcatgtatgctgagttagtgaaaggctttaatcgcatttttggaaacactgccttttccagagcagaaagcagagtgcgtttatccatctcggcttcctttctscatcttcccctaaacctgccctggattgaatgtagtcagttccacaccagggacgcatactgtcacaggaagtccctatgtagagttggcccaggggccagtgcccsccagagagaggagtgggggctgagcctgggatggggccacataaccctcccctgcctgagccgcctcctgtagatgagtggctcctcaagcctccggcccttccacctcaacgtgagaagtgtctctctcctagtaaacctcagtggccttaggctagggttggacatgtgagggtggtgtctattcctggagaaataacatcgcatttgattttgccacaggagctttctatacaaggttaacagcaatcctgttgtgaattccttggcgcctcatgtctcctaaacccagctaaactgacggaggccatggaaaccactaattttaacagtgccggtgacatcccttatcttttagctttcccaggcaggaaccgttgccccagcagacatgatgaagtagaggcaggagccagatcrtgaggtgcttaaaaaaagaaaagagaaaaagaygggcgggggggcttcccactatcacaaatggggattaaacctgcaactccgtgggaggtacccaaagctggaggataaaaaaggtacactccttcatggaacaaccagtttactgaaatatattttggggggaaataatttttttaaaaaatattttttcatcaaaacaaaacttagatccctgatggaggagactggaaatgacacaygaaattataaaagaaaacccgagacttctctgcgatttttaactgtcagtgcgggctgtgctcaaacccctagaggctgcacatgacctcctctctactcccccagaaggcctccggtagggctggtttgggtaaaggcagaaccatgtctgcaaagcacagcctcgcagctttgttcctgatttggccagtatttcctgagatcctgtagagtgcccggctctggtccagaggcgaggggtgccaggatgtctcagacacagacagcggccttgtgcttaggcgttcattatctcatggggtagcccattttgaagcagtgcagaagggcacatattcagtagaggtgcagacccagaggctctgtgagctgcactagagagatgaggaggcatctcccccggcgactgacgatgggctggcatgcctccacctccgcccctccgccccctcgccctcccaaccaccaccttccctctctgcctgctactcccctcttactttcccattgatatttttgttgttgtttaascaaattattattatttttttaaattttagcctcaagagtcttcataattttttaagggaacactagaggtactgcaaaaccagaaggatataaatgttgagaggaagacaatttgtgttgcatagaccctgagggactgtcagaccaacacaaatgtaatccgctaagcactgaattaaaacgccctcattttagaaaggctggtcgagaccatgtgattgccttctcacgaggaaatgttagatggtgctgtatgtcttcaagtctgtcagccatttggaaatacctgtatctgtttttgctccttggctccgtcatgtgtgtggccatgccatcctattgtattcttgaacagactttaatctgcacattggatttggtgtttatttgtaaagtgttgtaacactgatgctttgggaaaatctttggttttataacagtcttttttccctcaaggtaagtatgaagtttatgaactgtaaaccctatgcagccatgcatgaatatagatgaatacttccatctctgatcacagtgctctgtgggaggggctgagaatgtctatgtctaatgttgcaatttaaccttaagttgtcattgaggatatgctcccattatgaccaggaattggaaagaatgtcttctttaagtctgcaattcagacatattacacgtggtcttctagaagtttggcaatttttcacttttcaaattgttaattgaactcccttttgaggttttcatctttagaatcatgctagattcccagggggaccatgggggtcatgggtggtaggctggttggctctgcctccttctccatttcagggcccacctgccaccagccatccctatggtggcagtgtctgagcttgcaagatgggggacgccctaggctcccaggatgtggctccaacccccaggaagggggctggaagacttgggttccgtcctgctggagtcccgcgttcactctgggacttcactgagttaccctgagcctcggtctctttgtccttcaggatatcagcgacatcctgtcttgccgtctcccacacagggtggttttcaatcagctaatgactgtagaagtgcttctaaaaatacataaagggtttttctaatttaacatatccttatcttaaatccgtggatatcccccactcccctcactgggttaggtgggaagggtgcagggtactctttggaaattctggagtgtagcattttctggatttcccagcaggtggccacactttacacacacatcaacgttgtactcaatgtcacccaagaggtggctctggagaatgtggaagcactgtgtcagctgcaaagtattacgcaggtctaagtcattgttattatatatttgacaatgtttttttgcacaaattgaggggaacggcatttctattacatagtggttaagcacaccagctttagaatcagrcaaccaagtcttgaatgtttgttctaccttttccagttgtgagatttggggcaagttacttacctctttgagccttactttcctcatctgtgaaatggagctcatcacagtagcagcttcgtgaagttcagtgaggactcagtgagctgaagaatgtagagggcttggcctattgaaattatgacagttcaggaagggtgcatctcttcctggatttgatgcaagaaaagaatcgaatcaattcagtcctttcaractaattaataatagctggccaagataggtctgtgttagtgaaaagcccaagttatatttttaaaatgttttattatatatataatgacataagctactgctgactaaaggatattactacataaaccccctcctgggcttgctttaaagaatagatcaaaatcatttataattcgcttatgaattcaaacctttggttttggcaacaacttatgaaaaatatttgaaatactttgttaagtagatcttgtatgttgttagacaataaatattgttattaaacccactcttatgacataaaattgaatgtaaacccagcccaggtctataaattcaaaatcataccaattaatttgtattcttggtgttctagtaagttccagatcctaccagatcacaggtatcattttaaatcaatccaattttgtattactataggcctatttatctttagaagtttaagggaacatggatgaagcgaagcattatagaaaactgaaggcaattttcaaactagtttatgtttttgaatctcgcctcctacatcccattctggctaattggataccaggggcctagacaaagactcaggcatggctacttttaggaagctttggtttcctaaggcaaagattcatgggatggagaatgtgaagagggaaggtggtgctggtgccggtgtactgtggactgactataccagaattttacatagtggaatcaggtttggtccatttaaattcatactagtaatagccagacaatctctgatttcttctacttgaatggtggctcaagaggcaaaacacaccaatagakagtagttgtattacttgtgaatattttctaagtggagacatatcctctgggaataggcattcttatacatttttcatgactgagattagatttttctctcatttggccaggcacagtggctcacgcctataatcccagcactttcggaggccgaggcagctggaccacccgagatcaggagtttgagaccagcctgactaaggcagtgaaaccctgtctctactaaaaatacaaaaattagccaggcatggtggcgcatgcctgtaatcccagctacttgggaggctgaggcaggagaatcacttgaaccagggaggtggagattgcagtgagccaagactgcaccattgcattccagcctgggtgacaagagcaaaactccatctcaaaaaaaaaaaaaaaaaaaaaaaaaaaaaaaaaaaaagacttttctctcattcaacactttaccagcatctactgacagaaaatggacaattgaatttcctccaatatatatacctctgatatgtctgctttgtaaaagagtagtgtaattgcttacaacattgaaaaggttgttattggggtcctggggtagccaggatatcggcatgatttgtcaccatattcagaataaaactgtactgcaatagtgagttaattccatatcttggccaacagagaatttttggccagtggctactaaggcacacggaagtccagtctaaaagggacaggggaggactctttgtagatagttcttatgattaaaaaataacttcctatgtgttgtagtgatgattaagctgacagaatgctaaagacaccmttaatgattacttgtagcaaagtacttccccacatttagctggatttgtctttggtttgaagaggctaatacgtgaaagatttgttcacagttggatgtccccttttctgaaccatgaagtaatattgtgaawggagttgaatgctgaggttagggtgccggaaagattcagggtccttcggtaccctcacatggcttggctttggtagaacaagaaactaagctctgatttggctttaaatgagagtgctaaatttcctttttctaataaagaacctagctaaacatttatatatacttttgaacactgaactttyttgttgcagagttaacagctgttgggggtagctgacagctggatcctggtgctgttggtaccatggtacctgaagtgcacaggctggtagccacacctgacattaacaagtgagtggtaacctctctgccgctggctyacagctactgtttccatagaaatggctgtcgggatcagtggaaacgaggtaagtgaaagttttcgctgatccttgtttccatcaagctgacgtctgtttccctggcaacagcagtggacagcagccaggcgctagcaacagattcagtagagctctcacttgtcagctgtggctatcatctgttcctgaccaagttctttttttttttttaataatgtacagaaagacctctgaggacccaggaggcacctctggccacatgtgccctcctggatgctcgttttgcagatggagagctgtgtgctgagttgacttctctgtccgcagttccccctccacctgtgctctgggttgttgatgtgcaggttagaagagggaggttgttgagggtattagtgttgcaggggaggctgttgaatctgttgatcccaaatcctaggggaagagaattcattacagtgctttcatgcacagacccagctctttataaagctgttgctaccttaatagttgaaattaaagccataattttcctgtggtccctattcaattggaggcattaacaattgccattacttttacaatgaaaaggatatttaggagtttaataatttggcttgtgagaaacaaattgatgattgtctctaagatgctactgtcaacattatgctttttttctcttttgtgtaatattcttttacaggatggtaaaattgcttttacagagatcaaatattggtattgcagggcagcttggtatacaaagaccagtagatctatagtgtagggaactcttccttgttaaagttcaacagctccttttctggatttcattttaatgtttcaacagatggatgcacccaagccctagccctaagtattctccacccatatgagacagcattgatggtgccacagagcaaaggagagccactgttcctgccctggtgtgtgagatgagaggcatggaatgaggtgttggttttaagcccttactgataccatttattaaagagattttctctggaaaaaacaaaacagctttgatattcagagctgtatttttgagactcaaatgaacataaagatccacggtcttatgagaacttagatcggctgctagaagagcattggagaaccatggagttttgtctttggagggctttccggatgacattgttccacagctctctggaaatagggcaactgtgcttggcctgcaggcagttgaatttgatataacagacgaataagaagcagaaaatcctgctggatccttttttctccctctctcttaacttcctaagaatgacttattcatttaatgaattttttttcagttcctacacagtggtagatgtatgccaagtgccctgctaggcactggggttacagtggtggaatgtaggcactgggtaggcaccaggattacagtggtgggatgtaggcaccagggttacggtggtgggatgtaggcaccgtgtaggcactgcagtgacagtgtggaatgaaatggtttctttcttcgtgaagcttatatctaatgatggaggccaaaatgacaattacaaactcgtataaatgctttgaaagaaaggttcatgtgctgtgagagggtttaacaggcacaactgctgtcagtttattgggtaggagcatcctggaagtgaagaatgagtagtccacatatccaggcaaggtgggacaagaagctagggcaagggtattctagtcaagggaaaacccacagaaaggaggtacagtaggaaggagcagaggatgctggaggaactgaaygaagctagggtgacaggaactgggagagctggagatgaagtcagatgaaaggaaagagactggccggcagaatccaggtcacgtaggacctttagactatgtcacaggttttggtcattagctgaagggtaagagaatgcatggatgaattttaagcagggagtgatattcaaatttacattttctaaaaattatgctgtattctcatatcctcaacttaccttaaaatgcttcaaaaagataagatgattaatagatggatagggggatgcagagataggtgataaagaaaatgtagcagctgggtgctgtggcttgcacctgtaatccgagcaattcaraagggtgaggtggaagggttgcttgaggccgggagtttgaaaccagcctgggcracatagcgaggctttgtctctggtacaaaaaaaaaaaaaaaaaaaaaaaaaaaaacagaagtctttttagctgggcaatgtggtgtgtgcctatagtcccagctactcaggaggctgagacaggaggatcgcttgagcctaggagtttgaggttgcagtgagctatgatcatgcttctgcactccagcctggggagcagagtgagaccctgtcttaaaaaaaaaaaagaagaagaagaaaaggtagcaggtgttaattatggaatctaggtgaggtaggcatatgggtgttcattgtataattgtttctacttttatggatgtttgaaattcttcctaataaaatgttgggaaaatctgcatatgaaaatcactgtggctgcagtartatgaatagattggatggatacacaaatggatgtagagagaccaayttaaggctcatataatctgcttccagccacaacatactagtgctaccagactggacctttcaccataaacaactacaaaagactgggcaaaaaataggaagcaactatttycagaaaatggaaataggatatacaggattgcaatccctacgagaagggaaacacatgaggtaaactccgcarttgtcctggctttctgcctggagacagttttagaattatggcagagagggagagcccagcagagaacgatggtctatttgctgaggggtcaaagaacagtgttcagggctgctaagatagctgggattttcagggcagagtatgggtgagaagtatgcagagaaggggctccagtactcagagtggaggttctttgaaatctgaccatatactaagctgcttctgtgccaggtgatacttattgaagccaggcagagaacagctagtaraatgctgtaagtggttggaaatctctccrtgctgggaggtatatggttctgctcagctgtagtggaaggacctaattgaatacattgggtactgagacttcagaaacgccaggctttagggttggagctactttagcccttgagtaagcctactgtagacctgacttaaaaagcatagaaacaagcttcaaaaggatcagggaaatggccaataaattaaacacctgtcaaaaagacaaaaatcaacactcgttaaaggaagagaccaaaactcagatgttcccagaatgtttttcctcatgacccaaaactataagacatgaaaagaagcaggaaaatattcacgatcaaggagggaaaagtcgatagaaacaaaagatgacagatgttgcaattaataatcaaagactttgaagtcactactatgagcctgtttaaggaactgaaggaaaagatggacataataaaagaataggtaaatctcagtaggtaaatagaaacagtacaatatctgaaaaaagtagactggacattgcagaaaaagttgrtgagggcttagtgatctctaaaacaacaataagcaatctggtgtatatgaaattggagtcacaggagaataamgagattgaggaagaaaaattttaagataaataaagctgaacatgttgcaagtattgaaaactaagttaacagatccaaaaggcccaacaaacctcaagcaggggaaacacaaagggaaccactgctaagcacatcaaatttagatggctgaaagtaaaagatccagagaattttaacagaaagcaaatgggaaagggcacattacatactaggagaaaataataagaatatgcatttacttgtttgcagatatagtgcaagttgtagggcaatgggtgacatcttcaaagaggtaaaaggaaaaacgattctgtatgaagcaagaatacccttcacaaaagaaggaagtagaaaaactttcaggtaaacaaaatctaagaattggtcaccaacaaatttgcactctaagaaatgttaaaggaggttcttcaggctagaagaaaataataccagatagaaacgttaaatgtccgctttaaaaacgaggagcatggccgggcacggtggcttacacctctaatyccagcactttgggaggctgaggcaggcagatcacctgaggtggggagtttgagactagcctgaccaacatggagaaaccccgtctctactaaaaatacaaaaaattagctgagagtggtggcgcatgcctgtggtcccagctactctggaggctgaggcaggagaatcgcttgaacctgggaggtggaggtcgtggtgagctgaggtcacgccactgcactccagcctgggcaacaagagtgaaactctgtcaaaaaaaaaaaaaaaaaaaaaaagcatcaaaatggcaaacaaagataaaagattttttctcatttctaaattttctaaaagataatttaaagtaagcacaaggtattatgggaactgtaacaggtcaaagtaaattataggataaccatacacagaagatagaaggaagttaaatggagcttcactgtgataaagttactacattttgaaataatatgaattcatggtagactgagaacttaaggatgcatatgataatctccagagtaatgacttaaaaggggtactaaaaagctaaaagaagagataaaatggaatattaaatagtactaaattatccaaaataagtcagaaaaggaagaaaaaggaacaaagaacatatagtaccaacaacgagatggtagacaaacccagtaatatcaataattgcattggaygaaaatgtacacaacattttagttaaaagatagaaattgtcagactaaataaaaatttaagatgctataaagacatggattaaaaataaaaaatggatgaactgtactaatccacacaagttggactttagtataaggaacatttccagaaatagggacatttcagaaatagacattttattctcataaaaaggtcaattcactgagaagacacaatgatcctaaatgtgttggcacctaaatacagcttgagagtacatgaagcaaaagttgttaaaattaagtggagaaattgataaatctagaaacatagatgaaaatttgtatcattccttctcaataattactaggttaaaaacagcaaatatagataatatctagattatatttagattggttaataamttcagccaacttgacctaattgatatttataaaatactgtgttcaataattgcggaatacacattcttttcagagcaygtggaacattcaccgacatagaccatatcttggccatgaaagtctcattacctctcgattgaaattttacaaagtatctttgttctaatggcagtagatttaaaacagaagccaataacaggctgtttataaaccttcccaaatgtttggaaattaaataacctataactcaaaaaataataaaaattagaaaatactttgaaactgataaaatccaactgggaaattgtatgatccrttgaatgcagtgcttggagggacatttatagctatatcagtaaggaagaaaggtttaaactcagtagttctacatttccatctactaatctagaaaaagaagaccaaataagtccaaggtaagtagaaaaaagaataacagaagtaaataaaatagaaaacacaaattataaagttatttrgaaagcgtaataaaaattgataaatctctaacaaaactaatcaaaaaaggaaaaagagcaaattaccagttttataaatgaaagaggagataccacagatattacagacattaaaataataagagaataaacttggtaacttaggagaaacaggcaaattccttgaaatacacagcctaccaagaaataaattgggagagtcctatatttgcctttttaaatggaattcagaatcgcaaacagaatcgcaaacagaatcttctctcaatcttctctcaaagaaaattagaagcctagatgaggtcaaaagtgaattatgtcagccgatttagaaaaaaattataccatccctagaaattctttcaggtagtaaagttggagggagcatttcccaactcatgaggccaaaatctcaataccaaaactttacaaagacataataagcacagtgtccttcattaatttggacacaaaaattctcaaatattagcaaatagaatatagcaggatgaaaggaataatatctcatggccaagtgggatttatgccagaaataagttgattcaccattggaaaatcaaataatttaccatattaatagaatgaaagaggaaatcatacgatcacctcagtaaatgcagacattactaacaatattctataatgatttctaataactctcagcaaactaagaatatgcaaaaacttcctcagcctgaaaaaaaaactatagctgacaacatacttattggtgaaagactcaatcttttcttcttaagattaggaacaaagtaaccatttttctrtcttcttttattcaatgttttattgaaagtctgaaggtaagacaaagagataaaaggcagaaagattggaaagaaagaaaaaactatttctatttacagacataattgtctacatagaaagtcccaataattgaaccaaaaacctgctagaattaataaatgagtatagcagggtgacaggatacaaagtcagtatacaaaattccattttattcctgtatacaagctgcaggtgttgaaaatgaaattttaaaaaattaccatcaaaaattatttacaatagcattcctaataggaatgaatataagaaaagatatggaagacctctacactgaaaactacaaaacactgattagtaaaattacaatgatctaaataaatgaagatataccatgcccatggattgaaagactcaatattgttaagatgtccatttttctctatgcattgaatgttgtcccatttataaatctcaatagcctttcttttagaaactgacaagcttattctaaaactaatatataattgcaaatgacctctaatgaaaacaatcataaaaaataaagaaggagggcttatactgctgatttcaaaatttactgtaaagctgtaataaayacaatgtttgacataaagatagatgactagaataactgaatggaataacaaattcagaaattcctttatatgttcaattgctttttgataaaggtgctagataattcagtggagaaaggatactctttttagttaaaaaaaaaaaaataagctggagaaactgggtatctgcaaaaagtgtgatgctcaggtcataccagacacaaacattaaacttgaaatcgatcatagatctaattaaaaagctaaacatataaatattttctaaatagatttctgctcttcaaagactagaaatttaaagggaaaccacactgggagaaaatacaacacttacatctgtgtatctagaatatgtgaagaactcttaacaactagataatagatgagcaactcaaaaattggcaaaacatactttacacaagaatgtatatgagtagccagtaagtacacattaaagatgttctatgtcataaaccatcagggaagtacaagttaagaaactgctacatagatagtacaatagctaaaatcaaaaagactatttccaagtgtcaccaagagtacagagcaactgatatgctcatacattgtttatagaaacataaaatgatacaactactttagcaaagtttgtcagtatctcataaagttaaacatatactcaccatatggccaagcaattccatttctagtatttgcccaagagaaatgaaaatctatgtctacaaaatgactagtacatgagcactcatagagccttattcatagtagcccctgtggggctgttggaagcttcagtctccacagactcggccttgggtggaggtccgcccagctggggtgaggcagtgatctggctgcgagctgtgccaccctggcctgtggggtctctgctggctgagggattactggtttctctgttgtagtgaggggagcacaaaggcaggggtcagaagtgctggcccgtgtgcttgctctgtacttacagaggcatgacttctttggtcagtatacttcacgtttccaaatcaaggctttttcttcctaaaattggagcgccccatctctgacttttctcacagagccatcctaataaccaaggagagaaatggatgggaagggcctggataaacgggaagacctttccaagtatgtgggagctccacactggcctggttgtgtcctcctcctcggaggtcatttctgtgagctggaaaagtcatctcatttgcagtctggatgtttatctgcacttctctccagggcctcacatccttccaagacctggagcggcacttggcgcattagcctgatttctctaagtctgactgtcatgagtttggttttgggttcagggataaaacattaatccacagtgaacccatcattccttcgaatttctgctttaaaataaatcttggtttaagttgcctgctggcagttttgggcctctgagtctyggagacccttgctgtgtctgaaggattttaagtcagtgggtgagagtacaccacctgctgagaggtgtactgtccccagaggcccacctgtccttaaatcatggactattacttacaaacaggcccacagacacatgccaagaattccagggcccagtgtagattccagcagctgcactctgtccccctttggctatcagtcaaggatgtttcagcgtcaaacctgtacctatcagtatgccctaggagcacagcagagggttggcaagtcagagggcctcacccaaggaagctgggctccagttgggcattgaaggatggacaggattcgttaggatggtaaagaaaggaagcaagttgtcaggagagtgggacctggtgcctcctgcctgtcggaaccagtgagtgcaatggtgaggctgccagggtgctccgtgctggctggtgagcagtgggcagagcagatgtgcagttgggaatacccactgagagaggcagggtttttttttttttctttaagctgcgggagctgtcagagtgtttgaaataaggtgatggttgacagctgtgcctggaaggtaaagctgccacctcccagagtgcagtggagttaggagagcctgggggctgggggctgggggctgcagggatggggtctgcatggaggtgcagaggtggagatggaagtgaaggtatagatgtgggagtttgttgtggctcgtgcctctcagataagaagaggtctctggattttgattgtcaagtctggggatgtggattgtatgagagaatttttcttttttcttttctttttaaaaatattttttatagagacaggtcttgctctgtcacccaggcagcagtgcaatggtgcgattgtagctcattgcagcctcaaatttctgggctcaagcaatcctcccacttcaccctcccaagtagctgggactacaggcatatgccaccatgcccagctaattttaaaactattttttgtagaaacaggatctctctatgttgcctggctggtctcaggttctggcctcaagctatcctcctgccttggcttctcaaagccctggaattacaggtatgagccactgcacccggctagatttttttttaattgcttataatcctgtgctttattcagtttattttaatcatctccactactttgatgaggtaagtgttctttgcctcagtttacagatgaggaaatcaagactcagggaggtttatcaattttctcaaaatttacacagctagtaagtagttaaactaggaattaaatctagatctgtctgtctccagagcccaagctgcttttctcgtcagttggaagctggttctaagtctggtgagaggaaacccgctgtgggaccctgtcttcccagcctgggtctgtgctcgtacatcctcagctgctgtattctcaaagctctatgctttgtcgtttttgtttttgttttctcttcctgaaattaattacccartgctgagtggaacaatgggatacagaggcttcagagaaattggtttagttttcctcttgaatctgcttttggacaagtctcatttgagctcaggtggtccttttgggtcctgttgctggagggtggatctctcagtctctgagcccagccctggggtgtggtgctctgccccttgttctccgtcagccaagtctgggtgctctgggaaggtacttcccacccaccgtgcctttcagtgggcactccccctgcggggggatcttctctatccctctcctctctagatgcagctcacagggtggtttccgtggcctgcgagtgggatttgggctgaatttcctacagtgactgctttagggatatgccagtagggggttcaatttcagccccttccttgggtccacagtgctcctccacagtgggaacccctagcagctctgaacagcagatccagcctcgagcttattctggcagtgtaaccaggcccttcacacagcaaactgtagtgacatgtcagtagcacatgccctgcggttgctggtgccttcaaaagtgttcattttaggtggttctgccaccctcccaagccagacttcatgtgcacatcttccttattttttcttgaaaaactggaatctgacaagtctagcagagtgtgtttatgaagtgacttcttaagtagcagtatttgaaacctgtcatgaagatatgtgatgatattggtttggctcatgtgattaagtgatctgtttcgttcagagagagtgatggcagaaaagagagcccatggttttgaagaatacctctttttttttttttkkgggggagatggagtcttgctcttggagtacaatggcgcgatctcagctcactgcaacttccgcctcctgggttcaagagattctcctgcctcagcctcccaagtagttgggattacaggtgcacaccactacgcctggctaatttttgtatttttagtagaaatggggtttccctatgttggccaggctggtgttgagctcctgacctcaggtgatctgcccgtctcggcctcccaattgaagaatacctcttaaaacatgtttaagttttaaaaagattgaaacaaagtctgtaacttttagcatgcaaccttcatggattctcatcattgggaaaaattttctactggaagcattggcatgtcttttgtagccatggaaactaacccttcaaagagagagaagctcttctatcctcaaacaaggagatacagtgaaaggaaggcatatttcatactcagatgcctgaaatactttatttctgtgtgagtgtgtgtgtgtgtatatatgtaatatatatattgcagatatatattacatatataatatatatattacatatataatatatatattacatatataatatatattacatataatatatatattatatctataatatatatattacatatataatatatattatatattatatctataatatatattacatatataatatataatatatattatatatattacatataatatatattatatatattacatatattatatataatatatattatatatattatatatatattttaaggcttatacaagactcctgcttgtttttgtttatcaatggcacgatgggtgtagttttaggtgattgaagttacatatgcactgtggccaaatacacccagtacaaagcccaaagttgcatgtctttgatcctcattagtgtaaagtccatgtttgtgaaagcaattatttaggtgatttttatcgagcaactactaatggccggggtttgtgataaggaaccagtatacaaagataagacagacacagcccctccttaacagagtttacagtctggtaagttaaagaaaatagtgaaaaaccaattgcaggactgtgaagtaaattctgcaaaagcggagttctaatctggaggactctaaggtagagaaaagtctttatgtcttgagccagccgagtgggatagtatctggaagagcaggaggggttatgcaggcaacagcatgcacagtggcctggtgttgaaagagctccatgccttggaggaactgagtgaactttaggatgtctagagtacacagttcaagggggaagaggtcagaaaggaggcaggagagatctgacatgaccagataggtggtgcattccttcactccatccctaccgcactctcctgctcagggtaagtgccacatgtaaacagttaggtttggtctgtgcagggtggcccagctgctaattcctgtgttctgttcatggtggataactcaacctagtcattaaaagctaggaaacaccgactctgaaaatgattcatcttcccaaaagatgaaaactgttttaaacatcatcaccgtcttttatgtcaatgaaagcatcaacaaccctggctgggcacagtggctcacgcctgttttcccagcactatgggaggctgaggcgggtggatcccttgaggccagaagtttgagactgccctggccagcatagagaaaccctgtctactaaaaatattaaaaaattagctggacatggtggcrcacacctgtaattccagctgcttgggaggctgaggcacaagaattgcttgaacccaggaggtggagggcatgccactgcactccagcctgggcagccgagcccagaccctgtctcaaaactaaaagtaaaaatagaaatgtgattgtcaaatgtttttcttcaacatattttactgtgtaaacaagggacccccattttctygtcctttttgcccaccagcggttcccatgcatttcttgkcagctgtgtttcatgactgytgctggagaatgctgtcccaggccagctgtcttccccccacagacattacctgcaaaggagcaggtcttatttatggggtgctgtattcctaatccctccccaccccactctgcctattggtctcatgcagagagaacatcctttggctatcaccagcttttcatggttgagggaaaaatggaacaaatacaatgcttttgatgaactatgagctgagccagtgccaatgattaaaaattttttaaattgtgaaacatcacacattgctgttattttttttttttttttttacaaaattcctagtttccttgaacagaaactgaacctttatgctttccaagaagttatatttaaacaaaaaagttctttgaatcaaactacatttgcattctgtttcatttccttcatgtctatgtagaggaaataatttaggtctaaagaaggctggactcccctgataaaaatcagtgggttacttcttcaacttcccccttctctttgcctttataagtgttgcctttgtttttttctgaatttctgagccttctgttttactaaaaatctgagtccctagtgattttcgtggcagttttcaatggaggttatgttgttttttgctttgtttcgagggttttttgttttgttttgttttttgcatgtgtatgtaaatatcaaagtgttttgtttgtttaaattttatgtgggtctaattaaaacagatagcattgcaacacaagaaaaaaaaatcctgtatctaaatcaagatgacttccagtggcccatttattttatgggacgtttaagaaataaaagttcccacagcaaactgcgtgtcctcttgcatctgcggcagtcccattccacctgcacctctgtttgtgtgtgatggctggctgcagcctgggcgtgctgtctccagtagtgttggctgagccaggggtccaggagatcaggatgtcagggcctgtaaatcctggggcatgtgagtgtctggtggcctctctgcagaacatgaggcgtgtgcccagccygtgggggctccactggggctccttagatggaggctggctgggtctggggcaaggggttctctccctggagtggtgcttactgagtgggagtgagggacagcaggtggagagatgagcggaaagggggctgtcacctttctctgtcctgagttggggctcttggggaaaatcagagtgcagtagtgagcagagctgggctttatgccctgtcctccctccctggtcctgattcatgacctccccgtgagccacagccccacggaagggacgtaggatttggagcctggttagtaacgctgttgttctgttgactgggcatatgatgtgggccagcaacaatgcctcgttgagcctccgtgttggcctttgtgaaatggatgtgaaaatcctcctcctgcctcttccactgaggttgtgagcagcccagggggcagtgaatgtaaagacatttggaggactcyaggaacaatctaaataaatgaggggcttttttctgttattgttagagaaggggacatggcagagactcaggctgttttgccaaaacccaggtcgctttccccagctgtgcaggctcgtattctgctgaagctgctgttggttattcctgggaccctgggcgatgcagtcacaggtgaaggaccctgggcgatgcagtcacagtggggtgggctcaggctgtgcttgtttcagagacgattttggcttgttctgctgtgtttgtctattccatctaaaggtcttttgggggctggatgagtatggggcgcataccattgttctgtcgtcagagcgccctgcagccatttctcgtgaactcactcagcacttatgcttcttgggtgtcaatgccaccaaactacttggctgccaggtccaagagcgtgccaggctgttgcccagggaaagaaatgggcaacaaaaaatggactaagtcacagcagtcaggtccccgtggaggaggtgctggggaggctggagtcgcagcagcagctgaaaggtctttagaacgtgctgtgatctggtgtcgctgccgagtcattagtccatctctactgaggatccctgtctggggaagttgctgcatcccagggcaactgtgctgaaatcagttgtcttatttcaaaacttgtgcctgtgcccygagaccctcagcaggcatccttcttycttcatatggcagcccttcagatactggggaccagcctctcttctccatccctcctcctgccccgcccagcccgtccttcttccctgaacaggtggacaagaaatgttcatgtggcagatggggtgtcacggggccctgacaaggaaggtccacatgaggggagatgattacactggtgtgctagacccaggggactggtgtggaaagggcagaggtgacagtgaccgtagcatggtggtggttgggggtcagtgacaggcgtcataggtgtttttccaaatagtcktgtaagaaagttggggcttcatgagaagtgtgtttttgaccacattggtattgatgttaaatccaacccatcacccagtgcttactgaatgtctctggtcttcctcagcaccattttcttcttattttcattttctgttcacgcataacacctgtgaaagctgataggagtcctatcaaatttctgtctgttcctccttgcctacagagaagcaatccaggttccttagttttgtatttaagcccctttctggactgacaggaagcctgttttcrttagtttttttgtttgtttgattgtttttgagacaaggtctctgtctgtcacccaggctgcagtgcagtggtacagtcacagctcactgcaacctcaacctcccaggctcgggtgatcctcctgcctcagcctcctgagtagctgagaccacaggtgcatgccattgcacttggctaacttaaaaaaaattattttgtagagatggggtctcactctgttgcccatgctggtctcgaactcctggcctcaagcaatcctcccaccatcacctcccaaaatgttggtatttcaggcgtgagcctctgtgtctggccttgtagcctggttttgatcctcatcctcctggtgtctaccttctccttcctctgctcctgcttttccttccaggcatcgtgttgaggtgcttagggtagattyagcagctgcatggccttgtgtgcccacgtgctgtgagcctcagtgtctatacaagagggtgatagcagcccctgcctccccatagtcactcaccagcggggatggggtaaggtgttgctctgggctctggttaggttgcaaggctgagggggccacccagggtaggggacacatgtattcatgttttggtgctcaatgagtagagttttctggtgaattagaggcaggcagaatgcatttggatggggtaagccagagaatgtgtcaccaaaagcatgagacttgagcttggtcttgaaaggtgcactggattcaaagatgggagaaggctgcccaggtggatggaattctgtagacaaaagctcacagggttgcrgaattgagaagagtgtggccagagtataaggtgtgcatttataggatgggtgaataaggctggaatagcacttgggagaaggctggaaggccttgagtggcaggcagaagcatctgaccttcatccttgagggaggcaacaaggagctgtgagacattctgagtaggatgccaccagggggaagtctgggtctgcagygacctggagcagagagggaagcaagctctgatgaaatgctctggccgcagctcctgtggctgcccagggaatgggtgtgtgcagacaggcctgcataagacacttcacagctgtcctgttaggctgttagggagattccttactgagtaattgcttctcaaccaggagataaaagggaatatcttaatgacctagagacagaagatctaccacatgaggcctgaacacaataagggaaaatggcgagctggccgtggaggctgctccagatgatatgtctagttttgggcacactcatttcatgcttctgggcgatcccagcaattgtgggctttctgtcctatagggacattttctggcctcctgaaggagtaggagtagggcttgttttgttggatacaattttttgtacatagccttcctgcatgcctatatgaagtggcgccaaggggaaatagagacatgggaagaaatacatgagaaatggacagacaacattgtccgttcctgcctgcaaggagcttacagtctagctggtaagctgaaatgaatatgtaatagcatgaatttgaatttggttagtagtggagttatatcttctaagcattcaaatttttttctatttggaaataatttcaaatatatagaacaaccccaagaatagaaatagcacagtgaataatccatgtaccccttaccccagttcacctaatattaaattttacctcatttactttttcatttgttatctatccataagacatgtggactgatttttaaaaatattttataatttattactgtccttagttatttcagtgctcaaatttcctaagatttggctagtaggagctacttctctagctcctgtatccttatgacatatctccataatgtgttttggtttgtttttgttttttgagcacttccttattttcttcatcttgtacctaccctacccttgccctggaatcacccagttctccaaagtcccctggttccttttaatggggaatgttattagagaccaagatgtgggtaccaggtgtgcttgtacctgccagagcatctttgcttctaagtcctttcaacaggcagacctaggaaatatatgcatttccgtacacatattcatacacatacttacattgatacatacacatactcacatatcagcctcttttaaaaatcagacattggaaatcagactttaaaataaacatcttttagaaatcatcagttcacacctataccttcaattccagcctgtccccagagggttcttctctgttccgtgtttctgtgtccctccttccacagcgagaactctggctcccagcagcattagcacatgtactcactggctaaatcctgtaatatgtctaagatagtttcagaatggtctcatccacatcactgcaaaaaacaaagctactgaaaagagttcagcatttgtttgtagttcatccctcactccaatcctacccaagactgagagtatgtcgtcaaatattcatgagctatttgaattagttttgtctttctccttcagtctggttatggtattcatttgaattacagatttgtttgtttcaaatcactttcagtttaggggtattttcccttcatctcatccttactgacttaatttttaaaaatttaaggtgaagaacattaacatggttcccaaagtcaaaactatagaaaaaggtatacttaagagtgtcactccaaccttgattcctttggcctaattcattcccatcccttgttttctgctctttcttttagatamacctgagagaaatatgctccttttatttcccagtttttcgtgtgtaaagggtagcacactttattgctttttttttttttttcatccaggcacttcttatttatcttttgatcagacacaccataaccaaaattctggtttggaacaagaagactcctagcatataacagttgttggatttttagtcacttgcaaaagtctgttggtttctaccaatagctttattaaataagctttgtaaaacaatctcttagtaataggattcttagaatatgatgaattcttatgcaaagtggagtaacttttttcccatcattgcaaagtttgatagaaggtgcctcggacttgaggtgtgattttcaggatcagagggtcagttgtgatgggaatgggttattctcaactgagcagatagtgtacaggattggcagtgggtttgccagctcattgcgatcactctgagccttgggacccatgtgtccttctatgtgtctcccaatcctaacgggtttgtggcagcttagagcccattcacagctagtgctaatttttctccctttgataatttgagaaagctcttccatttgccttttgaatgtctctcttatgtctggattcaacaactattatacatttgaacttcacgttgataccactctttgtgttttcaaagccttactgaatgtcttgcttaattcctgtgaaacagcggaacaggtattgttgtgtctgtttggaagtgaggaaactgaagctcagaacacagcagtgacagagctaggactagaagccaggtcttcagacgaagagcccagagtggtgtaggagggccaaggatttatctgggtttatcacagggactctacctccctgcccccttcctccatcctgccctgtggccaacagatttctactgtataaacctcacctctgtccacatcaataaataataccttcctgctaaatattcagccattcagaactgtctaaaatcagttcagagggtctatatcagcagctttgttatatgagcttttgtgatagtgaccatcattgtgagtgggccataaaccaggacttggcagggttttttactcctaggaattttagtcagagtagagttttacttatgcctgcttacctgtgtcccagcagtggaaaatgtacaacagtgatgcagcttgttagaaatgggatttttatatttgtaatgttaaaaaggcataaaatattacaaaagaaaattaggaagatagnnnnnnnnnnnnnnnnnnnnnnnnnnnnnnnnnnnnnnnnnnnnnnnnnnnnnnnnnnnnnnnnnnnnnnnnnnnnnnnnnnnnnnnnnnnnnnnnnnnnnnnnnnnnnnnnnnnnnnnnnnnnnnnnnnnnnnnnnnnnnnngtagaagttagttcatcaatggacgttcattttataatgtatgtaattatacattataaaatgtatataattatataatttaaaaataaaatataattatataattataatacattataaaatgtatataatgtatgtaattatgcattataaaatgaatgtccttaagcttctcagggtaactcttttactatcttcataatttttttcccaagaacccatatatgatatggacccaaagtaagaataccttgtttgtatgtaaccatctgaatttagtattctaagttcggaatcaaaacatgcaaacagatttgtactaggatacttttytggtgaataatagaactgaaggtccacttttctttgagatgtatttaagaaaacagattatataattcattttcctgcagatacatgacatsccaagccctcttactgttgctcagggatgtgattctggattgagttgtgattttttcagagttcagagaatcatttggtgaatttacctagagctgagttatgtatttcccatgtgtcaggaaaccccggaggcctagaaaccccaaaccattctcagggtgtggtacatgtgaatggcgagacactggagtccttacttctttgagacagcaggtgttctttgggctgggaggtcagagcacgtgtctgggctcagatcggctcctgctcactctctagatccacaaagcctggcctccttccttattcacagggggtggagtggagactgacagccctaacaggaccaaggataggttccagggagtctggaaagtggggtgatttagaagctatgagagggatcctttctttttcttttctttttttttttcctttctttctttcttttttatttttatttttattttttttgagatggagtcttgctccgttgcccaggctggagtgcaatggtgcaatctcagcccgccgcaacctctgtctgastgggattctttctaattgtgggcagagggtggcacttggtgaggattccagtttcttatctgaagtattagtgtcactgggtgtgcaagcatctgttcagcccctcgacagcctagagttaagagacgggtgtgaatatggggttagttttgttgttgttgttattattattattattattttggagacagcgtcttgctctgttgcccaggctggaatgcagtggcatgaacttggctcactgcaacctctgcctcccaggttcaagcaattctcttgcctcagcctcctgagtarctgggactgcaccaccatgcccagctaattctttttattttagtagagatggggtttcaccatgttgaccaggctggtctcaaactcctgacctcatgatccacccaccttggcttcccaaagtgctgggattacaggcgtgagccaccgtgcctggctggggttagctttatgaaagcaggtcacttccccattcgtgggttgggttgggttgagttgggttgggttggcttatcgaggtaggaccctgaaagagacatgctggctttgactcggaacaaaggcaagaaggcagacagaagtaacctgtgtcagaatctcaaggtctgtgtgcagaaactgcattgctgtaacctcacctgcttccttggcagctttttactaagtctctaactcacatatcttggctcctataacaactcacggttggagatgcagatggttcctcatatataaaaattgggtaatcgtccacctgactctcaggcttgcctgagtatgtggggttttgtatatatgcatagtcagaggcttgcacacatggtggaaagtagcataaacaccccacaattgggaacatttacctgtctgccagatcttttccagggcaggtgttcctataaatgggcagaaaatcatatgcctcttcccctcctgcagggaagacttttggggaagaccatgacaagtagcaggggttaagaaaaacagtaatgcttcatcagtgctcgagttcccatctgggaagggagaactgggttgtggagggggtggggactgccctgactccatgcactgctctggcccgaacctgcaggtgatgggtagaggagcctagtgtgggcaccagcaaggactgctgcctgctcagagctcttggtttggacaaaaggggtagcacacaatattaatgcaaagtttgtccaaaagcattgaagaagttctaaacttggtactctttgaccacagcttggcccatttgggtccctcctctttgaggaggctctggggaaagtggggcgtctctgagttcaggccccttgttggggggtgtcagaggcctgccatgacagcacatggtgttttgggcctaggccccttgagatcgctgtcatcgaggggagttcattttctaagaaatgatgcatgtgtgttggtgtgggctctgcgactctgacccccatagtcttgctttggaagacactgtcttctgtcctgtccaagtgtgtggctccattgctgtgctcatgtgactatwctcagtgctgtgtgtcctgcccacaagactgttgtgcagtagggcagtggctcaggatgcaggtccccaaggatgtcctgatatgtgcttgtcctctttgcctccttcagagaattctcaaaggaaagagagaaggcaaaagcacggggagatttccagaagctccgggagaagcagcagctggaggaggatctaaagggctacttggattggatcacccaagctgaggacatcgatccggagaatgaggaagaaggaggagaggaaggcaaacgaaatagtatgtagcgcctttcctgcccctggctagacagacccagtgtgcggttcagacgcctagcagtaggccttcctcgactctgacccaggctgtgagtgggacagcctcctcccagccatctggtcccttctgcctgcacacatcacggagagaacaggtgcattggtgctgactctggatttctgcctgaggtttggggtttagagttgtatttggtaaggtggctttatagccaaggaaggtcaaacggacccactgttggcctgggaaattcagtaagcgcatttctgtgcgggcacaggggtgatgagacacatattcttktaccacaggagaagaagctgtggtttccctcacctcagagtgaacagtgttattggacaagaatttgaagtgcagggttcctcttgactcttactcttaggccacctgacatggctcctacatgtgctattcatatgaagccatatgcttagcccatcaggggctgggaggaaaccggctcaccattctaggcaggtgttaaggggcaygtgagtcagtgacagctgctttgctgtcacccatcgacaccccacactgtgacactaagcaccctagagcaccttctgcaggaggcaaggcctgagaactcagtccatcactgacattaattgccattgtcaaccacggtgtctctttcactgcatacttttcccacagatgcgctcttattctctctggggccctttgtgcctygggtcagagtggaaactggaatccagcaatgcatttgactgagatgtctgtgacttgcttcaaatctagargagttggataggaaggaccaagaacgtacttcaagtgcacatgtccattgagaggcctggggacccgaggccggccctacgttgtagaagatggccgagcaagtccctgcttgagcagagcgccttggatgttttgctctcagcaaggcctgttgctgggtacaggggaaacccagagctggagaggatgtggagtgctgcctcctagggagagacaggmctgtcacactaaatgcagccctggggagcagagctgcagggcacacatagagggcaggcaccgccgacgagggatcgaggacagggctggagggagcatttggcctgggccctgaaggatggatggattgcaggtgtgaccattcagtgtcagaagaagcaccctgacccaggggactagcgtgagggaggcgtggaggtggacaaaggccaggtttcagggaggaagcagtgggcccttcagctggagcacagagggtatgaaggtcggggtgagctgccataggaagggtgggtgaggtgcaattgtgcctcttctggaggttgtggagtgtgtaagtgggggctgagagacccctggtggagaggcttcttgactgagagggcccttacctttcttcaagcctgggctctgtgcctccatggggagggagtgtgttccgtgatctcagatrccctggctggtgcaaaccagtgtgctgactgggagtgggcagggtcaggcctctcttctctccctccctgcttcttgccaggctcaggaaggggccrggacttyagcacctgaggatcagaagactgagggagggtttcyagagctaactgtttgctgaatgcaagttcagagtttataaatagacattcatgtgagtctcagactcagcgatgtgcctatgaagtgatcagatgtaagagtgtctgcctgtcctctgcacagctctccccttggcagttgagccaacgtgaaccccatggctttcgtggagcttctgcacctgcagtatggcaacaggccatgtaggtgcagcttggagatgcctgcaccgctcttttccccttcacttgcaaactgtaactcagatgctgacctgccccatctcccctaaacccaacatgttatttgtaaaygagaggaggtatggcccctttttctcagcagagtgtctttctttgctagtttagctgtgtcccccagggagctgagtgaggccttcttacaggccagtggcctttcctctgtttatttctcctcctctagaagtagacaaggtttcgtgttctagtgttgctaacattagtcgtggtagagttgtttatagggcctatgatttgaggattaagggttttcattggatttaaggtgatatcttgagggttaaccattttatctcagcccagcatttcctatgacctatcactgtaaaaacctgatgatgacagaaatcaatgactctgcctttcagagaacttgccatgaggggaagatggagaaggagtggcttagtgtgagaagctgatcccattgttaaggcccagcactctgctgtgtgagcccaggagggcgcgatgattctggctggtgggagtgggcaggctggggcgatgtgaggaaggctccgtgggaggagcagccctgggcggcagaggttgggggtgggggctttttcaagctggggaaatggcacaaacaaggtgtgcgaagtgacaaatattcagggcccttaagtgcattgctcagtaatataatctaggaaagaaacaaaacctgtttaaaagccttgtagatcttcagaattcactstcactggggctcccaagcccataaagctgcaatgtgtcttgggaacatcagcagtattgtttctgctatgcaccgtgatgtgtgactcaaaatgattaactagcttaacgtttgatccagaatagcaaatatttctgtggtgcgcccttgttctttatggagctcgttttgccaggtgctggggtttcctgtggagtgaggctcacagtgcttcccgagtcatcagatttccagagccttgctgatgagggttttaaataaagacagaaatcttggctgtggaggccatgatgggatttagctgacttgagagcaccaagtctcctcctcctctgaggagaraacctctctgatcacagacctcagcagcccagaccctctggaggagacagcactgttgaggtttccctggggcctcctgtggctgccagccattttcttcctgtcacagccagaaaaccacacaaggagagggtttcagtgaggcccacatggtcctcctcaccaaataaacagtcctggattcaccacatgcrcatgccaggtctggggctgtctctgtgcatctgattagcaggcagtagaaatgtgggtgttgccagtgttacggtgtctgcatcctccctggggktgtgagatcaccccacgtgccttccactccaaccctgctcctctgttacctcttgagaggaggatggcgcagggcccgggctcctgactttgtccataatggctaaggatgctaattcaactgagagcccttttcagctgggtcctggatgtgagttgagcagtttcctcccagaccttgaggattgaagtgacagtgtgagaagaaatgcttcctgatagccgagcctcagcctagatgagcagaagtgggtgtaggaagtcattaataacagcagatgtctgtgagctcacaggaggcaaaggcttgggctggagggcatcttgatgccccttctccggatgtggctgcaatggagttttgtgacttggaatttggactttagtattaggcaaattactcaacctctctggaccccactttccttgtctgcaagaaggggataaagatatatctccccatggggctgttgtgacaattgaacgttctgtgactgctaggagtagtcatagttgtagtatgtgctgctgctgttttcatcagacaccagtaaaagttgacctcaacagaattttaggggtataaatttagggggtacaaataccgttctgtgacatggayatattacatagcggtgargtctgggcttttagtgtaaccatcacccgaaaagygtacattatacccagtaagtaatttctcatccctcatgcctcttccaccctcccacccttctgtgtctccaatgcctattattccatccacaccctatgtccatgtgtacacattatttagcttctgcttatcagtgagaatatgcagtatttgactttcctaaacataatatttttgaaggttctsctagaccgctaaccagcctcagggtggggcctccctcttaggaccattgccctgtgcttttctgttcagaaactataaagttctgaagtattgatggaaaacaaatctgttaactaggtcactttcgagatagggcagcacagctttcaggctcttgaagtccatttctagtttggcggtgcttgctgtcagrgaacagatgtcaaatcaagtacttggagatgcgctcacattatcttttctctctgatctgctaaatgtcactgcatgygtctgcgatgcccaacactggctgtacgttataatcacctggggagcttggatgcttcttgatgccatactccaccctctaagactcttgattaatcttggggtgggagccaggggtggctctttttcattaaggttccctggggattctaatgtgaagctagggttcagaactcctgagtccaggatgctatcagtggctgaatatcacactgttccaggcattcacttgaaagaagaggagaggcaatcaggcctctaactgagctgtctggtgactggtgacaggtagctccagctttgtgcattcatagaatatttaaaatgtcaatttcataaatttgctattagaaagctggtgttacacaattaactgaatggacaaaattccctttgaagtgagttcctgagcatttggtaaattttcaaggataatttatttaactttttgctgagcttcaagtttcttaagaaaccctgccaaatctcaaagtgatttttttagacatatgcagctgcttctgagttaacaatggagttttgctaggaccattaaaatctggaagcctaaaattctattttaaactcttctcattgtcagtgattagtcttaaaaaaaaaaagcattaaaaatgaaatcattttaaagggagctcattctaaaattctggccagaaaagcagggcaattttattgtaggaactattaatgattaataattcctctaagtaaagatatttgatgcccaaagaaagggaggggcatacctgaaacttcatctctgaccacaagggcagcctctctgtcttctgcttcttcagtggtcctggaggctatgggcactgcccctgcctgcccggggactctgccaccctggggcttggtggagcaggttgccctagctgcctctcttttgcatgtgctacctagttgcctctkactgcaatgtttgctttgggggtggacagaaaaccaggacgttatagctggttgcaagcataaggcatagcaatttgctggtcctgttttgaaagactgtgttttgaaattttgatttacaaaactgctttcatcaccattgaactacctcaaggcacaagttcaaaatggaagatactcaaktaaaagctgtaaagcaaacagcagcagttagagtggcatacggtaaatatgcgtccaggtcaagagccctcwctggagaggcagctggaagtgctttcactgggaagtgggagggctgactcaggggctggccctagggtcagtggctggacactgtctccattggggtggcactgggagtagttgtctggacaggcagactctctccacaggggtgatagaaagcagtggtaatttctaaaagtgcctgcatgtctgccatcaccttcagcctcctaagagctgatgggagctggactcagggactgttgccccactgtggagacaaggagtgggtactccagccaagtttgcagtctcaaatcagggttgttttatttgtttttaatacattttaattatggaagtaatatttgcctacataaaaaattcatgtaatttcaaagtatataaagtaagaaaaaaattmtctcttccttctccttaaagagaggcagacttagaagtttggggcctctacttccccacctcactgcacataatacatgacacagaccgcatgcatatagcttccaccctaagatgcccaacacaggtatttttcactgaaccatgtaccacagatatttcccatgtttttaaagcaaaatgttggctcttttcaataaattgccattataaaaactgctacaatggactatgcactctacagcacgtggacctctactttatagaggtctctccaccatgagaccatcagctccatgggtgcagcaggaayagggtctgtttctgccctctgttgtgtggctgcacccagcacagtgcttgtcccatacatgagcatgccattacttccttcttgaatgaaagaacatagagtaataataactagcatttgtcaggtgctttctgtgtgtgagacactgttccaaaggctgtgggtgaatacattcattcttcttcacacaactctgtgagacaggaacttgacagatggggaaactaaagcacaaagcagttcagtagcttcccaaggccatgtgacttacgtggcaaagctgggatttgaacccaagctctgccacagtctgcaggctaactatcattaacccctgcaaacacatgcccctgtgtctgcgtgctcgtgttcatggttttgtgggagaggatacaagaaaagggtctgctgtgtcagaaaggatgcacattttaggaacgtgagtattctgcctrcccatagtgtgcaggtgtctgtgctgcccatgcccttgcttactccagcattcctgctgctgtctcacactgcttcgcacaaccctcccctagagcacagggtccgtactctaaagactagctggcttagagtgatcatggaatcatggggctgcaaggggttaaagatcctagagtcatttctctcgtgacctggtggtcatgggagagtcgtagtgatgacagtagtggtggttgattgtgccttgccaaagctgggcacattgcttttattactgtctccactgttcacctcttacaacaaccttacgcagtacaggtccaattattattgacatcttacaggtgtggaggaaactaaggcttcacagtatcaggtaacctgtccacagtcttctgacatggaagtgacagggctggggttagacctggcctgtcagagtccagagcccaccttttgaactcccacctgtcctgtcccatatggtagtgctgtttggaatcacatatccagtctgtacagggctcctgactccccctaaagtgccttttccttaataccctacttagatgggaagccaaaccctggaaacctttatctagcatgggttagctggttgttgatttagaacaggttcttaaagacaggtgtttgtgtaatagctgtggaaagggcacttcctctccgctgttctgatgctgagctggattcctagcaggaggggtctggggcaggcgggcgtccattgcgygaggcaasctggctggcagggctggccgcgtggggccctggtttggctgctgttgctgccctctgctgcttcataatgaaattgcctgtgttcaacctgaaggggtcacagtggccgacttgcttaaagaggataagaagaaaaagaagttttgctgctttcggcaacgcagggctaaagatcatggtaaattgctgagactgagctttctttttccgcaacatctctgataccttttccttgcacataggcattgtgtgaagtgcatgtgccgtgtggtgtgttcagaagatgcctatattttaattgcttgatttctttcttcttgtctttttccaaaataatgtgcccttaccaagatagcattgcagttttctttttgtttgaactgtaccttataaagaagcagctgaaccaactcaaaaaatgtacttgattcggcatgaatattcttagactggaaggcagacttttaaaatacttttccccaaatgatttttttaaatttaaaccgtttagaaattccaataatgttatttgattgatttttttttctccaggctacatgtttcaaattgcttctctgtcttttagtctctggctactttgcccaggactatgccaaagctagtagtggcagctttaagaatgaaattagctggrtgcagtggctcacacctgtaattccagcactttaggaagccgaggcaggaggatcacttgaagccaggagtttgagactagcctgggcaacaaagtgagaccctgtgtctaccaaaaattgtaaacaaasaagcaaacaaaaaaatcaggtgtggtggtgcatgcctatagtccccagctacttgggaggctgaggcaagaggattgcataagcccaggagttcgaggctgcagtcagcgatattgcgccattacactccagcctgggtaacagagtgcgatctctgtctcttaaaaaatmaaaataaataaaaatagacttcagggatgcaaagatttgggggcacttgcctttgaaagtgagaatgggctcgtgtgggaaagttatatttccagatatgtcctaaaatgatgctaaacatacccttcctcagaatccctggagtagctgtcaggcccatccccaggcagacagttaggtgagcagctggctccctgccttgctctgcccaagtcatggcagtggttcgacagcagcacaaagctttgcctatgcacaccagcacagtcgacccagttctgccaccaggatcggccctggtcacctgactctggggaaagtctgtttaaggagattcagacmgcagggacgtgaagccaacaactaagggaacagaggggacacactgtactcttttctttgaagtggcctctggccccatgggaatgctgagctgagaggttatgggacgcagatgggaacaacccgtggatatctgaagagggttatattagagtctaggtctcatcagaaggcctaaaagtgaaaaggaattaagagattatcagatataagcccttgtcattcagcacgttgtggaccccaaaggagggagaagaggaggtggaacttgcctgaggtgggacagtgagttaggggcagagttggggctgccttttttatctgtagcattcacggaaggtttatgaacaggaggctgggcttgatgcagcacctgaaggtgtctgcaagaagaatggccttcagctaagcaggaaatagtgtcatggacataagaaaaaacatctttaaagactgacataggratatagctctggagaggttaccaaaaggagataaatgatttctgtccccagaaaagaaaacacccctccttggttctgccttgctgaatgcaggcttgggccttgtgattctttaaggattcttgtgccttctccattgtctttctgagatctgcagggagaggaagcaggctgacacatttaaggaactttattttgagtgggaatggctttttattgactgaaatacctggggactcaggaaggactccgaccctgctggcaccaggtggggcacgagccctcatatggatgctgggctgcccctgtccctgaacacgcggagatagttattgtctgggcataattcttgcttgagacatggaaaccttggtctggccttgacctccattctccaagaagagcctggcttctttacagcagcaagaggctgttactctgtggtggcctaatgtgtctctactagcatgtgcatgtgcctttagggggtgtgtgggcttcttctggatttggcaggcctgtacgtcatggtactgctcatgtttgtcatgaaaataagatgaaaacatgaggtctaggtgtcaggtaccctgtcccctaggaaggcagccacaactcagccactgctcagttgtccagcctcaccccctacccttacctttgaaaagaatgagaagctttaggctgcttggagktggaaggaaatgctaaaataaattcctgagtgtgcaaaaaagtctgtcctgtggagaacagaggagtgaggctctgaggccaaagacatctgtgaatgaggctactaatgggacaggttctagacgaggctggagggctctgggctcagtttgatgtgtggcaagccttcccttcggggtgccttgactggaggactgaggctctcctgtgacgccctgaggcctctggggagctactgcttcctgtgctgcaccccattctctgggacattctacatgcagagcacttggactcagttctccwgtgcaggctgctggctggacccctggcttccctcctgagggtggygggcaggggctcacttcttgtgccctcccctccttgcagagctgggggaatgcaagggaaaccccctggttgttggtagtaaaaccagccagcatgtgggcgtttctgccttcctgcagttatagcaggtcagaggtaaatggatcttagagatgatactgtcctacaactcatcttacagatctggtagccaagcataggggaaaagaggcacttgtcccattgtcacctgatgataagmaccaggctttcctgacatttcttccatcatttttgacctcatcagcctccatcactgaaggttgatctgagattttgctatacctgttaatggtgaacataattttgaggctgcctgcttaggacccacacatagactcatttgctctgtgtgtatgtgtgtgtgtgtgtgtgtgtgtgtgtgtgtgtgtgtgtgwgagagatttgcctccaaattcacaagcctgacacatttggctgagaygaatgtcgtccttcagcatgagagtagatggataaatgtctacaccttggtgaaaatgctagytgtgcttacctgagaagcagcagatttccctggtttactgtgtgtggcattgcccatgataacatctggcccagtgcaagatcttaaagagaagcaccatgacccacatccacagagtgctccaagtaggggcctggcccggctgcccatgctgcaaaggccttggaaactctaattacagtctgggacatgcagggctgctgtctgccaccatcctctcacccccagtggcaccsaggccccccgccaccaatctcagtgcaccacactgtaagcctaagggtctgccctggagctcttcccagagatcccaatgcctggaatagattgcaaaatataggccttgagcttcyccagattttcagcaggcaaattgcagtgccagcatcctctcacaggtcacaggctttcctaatgcttggtttttcccagactcactgaaagtagtttttaaatttatataaaaaataaacttctctaacaaagctctaacattccagtttcctgaaatgtgtcagggaagaggcttcacagcttgttcatgtgcagatggcccctggtgcttatttctacagtaggggactggcacttgtcggcaatgtggggaggtctgaggggtctgcctgcacctctaataaggcctagccacttgtcagcaattaacactgaatccctgctgaaggggacaaggccatcacctaaatggggcagtcacaatgctatggaagccagttaggagaagcccatgtattcgggtaatttgcccatggctttaccttcatgagtttgtatgactctttctgtctggatttttataaaagcccagtcgtcaccattgcagcctgatttttgtgctgtcgtcggtcactgagctgatatcctgtaagtgatctggttatatgccagattttgagtggttaataaaggtcatcagaatagtaaaccagcactggtagataatagactcgtttggctttttggaacttgttgatttgtggaattttaagtacataacaccaaaatgtataccagtgaaaccacagtacatacttgaaaagaatggtgagtggaagttaggagagatttctcagtgtcagctgtgtgtcccaaggcattttggcgagttctgtcctctgagaaatcaagagtttgctcacgtattctcagaagccccttctggttctaacagtctatgattcttttctttattttttaaaaacatagatgagatcctattggggctaaaggaagggaaagtcatattaattttttaacattaaaaaaatgaatgcctaatgcaagtgaagggtaaaatgctttatttttaataaatgaggtctttgttatacccactgagcctgatcttttcaaatatttttggaaaaggataagtgtgatatttcttctggaaatattttggaaaaggatcctgtgatagggagtaagtggckggagaaggtaggctgccagggccctggtcagagtgcgtttcctctgcccagatttaggggctggatcaagggctgtttccaggaccaaatgaggtctccaatttctagcgtaggcactgtcctctttctttccgtctgcctctgctcatcctcagccctggcaacatctttttgggatatatttatttattatgtgcctgtggctctttaggtgtcaaacaactatgacaggagaagttgctatgcctacagtaggcaaagttagacaataactcagctaaagacagagaaaatacaaaccaagaatgatggccaaagctgattcagaggtatggaagatggctcacactagatgcgtctgtgcaaygatgaaagtggccagggcaaaatgacactggattggtcgctttgcttccagggagctccaggagagcttttctgagatgatggagttaacatgtgtgggcctcactgatcatccagccctggggacccagcactccgcatgcctcatctcattcttacccttttacaggtgaggcaatggagatgtacagaagtcaggtcacaaacgcggggttaaacttagatctggccaacctstgcacstgctctcagccactatcccaacccagctgaaggacagaatcagctcagagagcaggaggaccctgcctcaccctcagtggagccctggcacagtgctgtgagactatcttcccctctttgttgctgtttggggagttcgrttttacttcttgtctttccccacagttagtctagggagcaactagaacatttcatacactaatagttggcagggggccagaaatgctaactgatgaccccattcccatagaaaatatgtaatttatctgtttcaatcagattgtttttaaaatgaagctttagaattgaaatgctgcaactgtaccgatatcagcatgagacaygactccagagattaaaaagccacaaagacttagtcttttcagaagtttgctcttttgaaaataatgactaatgttcctacatgatyaatattagaactatgagatagcaaactgttaaagatggaaatgaccctcaagattgtggagttcacaccaccattttagagacaggaaagtgaagsctggagagaggtgatccattgcccaggagactcagaaaacaggaccaggcctgtgggttccccacatcatactgccctcaactcctggtcccctcagtcactgcagtaaccaccacggaaaatgccgcacagagttaactcatgatcagatgtgaaaagggtctcccactgtgattttctttgttggatttaacaacctcctcacctttctgctgaatcagagtgaggaacagtcgaggagaattgcatgagtagcttcttgtgtgtctgtgtgtgttaatggagtttttttttttaaggtttttccatgattagagtcgtattttttgtttgtttttgtccagttttttttgtttgtttgtttctgcatgaaataatgaaaaagtaaatcaaggtttgtaattggtttcttctsacttaggaaagaagaaaattattctatgagagtaccagcaatgtaacatgagtctataattttactcacttggtcttaacttttgacacccttgcctcagtgttcctgggcatggcgtggaggctcccatgcaggcaggctcagtttctcgggcactcacaagcggaacggatcagggatcttctttggtatcctcaagaaacttctcagaccactgggttccttgagccaggttccacctctatccctgctgttacctttatgaagtctgctatgagcaaggcgggccgaacacagccccctacgcgagctgcctgatccagctcctttccccctgagcctgggctgggcctcagaatcttcgccatagcgcttccagcccrctaccagtatttgcagatgaaacttgaggcatccttgctaaggggagccacacgggcagagcccatgggccaagctttcctgaagacatcgtaaggtctgtaaaaacagtcactacagttcaaagccatgcctcaggaaaaaggaagtacacgtggattctcttccgtgacttcctcttttacctctgcaccccggcagaattaatccttctttactctggaacctcctgcacagacccctgaggtagctctcttcacagctgatggaagtgagctgggggctgcctgtccctcacccctattccaggtgggtgcagtgctgtgtgccctctttttgcccctgccctcctccactgcctgggctcsagcacrtgttcgtgatgtttatggggttgaatcaagtggatgagaaaagacgctcgtgcaccagatggtggccctgggtggaccctggacctccacacactagtgggcgtgtttccacatttcctctacttccgctcaggatcctaccatggagaagtgggatgggcccagagaccctagtcatactgagaccagagtcaaccttgccctctgctcactggttgataatgatcttcttcttccactcgtaacactataattccttggtgctctagttgttcttacccagcttactgggtaagaactttctgygtattggcttcacaagctcagcagaacttcagcatcaggtaaaatagcaaaaaaatagagttcttaactctaaaaaatgttgtgcatggtaccttcatgcactgccttccccattcacaatagctcttctccctcagtatatttaagatgattgactcatgaaatgttagggttattcacagatgttctatatgcaccttttggggcaagcaaagatgtacctgtaaagtacattttggtggcttctcagtgtgatcccagagatgaggaggataaagtggtgctatacccagccacaggattcactttgatcccttagcttcctttcttggaaatgtctagggggatagaatgtcctcctcgagggggactgtgttycctacaggccatgggtgcagagactcgcctgcagtggagatgcctggctccttggcactcccttagcccagctgaggccctgagggcccttttcaccctcctcctgggttccggaggtctgcctggtggcagaggctcccacctggcctgcctcccaggcgtgcagtgtgccccgcatgctctctgaagcccgtcttctccccacagctagcatgcccaccagcgagactgagtctgtgaacacagagaacgtcagyggtgaaggcgagaaccgaggctgctgtggaagtctctggtgagtgtggggagcacttgccctctttcccctcctgttgtctcagagaagcaggtggtgaggaagaccgcccaggctgcagcagagccccgggccatcgccttgggtgtggygggtgggaaggctcctcgtaccccacgccacgcttcctcctgtgccagggctatccctcctgcacacctccccaccccccgcccccccgccccccggcccagcatttcacatgcctcttcctgtaagtagagcccgtgaagaatgtggtggttaacctggccacctgctgtgtccattaggtgctggtggagacggagaggcgcggccaaggcggggccctctgggtgtcggcggtgggggtaaaggcctgattctccttccagcctgggtttggcatttgtgcttttgaagaagagcttctgtggcagagttgctgactagaatgtgctacgtatttaagttttcctttgctcatgggaccttcctaacctcaggcctggcggttggatgacgaggccctgccttcttggtgcctggcactttttccctggagccctgcaccagcctctcctcatgatggaaggcaccattgcattaacactcactggcttttttctagatgatttgggctgtggcagctggcgggggrgctgggggggaccagcagtgcagaatgtgctgggcactgtctgccgtgggggagccctgtgcggtttggttttgtttgcttcttgctggtatccttcaggtcttatctctgtaaagtgcaggtgtcatttttaagagaactcaatcttactcttggcagagtttcataaaaatgatgtgttatgggcagaatatgcaaccatttgtgaagtgattttgcctccattctcttgctctgccctctctgagacatcatgaagcagacagagaatgggtttgtcatccccactttacagatgagaatgctgaggcccaagacctgctgctttcccatactcacccagtgggagaatggcagtgctgggactcctagtgcagtgctccctctgcggtagtagcagcaaatgctgctgtcgagatgagtggcaggagagactctgctgccttcattttggcccctgcatcactgcctgctgccagggcctgcagggaatctggccgagtcttccctgacctgggcctcgagggtgctcagtctgctcctctggccctggcagcatcctaatttctgctctggccttgcccctgctggcctgctgtggtaaccaggggtgctaagtccaggctgtatgcatggcttttatgatatctcagctgaaatgatggggagtrtgtgctcaagccctcggaaccagaatcttaacactttttgtctttctttcagtcaagccatctcaaaatccaaactcaggtcagtatcttctttctgtttcttcgtyagcctgtgtgttgcctttgtatgttctcacttctgaattttacgtagtattgctctggacttgagttttcctctgtggattataacattgatactgaattgcagtcagtcaattgaatcctatgagcctggcttagggggagatcttaggtgccaaagatctccctcaaagtaaaccaataagactcagtaacgagttttgcctccccattaatcctccttatcctctgagtcattttcctaagagagctgctgcttgtcacttttctgctcgaaagctttccatagaaagggagttcaagaagtcttccaaggtactagcatttcttgatgtgcatgcgggttacgtgttcagttggtaaaactcattgaaccatatacctatgattagtgtactttttcatctgagtgtcatttttcaacaaaaacattttcctactatatataaacactaacttaaaataggcaaagacctaaatataaaatataaaatcatgaacattccagaaagaaaacaggagaaagtctttgtgatcttgagttatgcaaaggtttcttaagatacaacacccagtatactttytgtaacagaaaacaaacagataaattggtctttgtcaaaattaaacttctgttcttcaaaagaaaagaaaaaggttagcttcagacttggagaaaaatatttgcaaagcatatttgataaaggactggtatcccatatatataaagattaatgcataaaggagagtgtcaataatagaaaaacccaataaaaaatgggcaaaatttttaataggcatttcaccagagaagagatgtggatggcagataagcacatgaaatgaccatcagttgttacaaaaatgcacattaaaatcacagttagataccactacacatctattagagtgaatcagatttaaatatctgacaatgacaagttctgacaaggatgctgattggtgggaactttcatacagtgttgatggacatgtcaaatgacacagccgttaaaaaaatagtttggtagttcctcataaagtttaaacatatatttaccacgtttatatttggcccagccatcccacttctaaggtgtttgtataagagaaatgaagatatatgcctacatacaaagttgtaacatgaatgtttgtaccagttttattcatgcttaccccaagctggaagtaacccaaaggtccatcaaatgtgaatgggtagacacactgtggttcaccagtatgatggagtactagttcatgtctgctgagttatgcatcctaggagaaacccagctgtgagcgggacagtctttagtgtccttagtagagtttttccacgctggccaacatgttagaagctgctctttccattggaacctgcacagcaagagtaataataaaatacaccttacttgatccaggttttggtaaagagttggcacaactctttctctgctcacttcctgggttacagattttctttttgcctagcaacacagctgagtcagccagggctgcagcttgggtagcctggagattcctcttgactcaggcccccagaggaagtaccccattgtcgttagtgaggcagcacagcctggagaggactgactttaccaattggctgacctttccacgggatctgggtcactgagctgcagctcatggcacactttaccaaagcatccccttgtggcagggaaggttttctagaaggagacaggctaagggagagaatattttctctaatcacaatcaggaactgaaggtaggtggaggacatgctacttgtctgtttggctgagctcattttatttttatgaaaacacgattcaatattggctcttctcctaaaggtatattttgagcatcactagttagaaagggcacctgatgactcagtatgaagattcatgtcctactcagctttgacaactctgccaggctctggaggaacctcagagatttaagaaaggattgaaaaggttccctttaaaaaaaaaaaaactagctttgtagcactttgctgcctggtaaattctgtatggtgattgagatgctgcaagagatgtgtataataagcgaagtggctcwctgcactgattgcatgagsagatccaygtcccatatggtggatataggaactgcatatgtgtgcaagtgtagttttgcatctgcacgtgaatctatgaatatctagattttctaacccacttaagggctgcatatgacagattctggagttatctataagccataaggaaggactgatagcatgatcaagtcaagattatacttttaaaagtcgcattttaagaccaacataatttttatgatgaagtctgttaatttctgtgccatttgtgctcatctttctttcctgcactcccaccccaatctagacctccagagtgaaagccaaattatctctcaatcatatttattggatactcagatgctgtatctgtcatctacgtagtaatgtttgcttgtcttttagccgacgctggcgtcgctggaaccgattcaatcgcagaagatgtagggccgccgtgaagtctgtcacgttttactggctggttatcgtcctggtgtttctgaacaccttaaccatttcctctgagcactacaatcagccagattggttgacacagattcaaggtacaagcagaggccattccttttttgttctgaactagagatttctgtggctgtccaactgccatttggtcttatctgatcgctgcatgatgaagtatcgcaacatttctagtgaggacaaacttggtagaaccatccagacacagcaactaccagagcgagggtgccatctgtgccgcgtggtgaagcaccttggagccacttaatgccaagcatctaattgtcctaaccctgagccaacctaggaccaagaattcttgaagctggaagggacctcgtaatccctgctccctgccctcatcggggaagcttcattttcccctatagtacttctggcaaatggttttggttcccctgctttgaatgctccagcactggggtgtgggacactcatccctagagacagcccattctgggtttgacagttttgagcctttgaaaagtccttcctttcatccagtcaaacccgtttccctctacctctccagcctgcttggtgatattttcagctgttagaaatgacattgataggtgactgcttctgatatcrtcatgccataaatgaattcagacagatcttttctgtgtgattgaatgaaaaaatatgtataacctgatggtgtcaacgcagaatcgtaggcttttagggctggaaggmgtcagagattatgtgatgagctgccccttcccattttgtcatcagtgacactgagacctggagaaatcaagtaacttctccagagtcacacacatagctagtagcagaagcaggaccagaacctggtggacagactgtccacgcgaaggccacgtttctgtcctgagtgaggtagtgaagagagagacaaggtattggcgtatttcctgtggggcctgatagggagggaggtgwgaggggcacgagcagtctgagtgtcttgcaggagaccctgaggatgggtgcccctttgtctttccagatatksccaacaaagtcctcttggctctgttcacctgcgagatgctggtaaaaatgtacagcttgggcctccaagcatatttcgtctctcttttcaaccggtttgattgcttcgtggtgtgtggtggaatcactgagacgatcytggtggaactggaaatcatgtctcccctggggatctctgtgtttcggtgtgtgcgcctcttaagaatcttcaaagtgaccaggtaaggaaatgtgggtcccactgcaaatgttttatgaacatgaggcggcaaccagtcacatcyccgggcaggtgatgttctgctctgtcctgcatgggtgttctgagctgacaccctcatcttgacttataggcactggacttccctgagcaacttagtggcatccttattaaactccatgaagtccatcgcttcgctgttgcttctgctttttctcttcattatcatcttttccttgcttgggatgcagctgtttggcggcaagtttaattttgatgaaacgcaaaccaagcggagcacctttgacaatttccctcaagcacttctcacagtgttccaggtgagtcctccctccattccccraaaagcacttcgtgagcagcagctaaaactcctctgccttcttgtctgctcacactcaggaagacaaaaggactccatttttgttcatctctgccctaatcatagcctggtaaattttgtgccatttaagttattcgttctgcatcatcctccagctgtctatcttaagtgatgtaatttttttaaagacttctagctacattacaaaataataaaccaaaaaaaccgtttttcacactcaagctcttccaagaaaactttttgattgattttmtgaggtttctttgaaatagactctaaaattcttttctctttggtactttttgatggcaggccagttcataatcctagttataatagatttacacaagaagtgaattctcatgcctccatgctttggtgtgtagttggaggaatcagagtggtaggaactgtggcagccattggtcccttctgtcctcctcctgggatgcagtgaggacacaaagattctgagggtgcctgtcctgtggggcctctgcaggcagtagctgagaagggagcggtggttgcagagaggcaccgatggctctgctgctcagagcagcagcacatgctcccctgactctacgctgaggtgctcaaaaccctcctccttggacagggtctgatggagaagtttaaaagacccacctgtcctcattgcttttcctgtgtgatgtgagctgcagagccctgccagagaggaaaggcagcagacagctgggtcctgtggtggccctttccatgcccagctctctgctgtggatgagtcacttacccatttctgaagaaatccagagaccaaagggaatgatctggacaattctctcccacttggtcattttcaggtatatataatctgctgtaagccatagtattkttgtttgaattatacttaaattttggctgctgatcagtgattcttttttaaaaaaaaatttctttcagagaaactggtgtctttttttttttttttggtaatgcatgcatatggcacaaaattctaatgttacaaatgaataataattctcccagccagccacaaatttcctcttctaggaagcaaccaccattaaacagtttcttgtgaattcttagatctgcattttctgatagctacaactcagttaagctacctataggagactttccacagacaggagctcactgtacgtgctgttttgcatcttgcttttatcactttgagtgtcctcaagagccttcctgcttggtccataaaaggctgcccctcctttgaaacgctgcgtccatgcggtggtagatgtgccgttgttcatatgaccagtcccttgctgacaarcattgagttctgtctggtcttagcccacatacacagggctccagtaggtgaccctgaacacgcatcagagggcacatgtgttggctgtagatctgtgggataaactcccagagatggaattgctgctttagagggtgtgtccattttaaatgttgacacacgtgcccaagtgctctccttatggttgtattagctcattgtcttcacactgcccattgcctcactgcctctcccctcagtggagagcatgctttgggatgcccatcagttaggtgaaaatggcatttcattgtacttttaaaagatactgttcttatcaggagtgaggttgracgtcttttcctatgactcagagccatcagtagtgccttttctgtgaattactttatcttttcaaatcatttgcccatttttgtttggttgtgatccataacagtttaaattttaaaaatatctagttcagattgaagataaaggagctctgtctgtcgtcggaagatagcatttttttcattactgttcttattcatctgattctatttcatcatggattgaattatcaagtatgatcagtagagaagattaaatttcaggtcattggtgatatctactcttgaggtagttttgtaaatttacatgagacatttagaatttcctgcttytgtaatttcataggtataattatccatttccacagttgatggactatgtggaatgctatgcagcagttaaaagaatgagatgcaccttctgacacagagggtctccagagtatgttgttgaatgaaaaaacaagccagttgcagaaaactttgcatagcatgatatcctttatgtctgaaaactcagagaagacacctagtgcttgttttctttgtgtgtaaacgtgtttaaatctgtagttgaaggttccagagagacacagaaagagcatgctttctggggaagggactaaaactgggctggggtgtaatcaaaaagcacataaatcttggctgggtgaggtggctcatgcctgtaatcccagcactttgggaggctgaagtgggcggaacacttgaggtcaggagttcgagaccagcctggccaacgtgctgtaacactctctctactaaaaatataaaaattagccgagtgtggtggtggtcacctgtaatcccagctacttgaaaggctgaggcaggagagttgcttgaaccggggaggtggaggttgcagtgagctgagatcaagccactgcactccagcctggcaatagagcgagactccatctcaaaaacaaacaracacttaagtcttaataataaggttattttttttcactcaaagaattatctatttgtgtaattaaaaaacagtgttttagaaattccatgggataacagatggatttgttcagtgcaaactggactgtgaaaggcagcttaaaccagatctaggcagccaccgaggggctctaagagagcggctgcaatttgtgaatccacctgctggctgataccagtttggcttctcagatcctgacaggcgaagactggaatgctgtgatgtacgatggcatcatggcttacgggggcccatcctcttcaggaatgatcgtctgcatctacttcatcatcctcttcatttgtggtaactgtatccttcaagccgaccaggctttgttgttgccgtcgttatctsgttttgtttttcttcctctgcatttctctgtggtgatggtggtggtagtagttgtggcagggaggtaaatgcctttaccttattagctcaatatctgcttttcttccatgctgctgggggacagcgtcctgtaagcagaattccagagaggctttgagggatgcgctctggctaagagaagcaagcccagggaaggagcgtgagacagcacacatactggtcccagaggtcactcagtttggcatyatgtctcctgtacaggtcccgagggatggctgagcgcaaggccaggtggttctttatgttatcattattgggagcttaggcgtccatctgtgacttcctaagacccttcgtgactgatgagagccatctttgtggactgatctgtgctcccctgggctaatttcactttgctgatctgtccatctttgcggatcaagtgtccattggctagctgctaaatcatgctgcataacttctctctgccttactttaccccttttccctgtcgagaggcaccctctaatcctagacttctggaattggcccttagatctgtatttacctcattcagacccttcctgatcctatagcctttggttctcggtgttttatctccaggtcctccatgcctagcaccagacctggtacacagaggcctttaatgaatgtttgatgcatgaacgacgtacacactcatgatactacatctgggttttcacccttccattttaaaaggtcctaatctggattctgcttctaaggtggcccagatctctgtaggtgttttcttctttatcttgtctggctcactgataaattttcttcagtgtggtaacctcagtgcaaacctgcccccttttctacaaggacaatgctttgtgctataaggtattttataaaaaccccatctcaacacatatacatccttgtagtcccttgactcggctctaaggccccctccacaagagccacccctgccctgtctcccacccagagaaggttcttctacctctgagctccccctcagattttatccacgtctcttactgcctgtaggttcttctgtctactggatttttatttatttattattattattttatagaaggagtctcactctgtcacgcaggctggatggagtgcagtggtgcaatctcggctcactgcaacctccgcctcctgggttcaagtgattctcctgcctcagcctcctgagtagctgggattacatgtgtgcaccaccatgcccagctaatttttgcatttttagtagagatggggtttctccatgttaaccaggccggtctaaaactcctgacctcaggtgatccgcccgccttggcctcccaaagtgctgggattacaggtgtgagccactgcgcccggcctgtctactggaattttgagtgggcattcctccatctccctaactagatggataagcttcttgagtcaggaatctttttgtattcacatctctcaatagagtacrggatcttgcacatagttggcccttggtaaatgaaaggtcattattttctttttctgctgtcctatggttgactctttaggccacagcaacatcctggacttgaatctgcagagaagtattccctggtgcttgtctgtggttgcmtgttgttttctttatagcacatgccactgtatcagaggtgcttagggagctgcttatgctctgtcttccccaactagartagacattccagtgtgtggtgtttcttcctgtgccctcagcacccacaacagtgcctgacacattggaggtacttggtagatctttctggatgaattccagagcatgccactctttaggagggtctgagtaatgcctctcaatacagatgatggattttgctctggaaagttgttacaagcttgtaagatcttcctgtggctcatcactctggatttgctttccactacccaaaggagttgagtgtcatggcaagactagagagattattgtttcttcactgagatcatggagggaatactcagtacagctagtctcatcactagcccctgtccgagttaccattaccccaggcctagcagaggaatgctcatgttaccaagccatctccagcccaggactaattgcttcctgaggctcattgcagctccagttaaaaaataggccagcatgtcaaaggctttttgagtcttaatgtaattcacttacgtttctctcctctttaaaaccttgaatagattagtcaggcgtgctattccctcacagagatttcatcatctgttccttgttaggttatgttggtttacgtgttcagcaacccatccaagacaacaaattgcacagggcgtatgggacagtgctatgctgctcctgtctcggggtctctgggctcctgcagttttgcctgcagatggccgggcatcaggcagagagaagcatttgtcacagaagggggccttctcacttattgccctctcatccctgtgcttctcaaaaacatgcttcactgctagtgggtaagaaacaggcatcttctgatttaggagtcttgttcagaatacttgttaaaaacaaaaacattcaagaaagccatgtatacaacattagagtaagagtgaaaaaatatgataatttgttcagtcacctaaccttttattgtgttttttaactggaactgcaatgagcctcgggaagcaatttgtcctgggctggagagggcaaaaatcaagttcaggtacagtgatcaaagatcgagctgcagtgagactattcacaacagtccagcaccaggtggcagtaagtcagacacattatagtcagtcagtgtttgtggagtgaaggaatgaatgagttatctgtagactctgaaggttatttcaaaggagaaagtctcatactgtcttgtgcaagggcatcatcatttgaataacttgcaacctttgaagtggtctgttttggaaagcactcccctgaatatatatgttgtagttgtagtatgtgtttaaaaaaaaaacccaaactactttttaattataccatgtttatgttatagattgttttataaaatgtataacatagctatagatacgtagatgtttggacacacacacacacagagaaaggttgaaattagtgggttttcatgggttttagtgaatcttaattttacttctgtagactgtccttttacaggtttttacttttgttttgttttgttttgttttgttttgtttgaaaagcagggctctggtactctagttttgctgtgtgagtataacacttgggacggtcacttactaccagcttcccgggatgcagaggtgtgtggcgttgccattgttggccgcacgtagttgcatttagtagtgtgttgtgcccttaaaaagttgaaattagatattctactgaatgtcttcttggccatcgctgtagacaatttggctgatgctgaaagtctgaacactgctcagaaagaagaagcggaagaaaaggagaggaaaaagattgccaggtaaccctattttcccctgacgtgtttgtccaggggctgtgttgggagccctgcaacagttgcagcctgccaggcttacccccgcatcacggcagctgcagcccccgggttgctgctttgtggatcatggttgaccatgcactgcagaccaaaacggatggaatcttgggcagaagccaggctcttggctgtcatccctcggggctgagagtgggagtcacgtgtccccatgcttaaagaatcactgcagttaattttggtgtcataaaataaatgatgcattcaatgctgattagctctcagatgagaattttaataagatggtctgtgtaatgaatccatcgcattgagattaccaggaagctctgagtttgggttgtgctaggctcttgtggttagtgttgtttctaattaaattctgtccttcattggagcattattgattcagaatcctgattagcatttttatacagagtaacatggttatttggtttcttgtgctcttttctcttctctttagaaaagagagcctagaaaataaaaagaacaacaaaccagaagtcaaccagatagccaacagtgacaacaaggtatgtattctaagatgcttctcccctttttgtttcaaaatgatcctgttgatctccatacatgtaccatttacactgtggaagtgtcttgtgtatcattcttgtaatattttggtgtgaagaatatggcacaccatatagaccctggcttcccaggggggattctggttgaatttaggcagttagttgtgtttactgatatttcaccagaaaaccaatatgataaagaattgactagtttgaccacttatgttttctttattggaattgtgcartcagccctgacccgtggtcaggatcacgttagcatcttctgagtgggtatgaaaatcgcggatttttaatagatgtctgtttccagaggtaatcccaggatcaggtggcctcagggctatactgtaaaactgaatcccatttatgacagccctggttgttttgttctttctctgttcatcgagttgataaatgcttactgagtggctatcatgtrtcagacactgaggattcaggaatgaagaagacaggtccctgccttcatggggctcacagtctggcaggaagacaggagtatgagatgcattatcacatggtatgagtgaatgtgctggcacagggcaaggacagagccctgaatggtgctggctaaccacgactgggtcagggttcagccttcttctcacctgccctcaggccttctgtctgaagcagaatcaccatctggggacatctgcctgtccctgcacactcaaatacagatgcagctttggggaggaatccatgccctatgctggaccaccagggtgacttttcctctctgaagtgattttaagtcagtctcccctcctcccaagaygtctttgtcatcctaggttacaattgatgactatagagaagaggatgaagacaaggacccctatccgccttgcgatgtgccaggtatggtggcggaggccggagacgctggctttgctgtgtgtctttgctactgctctgtgaccacctgccgagtctgcggccagccagcccagcagcgtgcacwtgagctgctgaggccaccaaggccgtgggaccagttagctcgcctttttcccatggtcacaggcagaatgtrtcactcaaattccaggtgatggggagggaaagtgcaggtgggtcagggcagtcccagcttctgctgggagactggtccaggaggccccccggtgttagcgctcacctgacacttttatatttgactggcacatttattggctgatgtgggtgggactgtggagttgggagcctaggagctgattgagactgaaagtcccacacagtttctcaggctagtctgagcgaggaggttactggggaaacagccaggtgttgggaggttggcagtgagaatctcagcactgccacctttcatctgtggtcagatcttacgctggtgggaatctcatcattcccgcaaactaaacatgctcaccagayggggacacttctcagcaccccccacccctgcaacacacactcagtccatgttctgaaggagcaggagggttttgattcatgtaagcaggtagatgttgttaaagtttaagccaaatttgcatgtgaaattaagaataattcaaacccatatgtagtctttatttcatgcctataaaaaaagtatttcatttaaagtaggggaagaggaagaggaagaggaggaggatgaacctgaggttcctgccggaccccgtcctcgaaggatctcggagttgaacatgaaggaaaaaattgcccccatccctgaagggagcgctttcttcattcttagcaagaccaacccgtaaatactccccttctagtctctcacggctgcctcttgccagtgaccctacaggttgcttgagggtggctcgggtgggggtgaggggaagtggttcacagccctttctgaacctgagtgtccctggcgccctcacccaagtcccctccaacccctctctcctccactgttgctcttgccctcagctcatctcttcctagctgcctccttcccacaggggtgtggccaggtcctgggaggagctccattctaggttctcctccctgccttcacccctgcatggggacagcaatggggaaagccttgtccaccccagcatattccagctggagctcactgctctggtgttccatgcttcggccagccgtggaaatttttcctaatgagtggatcttctgttaggatgccttgtgggatgagaatttttgtgaccaaggtccgcatagcatcctcatcctcatagatcccccacttgattgatcagttttcccaattgagttttatctttgtaaagtcatattgcacagtgatattttatgggttgtaagtattcagttcagctctatgatagtctacttaaaatagcatttctcatgttaaaatgataaggtgctcacaaggaacagggtaatgactcacaagtactataagaggaagacgtttatttactagctagtttctaggttttaaatcatctggsactgagtggaatgccaggggaaataaatggctcctggaaaggtttctagaattgcagaagtagttcttggctgtcagagaacaactctttataattcattggccctagggagacacaggtgggaagcaaggcctgctggcatcctcagagatatgaagatgtgatggtagcttttacagctcaccactgtttgggtgttctttaaaaaaaaaaggttattaaactgatattgctgacacctacagccctttgtgtgtgtgtgtgtgtttgtgtgtgtgtgtgtgtgtgtgtgtatgtatgtatgtatgtatatgtatatatatatacatatacatatacatatatatatgtgtgtgtrtatatatatatatatatatatatatatatatgttgagggaatgcatttattttcacctaaagctacaaagcactcctgccctcactagcttggaagttctttcccagactcaactgctaaccaccttcaggtcctcaggggggtacgcccagcattaaataggcccaaaagggaggacttgaagtgaggggtcgccttacataaagttgactccagtttgaaagtggaaaaaatcttttccaaggaaaagctatctatctataatagtcttatagaatacaggaatacagataggtatatatacatatacacacgtatatactttagaatttaaacatatacatacatattttagatatacatatatacacacatatactttacaatttaaatatatgtgtatacatatatttatgtgtatgttttatatatatgttttatgtgtatacatatatgtacatatacatacataaatacatacatgtgtatatgtatatgtttaaattctaaagtcaaacattgagggtatggataaccagttgctaaccaggcgcagggcacattgaggacagcagcgaggttctgatggcccagagagccatcgtttgagcccaggtgtcaggcatgagccaccctccattgcttcacgagaccacaggacttggtgagaactctcatgccgggccatgagatccttgcatgttagcaaatgatgctccaaccttcactttctgaggactgcttgtgggtcaactccaaaatttaaaaaaataataataacatctattacaaaatctgcagacagccagagatgtcctgaagtctcagttactgcaggtcactataaatagtatgaccttgcacctgcargacaagcctgggattcatctcattctgtgtgaactgttgagggcaggcctggcctcagtttcctctctcagtcagggaagataaacagatgagtttcttgtcatagtggaaaaacttcagtgatgtagacctggatcgattctgcccctggtccttactagtgtcactttagaattctcttattaagcctcagtttccccatcttgaggaagacaacaagccccacttccaaggacttggcagagtggtctgtgtggcacccccagcacagaggtgacacaccacccacagtccacaggttgcctttggtgggcttcgagaggctgacggacaggttgctcaggtgtgccgggcagggtgcatgggcagcacagcagacagctgccctctgcctggcctcttgctgcagtggccccacactcttaaggacccagtgtgttccaccctatctgggactgtttccaagcagcggcttttccctgcaggatccgcgtaggctgccacaagctcatcaaccaccacatcttcaccaacctcatccttgtcttcatcatgctgagcagygctgccctggccgcagaggaccccatccgcagccactccttccggaacacggtaagtccccagggtggggctcgctctgggatagccctggcctctctcgggcagaggccactgtagagatgggagctgtggaggccctcaaggtgacagctagagtaggtctttccttcagctggggacgttggctgtttccggtttgtaagtgccagagagcttgtgttttagctgggtaaatctgaatggaatcattaacttagaacttcatcttaaatactctgcaggaacrgtcagtgaattcagggagcctgcttctccgcctctttgctccctgctgctgatatttaggtcctcctttccctccctgctcaggtttacactcacccctgttttgagattcatgcctcgtggaagcacacagcagggaggaagcagaattcaaaccaggcacaccacatgcccaggctgtcttgttcagggttggaggcaagatgcctatgtcgtgtagacttaaatacaccaagctgctaggctccacgactcaggagaaatacaagttagggagatgataggatgtcaagttgaggtgttcagtggagaagaacattaggccaggtgcactggctcacacctgtaattccagtgctttgggggatagagggggaggatcactgaaggacaggagttcaagactagcctgggcaacataatgagacctaatctgtacaaaaaataaaaaaaattagctgagcgtggtgtcacatacctgcagtcccagctrctcaggagactgagggaggaggatcgcttgggcccaggaggtcaaagctgcagcaagcaatgtttgcaccactgcactccagcctcagtgatacagtgagaccttgtctcaaagaaaaaaaaaagaatatataatgaatgttaaaaaatttcttctctgggaagatttattataaaatatgtgattatgttatatatttcacaagtatctccaaagaaagtgctgaccttggccccagatagccaatattaagtttgagtaacttcatgaagcagagtgcaccaggcagagccacttggacccttaagcatgttaacttagcggtttacartattacttttcattggtagaattaggaatatacaaagagttattaattggctgggcgtggtggcttatacgtataatcccagcattttgggaggccaagacagtagaatcgcttgagcccaggagttcaagactagtctaggcaacatagtgagaccccatctatataaaaatttaaaaattagccacacgtattggcacatgcctgtcccagctacttgggaggctgaggtgggaggattgcctgagcacaggaggctgagcctgaagtcagctgtgttcacaccactgtattccagcctgggtgacagagcaagaccctgtctctaaaaaaaaaaaaaaaacaaaaagaactctagattttggtgtggcagaggtggctatccagttagccctctgtatccatgggtttggcatccatggattcaaccaaccacagatagaaaatgtttgggggtggccaggcgtggtggctcacctgtaatcccagcactttgggaggccgaagtgggtggatcgcttgaggtcaggagtttgagaccagcctggccaacatggtggaaccccgtctctactaaaaataccaaaaattagccaggtgtggtggtgcacgcctgtagtcccgactactcgggaggctgaggtatgagcagtgagctgagatcgcaccactgcactccagcctgggcaacagagtaagtgagactctgtctcaaaaagaaaaaatattttgggggaaaaaatgtactgaatttgtgcagatttttttcttgtcatttcctaaataatttacatggcatttacttgaccttgggtatcttgggaaatctagagatgatctaaagtctacaggaggatgtgcatagattatatgcaaacactacaccattttatatcagagacttgagattttggggtctgagagagtcctgcaaccaatcccttatggatactgactgtactaagaaaacaagtcaagggaccgggagcagtggctcatgcctgtaatcccagtactttgggaggccaagacaggcagatcacttgaggtcaggagttcaagacctgcctggccaacatggcgaaaccccatctctactaaaaatacaaaaattagctgggtgtggtggtctgcacctgtaatcccagctatgcaggaggctgaggcaggagaatcgcttgaacccaggaggcggaggttgcagtgaactgagatcatgccattgcattccagcctctgcgacaagagcaaaactctgtctcaaaaaaacatacaaacaaaaatacaagcaagtcaagggttttctattagttagttttgtaactyagagatggtgcccgctgactgtgtctgtgttgtaaggaaacttgcacctaaattggctcttgcctcagcagccccaccttagctgtgcagcttactcggcactgaggaccattcaaaggcaagacggctagaagcagcagcctgttgactctcaggcctagatattatcgtgcagtttcaggttattaccaagaaacccgaccagcagagggaggctggcgagtgtgcaagcatcaggtgtccctggcttgctggtgggcacctttttctgagcaccaggttgttagagattttagggttaagacacacctgcagatctgtgcctccaggactctgttgrgacaaccaagcctcatgctgttgcttcccatttctggagcctggcaagccctacctatcagatttatgaaacacgcactccgatatgaagagaaaaagtgctttccccatggtgcgtgttagtgtcaatataaagaggaaggcactgggcctgtcttgatttgtcctcacagattarggtttttgttagagagggtttagttgctctagatgccccaatagaagaaagacctctgtgtcatttcattccatcataaaaaaaggacacaagggcagtgtttggaaaaaaacagcattaggtgacaaactaggccaggagctagtctaggattcgcattgacaagggattaatttacatgggggtttcatgtcttatttttaattataactgcttctccataagtttatttccctgctgccttacccaaaaatgttaccgttctgcttaaatagatgtacatatgtgtatgagtattgctttttagattctgcagtgttttgtatgttttttaaccttagccgaattcttagtttaaaaaagagagcgagagaatgcaagcagagtgagggaaaaaaacagcttaaatttcaacttcagccctggcgccaggttgccttgtagacttgtgggctgcagtgtctttctgggctactagatgctttccatgttaatattcccactgtgacctaggaaggagtaaggaaaagttggctgaggcctggcagtgcacgggaagacaccttccatagcctggccaagaaactccattacacagaagtggtcccacagaattcataagtccaaaaccagaaacagtttggaaartgaataccctctgaagagagagactgggcttgaaacagaggtcctcgcattattgtgacacagcccccaggcgactcctctacctmcaacagctcacccctgtgactcttcgctggcatacgccaggcctactccttgctctgcagtgcctgtgactagctgcgtggcctrtgcgtgtgtccactccctgctcccagcagccacatctgttaaaggattaggcctgggtggtctccacagtcccttctagctctggtctcttcagttctttcaaaaccatagatcatagttgtcatgaagatcagtggccaagaccaactcgcctttgcagataagggtgctacggtcagaagctccyggtgagcagctttcctggtggtcagacttcttgctgctggcccacttgcctccayggctccgaggagaagcagggaccccagaaagggctagcaggactctgctgatgggataatagatggtattgtcaccaatgaggatagagttgcctggactgaaaattcaaagaccargtcagtctgttawttgagtgggcccagcaaggttttttaaaaaaaaccctgagtttagagagagcagtgtgagatgcagaacaacgggcaggagtgctggagaccaccaatgcaggagtctgtaaaaccatcccttgcagacttagccagcccagcgcatgagcagggaagggtgctgacgccctgattacacaggctggaatgcgagggggcatatggaagctactggctccgacagatgccgctgccatcttcatttatgcttctccaccaatctgatgctcagatggagggcaacatacttcattcagccagaaacgcggttaaaaatcgaaaatgtgtataagcctctaatttatttggtgccacaagtcgtttgtagatgtagcactctctgatgagaaaagcttgttaacaaagcactcttagaaatgagcctctctgcctgtccaagacacaagactgggaagcaagtcggtgagtggttaaaggaggtcaggattctcaaacgctctttgggaatgatgtaattgaccaaagtgggcattcacccgtggctctgcacttaccttcagaatggcagggttttcctggagggatgggtctctgactggatcgggggtttctgcctgtaagcatgcagatgtcagagtttgtctgaattccttttctcactcccacatgttgtgccttgcagatactgggttactttgactatgccttcacagccatctttactgttgagatcctgttgaaggtaatgaattttccttgatcttcacatactccacagcagctggagcaataatagttgcacttctttgtttgccttccagatgctaggttacgcagactatgtcttcactggtacttttgcatttgagatcattttaaaggtaacaggttacccggcagtgtgtttaagggctgctcctgcgtgtgacacacaggaaagaagcgtggagtgcttttgattttttatgggttttttttttgtctttcgtggttgagctaagttttttttttttgttttttaaaccgaaggatttttttttcctgtgaccattccaacttgtttttgctctttttaacctttgaatgcatgtaggagccactctggcttcatgatagtggttgagaattacattttgctcatttaaaaaaaataccctctgtaatttgtcaactgataacacatatatctctatgtgtgaacttttttccaccctttctgacatcaaagtcagaggaaaagcatttatcctatgaagaggatgtctctctttttgtttctctgactgcattatgcttttggggacctaaaatagtaacacactattttcttgcaataggatttgcaagatgacttgggtctatttgtgttaaggtattttctgtctgttttaatggatgggcttacatttacacaaaaggagcgccctttggccggggtgacctaaatgtactgcccatgcatgagctaatggctgccattgctgcttgtggtttgtggactgactgtgaagtctgccccatggggagcccattccttatgtgcttagagtgctggagaccacagcagagctccaagaacctatccaaaactggccaagaaccacagggcgtgggtcattgtggttctgggagaacgtggcccatcagaactgtcagggcaaccatctcctagcaggaagacaagctgggaaatgaagacttttaaccatggttttctttaagccattggggaatttttgtgtgtgcaattcaggcaaaatgtattttgcatcggactactgtggaacttgggctctttacaaaatcttatataaaatgaaacytcaattaatatggtcagggaatgaggtggttagttttttgaggttggtttttttatttttttattttttggttcatgaaacagcataaagccaaccaacaactgtttacccctttcttaaaagtcttctaaaaatgtgagttcattttcctgcctttaagccgatgaatttggttgacacttctcctaagtcagaggtgtgcagtgggatggtgaccagctcttgttgatgaggcctctgtgggagggcctgtggatgcagaatgcacagtggtggsggtcggagggatgcygccagaacactcaccggctcagcttctgcctcagcttcttggttttagaatttgacttcttttcaaagtgaatggggagctgttctacttagtctgttagcctggttaattgaggttttattttactctccacattttttagttgttaaatgaatatagttacccttgggctttggggaaaattagacacaggattatttaaaaggaaaaaaatgattgttactttttaatttckgtagaattgcttcaccgacttaaatcttctgagtcattcttcattttgaaggtattttagagaatggaaaataagctaaaacaagaaggattcagaaaatggagactcaccaagaagtgtctaatatctgagacgatggttcctggtggccttggggacatttggaaggctstttggttatttgcttaagccctatgaaattgccatttttgtaggtcaaaaagggttgaacactggcgatttcataaggttcaatgtaatatttcccacctctacctstcttatactgtacttacctgagccttctccaaccttttttgttttaaaataaatagtgagctgtatatattttgctatttttactttggggaactaaactctttttccatcaccaatagaaatctcactgaagcacccataataggtgctccaggtacatgtggcaggtgagcacagagccgttgagactggctcaggtgagatgccacctggcttcctagccatgcctggcacgtgtcatcagacttggaggaattgcttaagatggatgcgtcattaaagaccattaggaacaataaggggcctctgtggaaaagtgaygtaggtccatagagcctgggagccctgaattcaagcccccactggaaaggcttaattgaaacaaggtaggctctaccagggcctcagaggggccagaaccagcrctttgtggggaagtgggctctccggacagcacttaccttttgacgaatgtagtcctgtggagcctctcttagacaggctctttggacatgccaacagtgtattcatacttgaaacctgtgatcactgtaataaagcctaaattggtttcttcttttaaaatgtatccaaaataagctgsccctttttgattttkgtttgaagaaattatcctgtggctcaaccccgttggtttacatttctgacttcttaatgcacacttgttaatgaagttatactttcctcaagattttgcaaagagcccaggtttcttttcctytggagacaaaaaatggtaaatcatccatgattctgcttctagatgacaacttttggagctttcctccacaaaggggccttctgcaggaactacttcaatttgctggatatgctggtggttggggtgtctctggtgtcatttgggattcagtaagtattctggggtgtgtgcccagaattgytgggctgaatggtttatgtaagggattttaacataattgataaaggctgggcatcattttcatgattatatttagttatataggtttatttaatttgctcccattccagaaagatttaaacaattcatgttttcttgtgtgtgtgtgtttttttctttttgtgcctgctgctaagttgagcttattactgtctgtgaaatttgctttcaactgaggtgaaagaagtgttgactaggagggagggaatctaggttctagtcctggttcctccaaaggctgattccagggccttgagggcatcctctctcaggaaccctgtgccccttttatataggaggggctgggrccaggtggcctttcagtttttccagcttagatattgagaacttcctttgattttcaggatatagaacctgctaggactttttctttggcctcaaaatttttcagctaggagggagccaaggctgaaagtcagggccccaggtcttttccatggcatttagcgatttctggtgggaacagccattgctgagtactgcttaccatccccaggggtgtggggcagaggctccagtagagcatcaggtgtggccttgctttcttgctggcctgtgagcacttctgttcaggtgctgagcatagaatctccyctgtatgagcacacatgcacacacctgccctctaagctaaagagaagtggaaaggacctgccctcctaggaagaccaaaaacctctgcttggaacagccctttgtgttatccttctcgcctgccactgagggaaccctgtgatcatagcttggaaggccatttgcattaacatctttgcagctcctattaactcccaggctgttcatgtccaagctgcagccttgcccacttcctcctgagcatgtgttctggccacactcagccacctagggtaaagcagaaagctgcattctcttgtgtcgcatctttgtacatgctgctccctcacactggagcccccctccctattgtcctcgctaacccctactcctcctttgggactcacctggctatcaccacccccaccccagagtccttcccaggctccccctgccccacccccacaggttgtgctcccctggctgagcacaccacatttaccccygtcatgtgccacactgggttgggattgcccatctctccaccagactgtgagctccttgaaggccagagaagccctggtaccaaagtgctacagcagacctccaaccttaaacaaaaacaaatgatatatgaagcctaaaagccagctactacctagtatttacagtgagtggaaagaacaaagagagttcgtgagttgtgtctctgccaaggttagctgtgcacctgtcagcctctgtgagtgccatgggctgggcttgggaggtgctgcctcgtgtgggcggggaggagaagtcgcctctgagtcrtgaagagagatcagctcagcaccacatggatcccacgctaactgtgcagggatactaaagtgaagatccagtgaaagggtgaatctcaaagcatcctgtccatttataacacgctctgcctgccgtctttctgctccttccctagatccagtgccatctccgttgtgaagattctgagggtcttaagggtcctgcgtcccctcagggccatcaacagagcaaaaggacttaaggttttgattcctctcctccckgctgggctggcttgggttggggttggctgtaattactggctcttctgggcagagctgagctgaggcctgatggatttttaaagtgagttataaggacctttctaaccaattcagccacctgtgccaagtgctaatggcattttaaaaattattatttattgtctttatttttggtaattgaagatatttttctttgtaattattgttcatttattacctttttattagtagttctttgtgtttattttagtcttttatttagtttatttagtctttcagttttcatgtagactgtataaaaggctactgggtttctgttttcctgagtcatttatggggtggggaccctttgggcccatgtgccaggcagcactgcacctgtagcatttcttctttttttttttttctttgaaacggagtcttgctctgttgcccaggctagagtgcagtggtgtgatctcggctcactacaacctctgcctcctggggtcaagcaattcccctgcctcagcctcctcagtagctgggattacaggtgcacaccaccacgcccagctaatttttgtatttttagtacagatggggtttcaccatgttggccaggctggtctcaaactcctgacctcaagtgatctgcccacttctgcctcccaaagtgctgggattagaggtgtgagccactgtgcctggccaacacagaaactstcggctgatgttagctcacctcaaggccaaaatcacaaagaagagtcacgcccctctgccctctccgcagcacgtggtccagtgcgtcttcgtggccatccggaccatcggcaacatcatgatcgtcacyaccctcctgcagttcatgtttgcctgtatcggggtccagttgttcaaggtagaggaactgcctccragcataaaactcaggtggatttctttaaggagaagcctgcatttacttractgcctgtctattttatacccaggggaagttctatcgctgtacggatgaagccaaaagtaaccctgaagaatgcaggtgagcgtcctgagagtggagtaggggacttagaagagcaaatagcagacttcaaggattcacacatgttggcacgtcagaagttttggtcgtgaaataaaataggcctgtgtgctcagcttgtgggtagatagatggtgtttgtttttcattgaggtgaaattcacgtaacatcaacyrttttcagtatacagttccttagcatatagtatccatgrcattgttgtgcaaccaacatctctatctagttgcaaactttttgtcatcccaaaagaatggctagatggcttttgtggtggagaatctataaatgaygggagttgggggaaccctgaaataacaattatgaaatgccccaaatagcttccatgacagccatgtggatgatttccccaaatcagaatttggaactcaactccctggtgtttgggaactggctccctcttcttatacactttctagacttcctctctcctggctcctattacctacatcttggccatatttccatagacaagaaytggcagaggagagacaaggtgggagatattcatgcctcccattccaggatgtccagtgaccatgaaggcagtcatggaagccattgcctaaagtttcagactgtgcagaggcctgtgtctccccacccgcgagagacataactgactgggctctggctgactgtgcctgtacattggtttggggtttattttaagcagaaggtgcagtcagagagcaccaattgcaatttggctgtgtytctgcacctccagaggcaccgttcacacaccgttcatggcgtccctggaggtgagcagcctggcattggcstgaggacactgtttcttccctcttgaagcctctgtgtcttcatttgtaaaataaagatattgcgctttatctcttgggttccttccagaaatgaagttctgggagaaataatttgccagaaataatgcaattctttcggaaagaaaattgggaatgtcattagtaagaagagaaagggatttgattaaaactaaaatgcaggaagagtatacgtgggttygtttcctagagcctacagagttctctatggctgagctttgatccttcagagcgcgcctcaagcccattgtgtaagagatgcwctcaccatgctgtggtttttatcggccaacgacrtatgcccggtgtctgggtggctgctctggagaatacacgttgcactggtagttattcaatggttatttgagccgcgaagtagattaaatggagggcgaggagaggagaaacggcgccggtgttatgctcagctgtgtgacaggcgggcggactgagtgtgacctgcctggaggttggattggggcagtgtgtccaactttacgctgcttccacctgtcatgtgtgaagccagacgacccacacctgttttcctctccaggggacttttcatcctctacaaggatggggatgttgacagtcctgtggtccgtgaacggatctggcaaaacagtgatttcaacttcgacaacgtcctctctgctatgatggcrctcttcacagtctccacgtttgagggctggcctgcgtaagtacagggagcacacagtcttctggagaggcacctgcgtgcccagggctgagccctccctcctggagtcagtcccatttctgttctccagtgtcgcaggattgccctgtggctttttaaccttgggccacttctcagtcacttcttgacccacagggcctctttctgtgtaggtggatgatttgtgaagcagggttggtagaggtgcctggcagcatctctgggtggaagcagggaggcctgagatgcctcagtcccrtgaactcccattggatgtcaggaaagctgccatccgctgctcccaaagagggtctgaatggtgtcccaaaccattcattcattcattcattcattcattcattctaatatattcccagttgcggacagttgctgttatgccatctcttttactgagcacctgctcgctcatttacagaccatgctgtgcagaggcttgtgtctccccacccgttaraaatgtctaactgggctctggctgactgcgtgcttagataccagctctgtgcaacatggcatgttaggcactgtggaggaaacagtgtctaaacatgcttcctctcctcaagcccaaatcaaatcagtgtcaagtggtcaaaccaggcaggtggtctggtgtgtcctagatgtgcagaacagrgtcctgaagaatggctaagatgttgatgggtaaagtaagaagagcaggtaaggagaagttagaatttgaaagggagaatcctctgtgctttcgtgttgctctttgcttctggagctcccacccccagctcctgccatcagtgtgcaaacacacctagagtcctggatacccggtccccatgcatagatgagctgcaggaggtgggcaggctggggctcgcaggccagcagagttcttggggtgtgtgtaagagtcagatattttcaggagctcctgtaggataaagagacagtcaggtggggcttgttcattagggatttaatcctgggagaacagaggcatggagtaaggcccttcactgtgtgcaggcacaggctatagtgtcaggctttgaacactgtacttgagcaaatcatggtggcagctgaggagaaaggagcaaacctgggactcggggcttggaggaactggctcaactcctggctctgcccccaaggagtgtgactgtggcactttgatacctccctgaatattcctatgatggggatgatagtaatgtctgccttcccagatggatgtgaggattaagggagaggctgtgaaagtgtctcgggaagcctatgcatgggctgggtgccccagaagtgttgaatctgcatcagaatggggatcaatggaccccaagggtgttacagtaatccccctcttcctgttaagagttccgctaggcatagctttaattttagtgcatatctctgtttggggaagcacccttagttctttggaactactctggttggtcacttactgtcttgccagtgtgcatagttttcacttcctccagtgtcttacacgtgatattcttcctctctgaatagaaaggagtgttttaggatatttgtgaaatcttttgattttcagttcctcagaacagtccctcgatgatgatatcctgggtgccccctcctcttagtgctggctgtttgggcctgaggctgatgggagagacctggttgtgtccagcagccttggggtgggttcccagcgagtgctcatgagaggagttctggagagggaggacctgggaaggcagcgggctgggccgtgtgggctggggggcttggcaggtcctcacttggtttttctctctctaggttgctgtataaagccatcgactcgaatggagagaacatcggcccaatctacaaccaccgcgtggagatctccatcttcttcatcatctacatcatcattgtagctttcttcatgatgaacatctttgtgggctttgtcatcgttacatttcaggaacaaggagaaaaagagtataagaactgtgagctggacaaaaatcaggttaaagtcacacactgttttggcttctgtcccttggtcaggagcggagtgccttctttattgactgatttcccccatacccagagaagggcacccacatactgtctgtccctggggctagggccctgttctaagcacaccctcagcccatttgagtcatcactgctgagcgttaggtttcccgatacatatgagactttrtaattatgaaatccatcgccagacctggtggtatgaaatcagagagtgcttacgccacctgccatggtcatgacccactagtgatgkmtcagaatcttagttggggtgctgtggccactcacacagacattcacagtccctactgggagatggtctttaaagccacttagggcagtttcttacccttggtgctattagcatttcagtctgggatgattcttggttgtgtttcctgggctttttaggctgtttagcagcatccgtggcttccagctgttagatgccaatggttcgtcttcccctggtagcagtaaccaaaatgtctccagacattgccaagtgtcctttggggggcaaagctgccccttgttgagaactgctgaccgaggggggaataccctgcatcaccccagggaagtcagtaactttgaatttgggactaagattgtattggcatcattcttgatctgacaccgtgttttagccagtctggtagaagtaggagccttttgctcgggtgacgtggtgaggagagggagccctgtgctctgggctatcttcctacacctgcactgtgaccctaggtgccctctgatccctgctggggcttgatccctcatctctaaatcgagggcattaaggagctgctctttagagattccttgcagccctgaaagagtctacaagatcgagattcttttctgggagtttccccgggtcctctatcagtagcatctctgttttgatgacgacgtcgcaagcaagaatgatctggtagcctaggcttcctcagaggaagtggcccrggcacggcaagccaaccatagctggctgtacccactgggaaatgtgagaacatgccggtttgtgtttgcaggaagattttcctttgagttgtcagggtgtccctgtagactccaccagtgattgtcagggagaggtctggcccagcaatttgctcacccaaggaagaggagtgtcagagcaaggccaggycagccacgcagagccagcgctgaaagtgtgtcagcctctgaggtccagcacaggcttgaattgggggtccctggagtgagcatgtgaggtcagagcagcgccgggtcccagacactgggaacctgtccgaagcctgcacccagagtcaaagcaggagagcgggggtaggtctaggctctcaatgctgagctgagggctcttggggctagaggttccctctgggcctgctgcagagggtggaccagccccactacccagagtaagtgagaaagtgctccagctgggtcccaacctgtgttcaatccaattgtcactacagtgctccagctgggccctaaactgcgtccaatcaatccagctgtcgctacagtgctccagctgggccccaacctgtgttcaatccagctgtcactactgaccacatcctagggattctgaaatgaacacaacaagctccccagcccagaagctccccgatggacatgtggatagctccccataagatgtgtattgttaacacactctggctcctgaagggtatctcatgtggttccaactgggagcatccaggaggctactagtcttggggaatgagccagcccctctcgttcttgtgagtttctgtggttacttggcctcctttcctggaggacagcacaggcaggggaactataggtgtgatccacctatagatcccccgtatgtgtgayaaagaggaaaggcagtgataaggcctggacccagtcctcactcctgcttgtgtatacactgcagggcctcaggaaagacagctaaaagctctgagcctcagtttttagtaagcaaaatggaagccacatgggtaggyacccagcttacccggagcttgctgggagggtcagcgaaggtaatggaggcagggccctcggtgactcaagagtggtgccagcagcaggaagggggtcactcgtaatcattttcaccatcgtccacggccccttcccgggagctgtagggtgagctctttcagagcagatgaccacggggtcctccttccctgcaagtgctcagaaccccrtttctgcccttttctgctgttgcagcgtcagtgtgttgaatacgccttgaaagcacgtcccttgcggagatacatccccaaaaacccctaccagtacaagttctggtacgtggtgaactcttcgcctttcgaatacatgatgtttgtcctcatcatgctcaacacactctgcttggccatgcaggtaaaaatggagacagccgtggggatcaggtccgggcattccgcacagccccgtgccccaaatgctgagggtggaatgctgcscctcacaggaggggtttgatttttctgatgagtctgggctataggttggccagagttctgttctggctgacagttgtcacggtaggagtttaagatagttcttttgttgaagaaattatcygtacagcatgatggtaggtaacatttccatggagcctggcattggtgctcaattctgtaaacatttaccatgggcctcctgtggccagctagtggttgagaactacagctctggagatacacagctgtttcaatcctgattttactctgaattttttgtgacttggggaaagttgtttaaattccccgaggcttgatttctttatcagtaaaatggggaaatctgtcacacctacgttagagataaggtttatgctgtagataattcccctcagacactttgttttttattttttgccttttgtttttgaggcagtctcactctgtagcccaggctggagtgcagtagcgcgatctcggctcactgcaacctccgcctcctgggttcaagtgattctcatgcctcagcattctgagtagctacgattacaggcatatgccaccatgcccagctaattttgtatttttagtagagacagggtttcaccacgttggccaggctggtcccgaactcgtgacctcaggtgatccgttgcctcagcctcccaaagtgctggtattacaggcgtgagccaccgcgcccggcacctttggacactttgatctgggcctgtcacagagtaacactcaatgttggaaaacaaaacataagtcacactcctgtcctcaggtggctctcagcatggcagtagggaattttccagttgatgaagtgttgagtttgacctgagttacagctacttcttattccagtgggggcaagaaatgcaattgagtttaattggccaagtcagattatagtatggtattaacagcgaatgttttcaaaagttacattgcctagtagatactctacgaggacaggaagcaaagaccaaggtctagagccagcttttgcactgactttaagaactccagcacatcaaaccagctctcagtgctgtctggacagtaggtctaaagatagggataaattttctggcatttttcttaacctaagagttctttttgaatgaaaaggactgtgtgctgacgtagaagaaagtgtaaaatcaagaaaacactgccttttattcaacataaacttacatggcataaaatttatccctaaccaaattctacctctattcatagacattttggtggtatctgcattgtgctctggtcaaggccctcaacataaagccctgccagaagaaagggtgaattccctttatcctgagcagaggaaatggatatgttttcccccttcatcattcaatcatcctcatcttgtcacagaccctcctgcactttgtgggagttcaccacatgaccttgcaatgccggtggaattgcccagcgagggtgctgggctgtggaggatgcccacaggggcacagagggctgggagcctccatgtgcaagcatgtgagatcgtggctgaggctctgagaacggtccctctgtcttcatccatagcactacgagcagtccaagatgttcaatgatgccatggacattctgaacatggtcttcaccggggtgttcaccgtcgagatggttttgaaagtcatcgcatttaagcctaaggtgarttgcagaacccacttttcaaaggttgttgctgagtcaccctagagaagtacccgyttcctgttagtcttgtgttactgaattatgctaaagtgttctggccgctaactgggttaccacctgagaacattaaaatctgattagagcatgtgtgtatatatgggaaaatgaatctgcaagaacaaaacctcatgaaaacaattctgagaaacagaagcagggagattagaattgggaatttgtaaactgcagattattttgaaagccagttttctgtttctagaatagtacatatcatgctgtgtcagggaaacctgcctcattacttgagcactagagaaaatgtttgaacataacccatcagaaagaatttgaccctgattatactttcagatatctagtctaaagactttgttttgtttgttcttggtctgcagcatcctttttaccctttaagggaagtgctgataccagctgcagacctctcacagccataccatcttttgtttgcttaatttagaaaaatttcacttgactttaacacaaaatgagacatgaaatgtgttcaactgtgctcgacgactcagcgtgttgtacccctttgggagggagtgaattcagttccccacttgtcagtggctgccagatgaggggcagtgtagttcagtgtcaaattgcatagttgtggaactggactggattcaaatctctactctggcacttacagctgaaacaagttcctttcttccctgcgcctcgacttcctcacccataaaatgaggacgctaatagtgctgtttcatggggttgtcatgaggagtaaagagttcccatatacgcactgcttaacagagtgcctggcatgtagcgccacgctgcggactgtcggccactgctgttcctacccgcaccaccaccctcatcatcatcaagcaaggatgttccctcattctaaaagcctagacagaagagccacaccaagctgaaatgtgggatatttggccctcattttctttcccagtacagccaaaaactctcagagttagagatgacagagttcagtgacccagttagttatctctgtgtaaggtatctgacgacactgatttaattaagttaggcatggattatgaaatggatggtttcacatactccatagttacatgaaattctaattccaaactgttcctttctttaatttgaattaatctctatgcaatctttatcagatctttgtggaccaaaaagaaaggacatttgtaagtgattaattggggtgattgcagtggggtcaaatttggcacctaatncatggccagatgttattatctactgtgacttgtccatatctacatacataaacatttcctccttttccaaattcatcttaatttcctttgagattttggtttgcttccctctcacctttacttctttgaacaatatttgtctggactganggaaaaggttgcaaagtaagaacatcgaaggtacttgagaaatgcaacatggaacctctctgtggaacatttcccagatacctgggccatgtcttcccttgccagatgattaagctctgaagtttttgaaagcttgctctaggctgaagagaaagcacactcacccatggtgtgtatgtgtgtgtgtcagtgtgtgtgtgtgcacatgcgtgtgtgttcatgtgtgtgcttgctcccttcagccggccagtgcattgacagcccagtagtgcactgcccagtaggctgacagttgcccagaagatctccaaacctgggaggagagttcagtagcgcgtgaacagataggcgataccaaagggaagtgagtagctaagctataatcagtactgatagatcggagtttttaaatggttgatttctgctggaaattgtactgcttgtagtttcactcagcaagatatcttcatagcattagacaacctcacgttacaattgggagaacttttaagacagtagcagcagcatctccacacttgaagagcactgtcactgcgttccccccggccaggggaggttgagtttatatcgtgtgccgggatgagtgggagagtatcggttcaccaagaagcaatgccctccttaaaatttttcctgccctttttttcttgctcttctctttggtgttcacaagcccagcccgagcaagtggtctttcacaaagaagccagggaggcctcctccctcctggtcggtggggtagtcgggctgaagaacaaggttgtcaaggctgcagaaggaggaatattctgaggagatggccacatgggacctcagcctcctctcaggagagcctttgtctyatgggaggagctttgtaacagggtccctcatggcagagttctccactgagtcaggtacaccttctagcaggactcgtcagtatctctgttaggggacacaggctggcagagtttcagttgcttcataaaataagtatagaaagtgaggtaagacaaaattcttactggtaggtgagaaggcatttcaagagggaacggttaaagaaagttgagaaatctgaccttaaggacttattttatrtaagggagcttgatggagaaactgggcctcctaagagagtatatttagagggaaatggcccaaggtcatgggagatgagatgacccagcctctgccaacccagagggaggtgggaagtagacagagggagaaractccgagctggaagcctccatgatggaagaggccatctcacctcaggggaggaggcattttggagcactggtcaggcaagaktggaaggtagttaggagccgaagcgcaaaagcatccgggaaaagcaagcaggtgatttagccgattgtgggttcccgaagggaaagttcaccagctgggtgttgacctggtgcagcctaggtcctgctttcaacttggggtcaactagacctctgtagggttttcaaaagcaggccctagtttaggtgacacaagccccattctccaagcctttccctccagctgctagaattctccaacaagttctcttgctccaaggaggaagattgattaagaagggcctttttcaaagtgctggctgcagcaggtatagagagcacttctgtggagtaagaagagcctggtctgtctgggattctctttgtgggatgttacccatctggcgttttgtccaggctgcattctaggccatgttgtttgctgcggttactggccttctccagtgagccatacttygttcccatcttagtcctttaaagtgttttgatcttgattctaccctgaaaatatactaatttatactcctagctacttgggctggaaaaagtaaggagaaattaggtttggggaaagaagaaagtgttttggtgctgtcctcatgctgctgtgcagagctgatgcagaatgggcactgagtcctcatctgccttcaagggctctgttcgctgctccagggtcccttgcaagagtagagcttcttcatgatcttcctagagtaccttttccacctgctggagagaaaatttgacactgtttttttttcagttcttcatgaccccatctgttctagatttacttttaatggcaaataatacttgaaaccaagtattactgtccttagaactttacattgggcttcttgttgggctccatcctgtccttttgacattgaggtttcccagagccctctcctggtccccttcttgcctggtaagatgcatacatgccagagcgtcagtggccrcctctgtggcatgcagacctgcactgcccttctctctcctgagcttctaygcctccctgccttcaaaatgatctccctgcctctggcctcagcccttctacctactccctttgtaagcccaaagctgaccagaccactcttgcagtgatattttggcactggccacctattgcttgagaaagcatatacaattttcttagtcgaatattcaaagtcctccatgaagcactggcccctgtatatttctgcctcatttcctgccattccctccctgctatttcttcgtccccaccccatccccargtgttggcatgctagacctttccctgcccatgcgcctctgtctagataccctgcttcctctttgttatccttgaaggcctgtgggaaatgttatcttctctgagacagcatcctcaccccagccagagccagccctgtcctctgctcatgcatccgttgggggcctactatgcaccatcgttaccaacwctactccatgtctgcctctctgtttgttggtgagcagctgcttgaggtctcaggctgagtcttctgcttctggctctgtggtacctcacatgatgcctggtggtagcttcctggtggtagctcagtaagattggtggaatgaagaaaggaataaagggatgatcctggaagtgcagcctctgggcatgagacgatacctgcttttctgtcgcagggtatctgggtagagcagagtggagcacatcttcccttaattccccgcttacctttggaaaggcttttgctagttagaaagctgtcaggcatagtttctaccaaaagttggcactttgggttatcacttgggtcaaatgctacccaaataatccctgccagcatgggtaagagatctggctgccatgatcaatgacaaaaggcacattatttatataggcttctaccgatctgcagatgggagtgaatccaggcagcaaaaggaatctgaacttgggtcacttttcttgtttcccatttgcaaccgttccacaaacattgcccccttaccatgtgcaacgcctgtgccatatcctggcaagagggccaggaataagagatgtgccttccaggagcccactgtccagcaggagacaaacattgatggatggtgacaatagggttcttagacatagtggtgcttcctgaccctgaggcccacattagtctggtttatgattttaaatttccagagtcagaaatgtttctgcgcaatacatattgcatgtggctgacttgtttggtcttttcagacaggtagagctggacacaaaaataatatagatttgactgctggttccacttgagaggttctggcctcagaattcagttgtaggagaacacatcatcataggccaagaggagagagcagggagaggggccctctgttaggagccgtgtcatttcttrtatcttatcttctggttacaaaggcaatatggtgcctttggtgggagaagggtgggggaactgagtcatgccacttgacggtgattttattaaacaagaggctactaaatagggaaacagtatgtgggaagaatgggagggctgacattttctccctcccctggactcctgtcagagccacctggtcagagcctgtgatttcagccacctgccttctgcttcctagattaagggtgtcaaccttcagtccatcaatcattccaatttgggcacagttttatgagtgtgaggggtttctggagagagagtcaatgaaattgccaaaaaattccaagaccccaaggaaatattaagcccctattgtgttgatttaaacggattttatccatcacagtgcaccagcattgagaatatcttataggctgatggaaatggcctgaaggggagaacactgataattctggagagagggagagaggagctgttcaggaataaaatctcaaagtcagaggctggcctccagcacccatgtggtgggtttggcctttgggaaatgacataaataatggagagaagcggcgcacacggtacaaatgcaggcggggctggggcacgcaccacagcaggtgcgaagggcgaacgctgggtctcctccgccttgtcagtactctggaggtctagttgctacttgtgaccaagtttttgatcaaggtgtaaattccttcctagaggggaggggaaggatcactgtgctttctttagcttttgagttactcttaactccatgaagaaaagggcaggctctgcccctccaagtgtggtctgtggcactgccaccagtcagagaactgcttgttatccattcgcaacaagagctgtcagctctaacactaagcacattgattcagctggctttcttgttaggagacttcttggacgaaggaaactgctgtgttcccttacaacctgaggctagctcttgatctcacctctgactgctagtctagacctcaaaggcagcccatctctgctcagttttgccagccaagaatcatgaattcatgcaaaggaaagctagaaagcataagctgtgctgtttttaaaatagcccttcccattagacttttatacatagatcatcagatttggggctcacaaattccttttgtctgctgatagatgggccagggagggtagcagtcagtgaggrtaaaatgggagagaggcactgtgatcatagggcggggagagaggtggagagttggttagaaaccacggcggttgggtgggggaatcttacattattaagattaaatttaagaagcaaacccgaagtcagtgtcgtagctcccccataaatgcacctagactgatggatggtgactagaataaacatccctactccagctgttaggacagtcagtacgtccacatcttctatactgtcgcaaaaggctgtggttctgcagtggcttcttctgggtctgtgtttgatcacaagtttctgggacctgacacctcaaagtactttttgttctggttttcttaatgcagcactaaatgtaccccgttgtaaacaggctgggccccattttatataatatgtacctgaattttcatttccaaaaagcgtccagactctttggaaaaacacagttggtttatagacagagctgttgatcttgacagtcagtccgttgcctctttggctgtctgtgcagtatctccccaccaccctctccaaccgggagcttcccaggggtgtcgagagaccacaggcactcatttagcacctgctgtgctgatgctggaagaagatgtaaaatgtccggcacatacatatagattttaagttacaattgtggggatgttgtaccctcaaaattgttgcaagatagcaggacctgaacaaacaaccagacaaagctggatgacaggcagggtgcaagttggtggacaaaggggacattgcacatgtcaagcactgactgggttcaaggctctggctagataatggggttagggaagttgggggactgaatatgcagcacagtcatcatccttcagggcttttgattggtagagctgcagacaaagaccccacattcagccatcagtacgtaagagattcagcgtcagcctgagggagtgcagacagccgggactgcgaaggttccatcagggaacatttatctgaccttgaagaagggtgaagttgaacagatggagttggggttaggcaattaggattgcagagacatcaggaggtggggaggaacctggtgctattttcgaaggatgggaaggactcctctcagcctagagggtgaaaagtgggagggaaagaaagcaaaagctgagatggaagaaggagcctattggcttctttgaaggacagagggagccctggaacatcctcttcattccatactcttttctactatagagcctgccttgacttccccacactaagcaccacccccatgacaaggagccagtgtctctgccacgacgctgtgcctcacggtgcctgtgtccccgtaagccattatctacccgtctgtgtcgtctacactgagagttctttgaagacagggacttgtctcagtcatcctgccacaaggcatggcctttgtaatacaggctggacttgcgaggactggagagcattgctggcccatttgaaggagcacagaaatggaaatgtgtgcaatacctggtgacagtgctctttaagtggggtgaatggagattctaaggaaggagtccatcagatcgtgagggtttgggatcatccctctgggtaccaggacaaggttgccaaaatgccttcctctgccctgtagatatcctgcttggtttggtgccactcaggaccgtgagtgtgtgtgtgtgtgtgtgtatgcacacgtgcgtgtgtgcgtgggcgtgcaccttctctcacacataaaggtgcacaaccaccctgctgtgcccctttccaccagtggacagtattgttacttcccctttggctttcccaccctacctgggtgccatgggtgcggcagggactcggattcgcccctatacggtccgtgtggtgggtcattcatacatgctcataaacatctgccctcgcctgctctgtccaggggtattttagtgacgcytggaacacgtttgactccctcatcgtaatcggcagcattatagacgtggccctcagcgaagcagacgtgagtatgcacctggcgtggccgccacctgtgtcctctctcctctgtctgtgcatactccgctccctgccctgcagtggcatcacctggacaagtcacagatcccagtcacttgatctgaaactaggatttcctaatgagagctgtaggcaagacgtgtttcagggtagagccttatcccagggccttttgtagacacaaatcaccttttggaggacaggccttyttgcagcatttaccctggtcactagtaggcaaggtaagataggatgtctctrattgttttcatttgctgtgtcagaagtgatacccacagtggcgtatctataacatgtttattttagggggatgtttcaagtcgccgtgtggcgcgatgctagaatgttccccttttgtaacactgtccttttcttcttttttcctgtggtgcttcctctcctctgtggcttctgaatgcttgccctaacagcactatttcactgatgcatggaacacttttgatgccttaattgttgttggtagcgtcgttgatattgctataactgaagtgaatgtaagtagcaaactttgtgtcctatatcatggttgttttcattamgtctgacatagaagagactagaggccctgcccttaaayctccacacactttagaaatccagacacaaatttattttgaaagactaaggataatttgtagwttcctctatctcaccccatctctatctccttcccctgaaaaagagtggggaagtctatgtagaattgccttttggaactagaatagtatttcaaaagatctaattaaagttataagggctgggagttaattgtgtgtccgtgtgaatgttgtcactcaccagtcgtgtgaccgtggaagtcatccgagtgctatgtgcctcagtctttccagctgtacatggagttactgatgtgcaccctcgtccccgcaatggttctgtgagggcacaggcaggagaccccacagcyagctatgccctgagcctgtggtggctgctgctggtgccctcacctgtaccgtgtctgctctgagtctgactggtgacactggtgaacgtcccacacccaaagggtgatgccagccagtggaaggctgcttggggccagggaaaagagggccgagtgcaaaccagggagagggtgtcagtccgcctttgttacatccagtagattcacttgagggggaacaagtgcagtagtggcattgtagatggagtgaaccactctccctagaagcactctgagcacctctccccctgcaaaattaagaagcgtgagaaagggagcccctccttctgcctggctccccttgggtctgacccatgctagaccggaaggcctcaggcaggcagaaagggccctgtctacctgatctgttcccagttcatcagcaagtcttagtgggcgtccagtgtgtgtgccgagcctgtgcagagcctttcgagagagtgggcggagcacggggagggactgttgtgtggtattggcttttgctccacaatgtccagcccaccccctgcccctgatgctctgcctggtgacatctgcaggattgaggattataaggtccatcctggtgcccagacagcctgcatcacacaaggactgtgaaatccctgtatgccacctatctgggtccatgctgatcctggcgtgtgaatagtaagacagccaccagcctggcagtcctaagacctggcagttgcagccctagttccaaactgacttggattccagctccctcatgggccaagtggggtgaataacatctgcccccttgctgcagatatgttatagtgataaaatgatcggaatattcgggaaaatgcttgctaaaaaccccaaagttttagggagatacaagttttgtattattctaagtgtagattttccctgtaataagtaaaacagactgtcagacgtgactgtgcccatgagggtgtgatttaagcctcgtcatgccacgctatgaccaggcactcagatggtattttgctagacctaggtatacacatattccaacttctaaagcccagacatgtaaattctacttcatgtgaaatgttccatgtgtcagctataaaattgccattcagatatgtaaatgatgcttggttgtaaaataagctggtgctaatgggagaacagcaggtccctaactgggctgccctgagctctctccgaagtttatggctagacatctgccascttaatcatctcacaacgcaaagtgcttacaatctactcggaggtatatttacatgaaaattctggaacatacccttctgtgagccagagatggcctataatggaagcraaaatacaataaaccagcagcwsggcagatctccctggactgctcagcacttcaagtgctgtgcaggtggtgggtgtaaacacttagcttccgggcaccaggatgtggccaaggtctgtccacctggggacacccagctttctcacgcctgacctgcctgctggctggcaggggtgtagcacccatgtactcagggacagcacgcgcccggcttcctggctgcctcacgtgtgctgcaggctggccctgctcctcccgctgcccctgtcccctgtggcccagctttgctcatcagtgtatcagtgttgctgtgttcaccttgcaccagtcaggaaaggggcaggtctacgctgaagtttctagttagcatttgacattggggtatctgtgcaacacaggctttcagggggccccttcttggcatgcaattaaactttcaaaatcacctaggcagacactcccatagtgtgctttcagtcagtgacctttttcctggtcagctgtggcctgagaccagatatattcctcagccatggcaatgccagttccctaccccaggccagcagaacaccaccttcagaaatctcagtgtctccttgctgggccttggaacagaggggatgctcaaggccaccttcacatttattccatctttcaacacacattcactgggcatctatcacttacaggctctgggctaggctgtggggaggcacaaagataaaaaaggactgggtgtccttaacctctggtgtaaatacatgacagtgggactgttggttctgacaccccactcccctccacatgtagttcccctggggagcagtgcacatcacatccttggtggccttgtcccctgagctgaggggtcagctgtcagctgggtgtgaacacctttggttcatcattggctggttgtagctgccataagtcatcattgtttgcaatgtttaacctgccatgctctcttccccaaactctgttgatctttcttttctgttgcctaattgattttcatgttggttttatttttagaaaattgtagcggcaagtatatataagcatatatacggtgaagtccttaaagcaaagcacttctaaagaatgtgtgcttgtttttggcctctccacctttggttttcactgcgctccacaggacgtgctaaggattggttgcaatcatctaaattgttccccatcccatagattgtcatctccagcctggggccatcttggtcagtcacacttggctctgtgacttgccaacatagtcttccagaatgaatgatctggctgagaaatgattgaattcagcctgcgtttgtattctttgcaaaaacgttttgggtagtcctttgcatggtcctgcctgcgcacgcaccagcctgcttcatcctactgtccccctcccatgtccccacaccccgctcagttcctggtttggcagcactcatggacttatctccatcacatttggtcctaacctcaccaggctgctaaaatgacacactgtgacygctgggctccctcttgctccgtccctctttgatgcctgtttgttccttgaatgatgaaatgacccagcaacatactgtccctaacccatggatggctgtcactgacatttgtctcttctcattatcattagtgtctgggaggcaaaacacttgtttagaagctgtatctgccttattattacytrctttgaaggagcaggtaaaaagtcattagggagctcactctcagagatccaggaatggtccctgccttttaaggtaygctgtttggaccaggyggctgacagtctcmctcatcttctttttctgaccccacagtaaggttgtgtagtcccccatttcatatgtgaaccctttcccaggagccagctcagctgggcactgggttgtggacacagacccagcaaccccaaataaagaagccctcctcccagaggtgttacctgtgagctcagaaatagtcagagggaagactggcttctccgcaatgcctcgggttacctggcccagctgttctgggatgctggtttgcttcctatctgaattagaaagctgcatcctctcagctcttccaagcacagatagaaattaaaacagaaaatgaaatggactgatttcattgatttcacttgggaacctcagggtctttttgacttccacggttgcagggggctgccccagagcctatgtggtaagagcctgcttgagagccctgtgggaagaggctcgagggaacatcagcagagccccaggaatctaaggagctttctggaccctgacatgtagtccggcctcctgaggctaaggggctgtctcctgtagggttcccagctgaagaatgtgacatcttagggtgggaaggractgccaagtttgtcttgtccaagccctgaggtgacactggaattccgcttattgaaaactgattagtagccccttgtggccatgtttggaaagctacctagtgaagagtccttccccagtctggtgtcctctaggggtgtccagcatagcgtagcccacttgcgttccagctccaccagttcccttcatgttgaaacctcctccatcccttgtaggggagatggggatggagtctaatcgctctctcttcatccgtgtactgttccctcgtcaacccagaaagaacccactgttcagccacagcagcctgagtgggcttttctagtgaccccactctgtatggccgctcgagatctaaagggcattagctggtataggccacctgttaactactcgggccagctttaccctggcccaggactggagttctcagctctggcagcatatttgaatcaccaaggagcttttaaaattcccaacatggaggtctggcgcagtggctcatgcctgtaatcccagcactttgggaggccgagataggcagatcacctgaggtcaggagttggagaccagtctggccaacatggtgaaacctcatctctactgaaaatacaaaaaattcggcaggcatggtggcgggcgcctgttatcccagctactcaggaggctgaggcagaagaattgctgatatcctgtaggcagaggttgcagtgagccaagatcatgccactgcactccagcctgggtgacagagggagactctatctcaaaaaaaaaaaaaaaacaacaaaataaaattcccaacatgcagatacgccccagatccattaagtaagaatccctggggtgggacctgggcttcagagattttgttaaagatccccaggtggttttagtgttcaggctagtatgagagctggcctccccttttcattgggctgacatttgtcatttgggaaaagccatcctcagggttctttaaatttgtaagatattttggcaacttgcactgtccccccggggctgccagtcacatcctcccctgaagcagccccccatgcccagtggtgtgtggtgggaggggaggtgtcgcaggcgcactgagggtgcatgaagcctggtgtgctgtttgctctttccttcctccctccctcgcatgttgtgctgccctctccctttacaaatgctgtctcctcttcccttttgttcttttaaacagaatattcatggtttgaagttcatagtccataggttgtcagtttcaaagatatcagttgaagagatgtacacttcgaaattcagttcggttgctgactttcacaaactctaaggaagggggccgtggatggcgtatcagacttgaagcagaatagggagaggcccgcaggagggtcttaggccagactgtggccaggagtgtcttccctgaccaacaggcyccttactgtcttrcaggtctgatacataagtygtgcacatttcagaaggataactgtagagccgtctctctcgtgcacactgcctggtcccctgaacacaggcaagcagaggtgcacatgcrggcacacttagcatgcacactcacaccccacactccagccagagagggaagagtggaaccttcctgtgcacagccttagtgagaatgatgtggaaaatgatgagaactttaaaaaattagttccttcatttgttaaggtcttaagttgaaaaacattgtctgtccctttaaggagctgatatttcttttgagacgaactaatagaagagggaaataaaaatagcaatcctgggtttttgataarcctgtggcagagttcccattctgagcatcccaggagaagcaaggaccccttttaaactctgtcagaacctgttcctcttgggttcattgtcacattactgaatttcagtttttctgtgrtatgctgaaaccccttattttctgtgaactttgtagaatttccctttggtctcaggaggtagcccttgatgctagagaggcttcagaactgagctctacctttccccagatccccagggaggaggccctcgagaagtgagcacatccagacgtgcacacatgtcccttaactttgcagacacactgtacagaaagcgtccttgaagcccctaaccggaagagcctcatttctctctgtcggctcctggtgacaccactgaggggaaaagagaggctggcacatgctggctctggttccgctgactgttgctgtttaatgtaaagatgcctcctggtgctggctggagtttgcttccaactcctctgtgttctctcagacactttctgaacactcaggtagtgctaggcaccatgctgggcacggagtggagtgaggcaaggcccctgccctccctggggtgggggttggggggcaggtaagcaccagtcattacagattctgcatcctggggccragggacaggagcacagccagaccctggaggaggtggagctgctgaaccacaggggagctggtcctccactgtttcttccaaagactcatacggacctgcactccctcttatgtgaaagctgtctgagctgtggggcaggcagcgagggtttctgtagggaagcctgcctctctcctcctcgccctgactcagtctgtccagcttttcagcagccctgcctaagaggctgttgtcagacatacaccacccaggcgtttagtctcataggaacagagtgtggtccaagggggtttgtggcccgcaggcaggcaccactgcttgcccctctgctagagacattctgttcctcggggctaggaggcctgctgcagagcggttagttcctgagacccacagccctgactaagccaagagaactagcctcctcgcgagaagcgggggcacactctgcatctgttgaggtcttgcagcactgcctttactggatgcctgtcagcctgggcacagcatgtccccagatgtgaattagaaagtggtactgtgtccatgcccatgtccatggctgcctgccctcaagtccacctccaaggagagccactggtattttctcagggagggagcaggtgtggtgtctaaagatgggaaccacacatttttttaaagggggaaatgctctctggaaccattgactccttcctggttcattaatccattttcaatctttgatttcttaaagccaactgaaagtgaaaatgtccctgtcccaactgctacacctggggtaagatcagtgactagtccccaggggctgggccttttccttaagtttatttgaccatgtcgagttttccactggtttttctgtattctccatgattgtccttccagaacagtgtctgcagtggtttgcattcatcatcagtgtccagtactcttgaccagcccagcgttctcctctaacacagtagaatacgtggacatgcatgtgctgtgtggacgcagttttcygagctctgtgttgttagcatgtaactcttcctttcatatcatgctttttaagatgaaaaggccctagaatcacatcttcagttcttacctctgtcacctttgcatctgttgctgtttttctgaaagtgttgcatgttctactttccattgggtttgacctctccatgataacccttcagaactctgaagagagcaatagaatctccatcacctttttycgtcttttccgagtgatgcgattggtgaagcttctcagcaggggggaaggcatccggacattgctgtggacttttattaagtcctttcaggtaagagccatgccaaggacttctctctttgtctttgaagatcatatgtaagtcagtgattgtccccatcctagaggacccaggctccccctgtgtggccactctgtggacctaaatcaatagaaaacatggaatgctggagagacccaaatcagcatttcttgggtcaatcacatgggattacttgcctaaaggaaacagaagagaaagcaggaaggatcygtagctgagagatctgtagcatttccaagactgagagaggtgtggggcctgcagccctgcagtgcccccgggatgcctggtggtggtggtgagtgccaggtcccagcagactgcctggaagcccaacagcctctctctgacaccttttcctcataaggctacaacagtgctgtgtctgttggctagtctagatacaaatcagaaaccaccacctgggccagygcactatcactgggttatcctgcacctggaagggtcacagagttcgggatgtttgggcatacaccatgtctcatttgtcacctctgattctccaggctggcacagctcggttctagactttcccaagtagaaccagcttttcccgtacctgccagtaccctgccccagacattctagccttctggactgattccatttggaagagaaggtgtgggaaatatagattcttagtaaaaggtggacccatgtagggaatttrtggatatctacaagcattagaaagtgaatcctgcatcttcattttttaaattatttgactatttttcattcaaaagttataaatgtttacaataacaaatgaagctgtccaaaggtatataaasagaaatttcaaacttggccctcacccacccctggggtaaccagtgttaccctcccagtaagcatttgtccctagtagatgggattttcacaggtaaaagggagaagggacagcaagcggggtggtgcaggcactcacaagggaagtcacagatcctgctggggagaatgasgttggaggaaggtaaagtgggggcctcaggcaggtgagccttgaacttgctaaggcacagaatcctcgacagttattattcatttaaagtaccaaaacttgggaacaaactgctataaaaatagataattcagaggtaatgttatctcactttttaaagaaattcttaaagattcaatytgccacagataagaaagtcatgttccagagcagcagttcataaaagcagagaaactgtgcaaacaaaaatcgtaaacatttggcaatctaggaagaaaatgcacgtaggtatgttgaggaaagcctgaaacgaactctgtgggaccctgctgagcagtccagctgcagggagggccaggctggcaggcacaggtcaacagctggcacaggtctgaaggtggctgagcacctgtgagccactgactttctgacaagctctctcggatrgtagagaaagcgggtgctttaagcatgtgttcccagaattaagcctaacactctgggcaccctgtgcaggtagacgtgttggtcacatgtgatgaggtaagacagcagttgacattcagtgaaaggacgggggatctgtcagacactcgtacttgtatttggtgtttatgaagggagccacacttggcgaccccccagctcactccttttcttccctggcccagccccccaacttagcagttctttcagaaggtgtacatcttaagagaggtattttgcatcctacagccacagccagaaagtggttcttcccctctgacccagtaattccactcctaagacttcaccttaaggaaatacttcagcagaagcaaggtggttttgcataaagatattcctttgcgacattatctacaataccgccccccaaaacatacccacaaaagaaagtggaagtactctaaatgtccagtgttctggaatggtttgatcaattataatttcaccccaaaaatccagtaatgaatttaaggattatgagagttacgtgtctgtgttgaaaatgtttagggttaggctacagggttaatgaccgtggaaagcacatcctgcctgtaatattgtaacactgggcgtgcatgtggatggtgtcttcaggactaaagtagttgggcagggctgggatttaaacggttcttcctcactgtcgatattctttcacggtaacacgtggaatagaaaggaagcatgtggccactcatgggtcttctcaggctgtgscgggccgtcacggrgacagccggctggtgctgagccaagtgccttttctctcccaggcgctcccgtatgtggccctcctcatagccatgctgttcttcatctatgcggtcattggcatgcaggtaagctccagccatctcgccctcaggggccctttcactgggtagccccaaatctgtggcaagatgtaccctgaccaagtgaagtagaagcattgtgatttttcagccaaatgcctctgctgaagcctaggaagatgagaaagacaaagctgcttagtagagagctccaggggaggcccaggctcagatgaatgtggagaggttagaatgcaccaggaaaaaytgcatgtcatggcagaagaattatgctttatcataacaaagtgaaattcacttgaaactaactatttccagatgccaagactgaagagagaagcaagtagcccctcgtgggtcttttcagtctgtgccgagccgtcgcgggaacagaaggctggtgctgagccaagtgccttttgtgaccattgttgtgctttagtagctcacctttaaaaagaggcatgaaactgggctcttctgtgacccaagcagaggggctgcaccctgtttcccagttcctcctgggcatgggaaagggactgggcctgcctaacagaggagccctaacatcaagtgggcagtgggatgggttgtgggtggagggaggcagcctagtctaagaatggaggcagtcgaagagcccaggtggctgtagatctctgctggcaggctccttgcagattctccacgtgtgcaggtgctgtctttcaggtaaaggagggatgtaagtcagaaagaagtaaagtgattctatgatttttggggcagagaaatggtagtgcttttttcttttttcttttttttttttaaaatcctgaaagcatagaagcatttgcagatctctgggaatcttaccaggagttatgaaacaaaagtcagcatacttgagcctctgtgattcagcagcacgtggtgctatgtgccctggaaggtcttttatcacatatgttctcataaaaaaaagccatctcagaactgcaagctgcatggcacacacaaccccagattcacccagcaggcgtttgtaagcatctgcaggtttctctagaatgtcagtctgctccctaaatctcacaagtaaaactctttagtaccttcccattgccctgaagataaagcccactcttctgcccggggctcacagcccctgcctgttgcctcctgcccttgtctccagcctggtcttttatctgtctgctcatcacacgttattttcattccctcggtatctatgctgtcaccctgctcctatgcacatggtgctccctccacccgaaacactcttcgcctttcctatcacctgatgtatctttcagttctgagtttacatgtcacttccccctagaggccttccctgacccagccccccagccttcagtagatgagcctgtctcacgcttccctgtgtgtctggaccaccccagcatcatcactggggtttgatgttgcctggctacctttgtgtctcccccaggggagatccgcgaatgtgagaccgtgcccctctggagcaccacgttcccagtgtgtaacctgctgcctggcacatggttgtgcctggcagatcttttttgaatgagtgaagtgccaggtrccatgagaaaaccctagctggtaaagatcaaacctgagttagttctaaattcacatacggattttttttgcatgacgaaatctattctctttttcctgacaacttctccacctagatgtttgggaaagttgccatgagagataacaaccagatcaataggaacaataacttccagacgtttccccaggcggtgctgctgctcttcaggtgactgcaactggcttgggcggtgctcctgggcaggggggtccgctaggcgtgggtccagagggacggaggacacaggttattaaagcagtgtgcctttctcagttgattgtgatggctttttgtttttgtttgttctgtattcttaaacacagaccctagcatttcaaacacaggaattttgctggattgttaaaactgctgtggtaatcccgattgtggctggcataaggtttattcatttgggagttagtagggctacttaggccacctgaaaaattgtaggatgtacgtttatgcatggaggcatgcacttraacacgaccaggaagacagaaacttagcaaaaacgtcaaggccttttgcacagccagtggggaacatcctaagatgtatgatttcaaattttttgggattgcttttaacgtcagttaattaactttgtaaaacaagctgccctcatagtgagaaaactttctagagatcatgaagtatttctaatgactctagtgactgacaagtcatttgcaagttaggtggtttccagctctgccttcaacaaaattgaacagagacttaagttgttaagtattttggtcattaaaaataatcaataggccaggtgcagtggctcacgcctgtaatcccagcactttgggaagctgaggtgggtggatcgcttgagcccaggagttcgagaccagcccaggcaacatggcaaaaccttgactctactaaaaatacaaaaattagccaggtgtggtggcaactgcctgtagtcctagctactggggaggctgagcccaggaggtcgaggctgcagtgagccaagatcacaccactgcactccagcctgggcaacagagcaaaaccttgtctcaaataataataataattaattactgttaattatacaaatgtttaaagtagagaagacacaaaaacaagcatccatttatatgcagacagttagcgcgcttgcatcagatgatggctgtaaatccaagggaattgcagcaggacctccagttactgtgataagttgcacgtgaaaatcagtaggaatttcacatttccattaattcaaattggattttcttcaaatgacttaggttttgctctaattatgagtttttctcccctaagatctaagcttcaaattccttctttcccccactaaagcccctttgttcttcatctgaaaaaggtgtgcaacaggtgaggcctggcaggagatcatgctggcctgtctcccagggaagctctgtgaccctgagtcagattacaaccccggggaggagtatacatgtgggagcaactttgccattgtctatttcatcagtttttacatgctctgtgcatttctggtaagtgagcaacacagctccccctctcaatttacagatgcttatgtagcagtcagcgttcacacaaatggccttgccctgtcccatcgcctgaggacaattgatgtggatgagcactctggactccacttggcagttgagggcttttgtttaaccaggcgtgtgtcactgccgccacctttgtaagcagagatttggtgctcactaatcggcttggagcaattaccaatcaccttagcttcttagggttcctttctaaaatttcaaagccagtgcatatggtggtgacctaagagtgtgaattatttggtgataatgaaattataaaactgcaatgtgtttcagaaggccttccttccccaggacttaattaaagccattccagaaagctagaatcacactcttttcttaaacattctccaaatagaaagtttttacaacttctcttggagacatgggttcccatgtttcatgtccatgtcattagaaagcctgtgctcagttctaacgcaatccagctgcagctgaagttcttcctttcctatttgctttttcagatcatcaatctgtttgtggctgtcatcatggataatttcgactatctgacccgggactggtctattttggggcctcaccatttagatgaattcaaaagaatatggtcagaatatgaccctgaggcaaagtaggttgaaaaatatttgatttggcgtgtgtgggtggattttggaatgtcagctttttttgtggagtggactgaaagttcgggccagctggtactgttcctggaccttagattgtattttacttccaggggaaggataaaacaccttgatgtggtcactctgcttcgacgcatccagcctcccctggggtttgggaagttatgtccacacagggtagcgtgcaaggtgagtgtcctgtgtgcgtgtctgacagcctgtcttgtagaagcttgcttcatttaacaaacacttgttaagtgacacagccaggccttctgtcagttgctagggatgcagcaatgaataatatgtggttcctacctctggggaaatctcagatttgtaactctttggacaccctctcaggaaccatcagaagaggaagggaattctgtaatttgtcattgggtggatggtagagaaggcgacatttcagtccggtccagaaggaacacaggagtttgtcagaggcagggagggctcagaaggaggcagragaatggacatcrtaatggcaaagggtgagccattgggtcatcctttggctaggacataagaggaagtcagaaggccccaggtacaagctgagccttctctgtcctgctgaggtccaggagaatggggaggaaacgtgaatttcaggttcccatgttaggaagttggctgttggcaatggagaagtagacctgaggcagggggatcaaccaggagagccagaacgaaggcagcagaagtgggaagagataggagcagtcgcttggagatccacttaggatgtggagtggggaggacttggtggcctgggtgaggggagggggagtgctaggagagcacatctcccagcctcggcattgggggacatggtgctctgtgttccacacgtcccctctgctacagagctttgtggccaccacaggaaatggggcccctttgctggcacactaggctctagtctctcagggatggatgcagatctcccagtgcaacgcagttctgtgtttccatgccagagcacgctctcaggaaccctcagtgagacttttccttccacagaactcacggtgtagcaccttacatttgttgcagcgacaaaaaagattttcctttttcaaggaaaacgcaaggtttgcctcttgaaactctgccttctagaaattcatacagtctgcatagcaactagttcttgctcctcatggatccaaggagatcctggggtcaggcgtttttaccactccaggatgctgakccagctctagacagaaaccaaggtagcagaacagagtctaaaatatgtttcagactctcaaagaaatcccttgagccagactcatgttccctgccctgaaaatccagaaagccttctaggcaaggccttagggtccttgcctctcttcaggccggactctggatattgaaacagagcttgacttttttttttccataaacttcccagtactggcctcttttctgctttccaagaacagtgtgggatcccgttcactgatgtcttcttgtgtttaaatttccagacccttttacataaagctttcaaatgtccttgaggcacagtcatccattttgctgactcaggaacttaccaggaaaagtgaacaaatgtccagggttccctggctgcctgtgctggttttgaagagggtgccggggttggtaggaggactaggaatttgggtgggatggacttatgcagacacaagattccaaatcatcaatatggaagagaaagaaaatcttttcttttggaacatgctgttaatgaaaaataagaagtttttaaatattatcaacatcaccattaatttagtgcttgccatttgcctcacacaaaactctttgtgtccgtgagtcctttaatccttgcaagttcccatccattgggcatgtcatctgcatttacaggttgaagtgactggggtccagagagggtgtacctcacccaaaccccctccaactctcattgctggtgttaaagggatcaggatatagaagaggagtggggagcatggatcctgctctgaaagaccaaagcctgggagaagccacataggctcatgcaaaatgccacaagatgtacatgatggtctaactaggcaaggtctgaaggacattccctgagttgggaatagtaatggatcccgtcggttgagaacctaagtcccaggccctgtgcctrgcccattgtcttttacttcctttaaccctcacaacagctttaaaaacatgcttggagccgggcacggtggctcacacctgtaatcccaacattttgggaggccaaagcaggaggatcccttgaggccagaagttcaagaccaacctgggcaacaaagcgagacctcatctctaaaaaaacataacaaaacaaaaacaatgtgcctggaatggaggtctgaccctaagatctccattgagattartgaaaaaaaggagaagactgtttgaacagtgaagtttcacggtttaaaaaacaaaacatcatctgcgtgttaacatttatatttcatgactaaacctttgatctttgtcatcccagagtcccctaagtggtaggttgtattaatcagggttctccagagaaacagagccaataggatggatatggaggtgtatatgtatgtatgtgtgtgtgtgtgtgtgtatttgtgtgtatatatgtgtatatgtatatacacacacacagaggtttatcatggggaattggctcacgtgatcatggaggctgggaagccccatggtctgccatctgcaagctggacctggtgttggtgtccactctgagtaaagtcctgagaaccaggggagcccatggtgtaagcctcagtcaaagggcaggagacaattgatgtcccagcttaatcaggcctatagagagagaattaaatcttcccccacctttttgttctctgtgggccctcatcaacagaatgaggcccacccacattggggagggcattgctttactcactctacccactctaccaattcacatgctaatctcatctggaaaaaccctcgcagacacacccagaaatcatgtttaaccaaattggcatctcgtggcccagtcaacttgacacctaaattaaccatcatatgcgtacccccaaatggctgttgaatggaattgagggttgactagaaaagagatgagtgataaacggaaaataaacatccaaaaggatatggtcgtggtcactcatttgcattctacaaagaaaccttcctttctgtttacagagattagttgccatgaacatgcctctcaacagtgacgggacagtcatgtttaatgcaaccctgtttgctttggttcgaacggctcttaagatcaagaccgaaggtgagcattccctgccagcaagacaagatggcaggaaaggaragagacatcacatcccatcttgccttcctcatctgggccttttcttggccaaggggaggccctggggaaggggctggcaagtagaatgaagatgtccatgctgggcttgcyggctggcccctgcctcctgtttcctcatcctttatctccttcctttatgcttcactttgtcccagaatgttttgagttgactcatactactgcttactacatagcaarggaaacaggcagggtatcggagcagagacgaagccatcacaaatgaactcactccaaccatccctaactagttgtatgacctgcagtgagggatttcactggtctgagctgtagtttctttccctatgaaaaggaaatacggggatgtctaggaggtcctgaggatgaaatgaggtgatgtctgcaaaagctcctttgcagtgcctagcacacagtcagcacttgagaaatatagtgggatcagcatcttcccagctgagagaccaaaccagaatggccttcacagccatgctcagccctggtcaaatcctggtaaaacaggcactagagtgtggccattggagctggctcagtggtgacttcagaggtggaatggagagcagattgcaacaggctgaggagtgaccaggaggtggggggaggtgggaggtggagacctcaaggagagctgactctctgaggcactggtggaggagagggaagaggaggcagcaagggactcatgctgagtgcaggcaggtgacttcttacaaccctagagcccagggagacttgatccagcaaagccagcctcttccagcctaactaacaggggcgccttgtagcatgcttgtctgtacctggccccaggccagcattgttaagggctccagaaggcagaatggtcctctatactgacatgttagttgaaaagacaagtgtcagctcatataataaaaggccaaggttatgttgtatggatgagtacatatagtaggaattgagagtcttatttgggtgaaatttaggctggatcttcaaggaaggaggtacgatttggaacaacccatgaaagagcagaaggcaaagacattctgggttgggaacaatggaaagcaagtagtaggtctcagctgtgggagggcaggatggaatcagagtgggacaggccttgaatcccagggtgaaccgtgtttgttcccatggtggagggacttcccactgggaaggcatgatcgctattgctgaatataggaagtgtgtttgcccctgactggggagagcctggtgggagtggagccccatcagagggcagcatgttcatccaggtcaggctgggacaaggctgtgcaagcagaggaggagctggggaacagaaatgaggcttgcttttccccttttgttttttgaatccagggaacctggagcaagctaatgaagaacttcgggctgtgataaagaaaatttggaagaaaaccagcatgaaattacttgaccaagttgtccctccagctggtggtcagtgcagtctatttcctaagtagtccttggccagtgctttggttttaatgctagtgtctccagaaagtccagagagtgtttgcaaaatgctttatgtatcatttagagcattaaggccaactgataaagaaagccctttggccatttggtgtgattattttgggggtratatgaagaacattccagacaaaggagaggcttcagtgaaaaaccaaaactcacatggctggagcagggattttctttttggtggaggaattaatgtttgaggacaagattgtgatctcaaagtgaaaagcctatattttttgtccaaaatgaaatattcaaaactagtttccaattacccttcagtatattgttgaaaatgtcccatgaaaaatagacagctttcaggaaattgtatttttgaaatgttcttatcaagactgaatttactaccgtaattaccaaaaatgtccttttaactaacaggcatgcttatttccttttgttatttatcacaaaataactaaccttctttaaatttttatatatataaaaaacatctatatatatacacacatacagtgtgtgtgtgtgtgtgtgtgtgtrkatatatatatatatatatatatatatatatgcatactggctttgcatttttatttaagtacatgtggacttagacgttgagatggttgtttttgactgttctgtttccaagttttaaaggtgcaggatctgttcacccagtgccaccacaccagcattctagcatccttgggccgggcacgtgatgagcctttggtgtgtttcgtgaccagcgaacttttatagcgtcgctgccgccacggctttcgagactggtctggctcaggtctggtagctgacttcaggacccaggccaggacggtgaccgaggccctgcccctgagaaggtgatgagctctggctcttggggcgcagacagagcagcatgccagccagctctgctccttagcatgaagcgagaagcaacgtgagcttttgttgctgaaggggttacccgtagctggcacagccacaggctcaaagctggggaagatggcccagaaagaaatgataaaaggaagacaaaccaacaacaacaacaaaacaaaacaaaagtcctcccacctggagggccctggcttcccacaggagaaccgatactgcacatttaaaacaactccttggttttcattcttttctttttagctgcacacctaagagcttgcatggcttacatgaaatgctttggaaaaattgtaacaatgtgcttgagcttttcctgcagcctccattcctttcacctctcagtctttcagaatattctgaagcaattctgttttagggtggtggcatggaatcagagttatctcttgccaactgtattcccctacgttgtttctttaaatacagatgcatgcttcagaatagtgggctatgtctgtctatgtaaaccttccccctgcgagctgaggaccccrctcctccctcgctccacctcacatctctcttggaacgccaccttcatcacaaccagccagactcccacattgatgcccatcctcgtgaaatgccctcggagggtgtcatttgcattagtgtgaaacttcatttcttttcattttaccaaaagaaaagtccagaatttagctckccatcgaagctcccttcctttgaaaagctgatcaacttttagctttatcagacttctagtagagtagaaatcttcttctttcttggtccaataactggacctcgccttttctctctatttcttaaaatggattggagtttaggatgacaggttttaatctattccacaacrgcagcgagaggcagtgtgaggcacaagaagagagaagtggggccttaggagggatgcaaggctttgcaagctccctgcctgtgttgagtgatgtgcccagtgcagggcttatccgggctgaatctcatgtgagtgctgtggccacgaaggaagttccgaaggcagtggccatcaggctttggtgcatagactctggaagagttgccggacagggcttggttctccacattcatcatttgtctgtctttcctcttttatccttcagtaggcccatgtccccaacctttcctgcatcacagcatacttagaaaaggatatttgcatacccctctgggaacagatgtggagttcttgaggctgagggcctcagcatcccctacaccatcacctggtcaagaagcaggagactgagtaaggccagcctccactccaagtggctgggactggcagatgtggggtgctcaggaagccccttttagccctggtgatagaactgagtcagatgcttgtcttgggtggcttygctagtgtgctgtgaggtgtggcctggctcctcatgagcctgatgatgagatcaggaatgagctgtggatctgtggatacatgtcaggcttgcttcactcccagtggcccgggggtctccgctgccccctcaccatcagtgctgagccgcctcatctctgcctctcagctcaggttctcacctctgctcttcagccttcccgtgccatcttgtgggtcctttcccttcatttcagaagctctctctcctccccaggactctcctccatccatgacctggatcctttgctcctttgccctgaagagcacactgagctgcctccattgccttcttttcagtccggagcccagatggcctccttgtattcattccttctcttccttcctgttctgtcctgctgtagctttgacttttcttgttcttaggaactcttccttgggcccagtctcctaattagcacagtgtctcaatggagaagacgaagtgacccttgagttctctcctgcagagctctgggtgggtctgcctctactctggaggctgaagggagatcagagttaggcctgtatttgctagaagcatcagggtggaatggggtgtgggtcttcttcaggtagagccagggcgttttctgggccccacagagaagacacagagccctggaatatagaggaaggctgtggcatggcaggccaccagagrctctccctggggtccctggagtcattagccagacaacagcgtgtccactttttgtgtgcagcctgggaaagggatacacttgcatggtgtgagaggcagctctgaagaagcccagcagccagtgtggctggagacggccatctctggagaggtggtatgaaggataggatcccagactcaaggagcacactgtcctgtggtaaggtcccggcttgactgagctgggcaagtcatttagccctctccatctgttggagggggtggtggtgagcagatccaccatgtcagagttgtgaagaggccatgagacccacatggaattcttctgacacagggcttggcatctatagatgtccaacagtaggggctggctagagccagagctgatattccaaacataccctgagcaaatggggaggctggagagtacagcgaggggtgaaataccaggacctgagtggtctctgctcacctcctgccttcttgcctatggaccttgcatcattagacaagccgagacagattaggaaccatgttttacatgctactcagagtctttggcttatacctgggtggcccctacaccactccrggactatcttagcytaggtttagaaggaacagaacacttctccaggccagaccacctgagacagccttctcacacagtaacactgagtggcttctgacagggaggcctggagaggcagcccaaggaggcccgggcatctccagtggggaccacaagatgttggcagcacctcctggatgggcactaagtgaagcccaccccgggtacattagtgaaggatgatggttctccatgtcccccagcccatcaagcttcaggatccatgtcaatggatgccaccgtcagcacattttaaaataagggtgactctgagggctcatgatcaacatcaagtgcccagcacttaagacagcctgagccaggtggctgagtgctttacctgcttcctcccacatcatcctcacggctcctctgagaggcttatccccactttacagatgagaatacaagctcagagaggttgagccccttgcccccacatcagcatgtagatcttgcaagggtggcctggcctaaaagccagctgctctgtagcctttggaccagcaaccattcctccttccagcctctgcaagttgtggtcagtggcccccagggccccacatggccccacacacatgggacggagtactaaagtggtcacaagctttacccccaagagacacagcacactgaagatttggtagcaagcagccgtgggagagccatggggcacatttacacrtccaaagtggtttaccatgagacagccagagcctctattctgcctcatgcatcacctttaaagtcatcagcagagttctgattccccaaccatacacgttggaggttgwttctgaacaaagcaaaaataagcccagctcaactatgaggttggttggagctgtcactacagtgcagaaaatgagctgttcagaattacaaaccaagaaatggtatatggagcttattggtggagaatagggggcggggagctcatgaaaatctgaatttgcagtcacttttctaaaccttcctctccttctgagcatgtatgtcacctttctaggtctctatcttgagacatcgggatttggacggttaattgcccttgataagtttatggtagttatacatgcaaatccctatgcacaggggtgaaatgtggcccgtgaagcctctttttgttttgtaatttttattttaagtaaataaccaagacagcatttcatagtgttactaatatgctgctctattaaactcataacaaatatattattttctgcaacctagagtatcagttcatttaactgacactaattttgagccttagttgctttgcaaaaccttgctttttgctggtttgagacccctgtgttatatgctgagacctcggtgccttctgcgccggaccgcccacccgccccactctgcccctgcccctgccccagccagaagcaagtgtttaggctcttggtctaatgtgctgattcgggagagctctgtctggtctctccgtttagatgatgaggtaaccgtggggaagttctatgccactttcctgatacaggactactttaggaaattcaagaaacggaaagaacaaggactggtgggaaagtaccctgcgaagaacaccacaattgccctacaggtgaattgttgtctcattttgttttctcttttgactaacgattttacaagcttatttgaaatactagagagctgcctattcatggttgagcagtaccacaaggattttgtttaaactgagatactacacactcccccaaatgtggactagccatttctgggccacaaggtaagtgcttccctccccgatgcctaccccatagagccctgcacctgccactacccacgyggcagggctgccaggacggagaggagcgagcgctaccctcgcaccccagcccckccaggcagcatcctccaagcaggcacccaccttccccacagccctgggctccagggttctggctgcccagtgaatgaacagctttccatctgaacgcaagtgctttgttttgtttccgtttgtttcttaccccactgcttgttggtttttggtccatttcagtaacatccatcacctcctagtatgtattctgtgtgtgtgtgtgtgtgtgtgtgtgtgtrtgtatgtatgtgtggtgtgtctgtctctgtatgttgtctcctgatggccaggaggccagctgtgcacatgctatgctctcatgccccagccagcctctggtccctctccctcctccacctgggccctgctscaggctcctagagtgtggatgtggctttcaggaacctctggtaccagccagggtccttgcatgcgaggaatgtagaaacctaggaaagcccaaagctctgggatgggaagcaggtatgtggaggggcaaggaaggcaccatgaggaccagcaggaagaggggctaggaaggtggtctgtgagtgccgtggatgaaggaggcagggcaaagagggagaagatgctaaggacagggaagagggaaccacagaggctggcaaatcatctgaaacaactgacctctgctgcccagagtgctcataatccatcatggataggataaagaattttttaaaatctatttacgccacaattttatgcccctgttctcagtacatgttaaatttggccttgtagatattgataaggttcaacatggaagagtccttcactcttatccagggaaaaatgcgcagcgttgtgtgttcaaagtgatggtaacagcccaaatgagggcttatctttgatcttgctgagagagagaatatgaatatgaatatgaatatgaatgacagtgaatgagtgaatgacaaacatgagctgtgtgtgtgtatctcgtgggttagtagatggccttgtgtaacagtgacctgctgattcatggtgcaacctctgctctacccagacagctacaggggctggggaaagaggcatatgcgggttggcargtggaccatgaatccgactgaagacagtgatcttcctgcctctcatcaygtatcctaaaggtagctgagggaatcacaggctcagtcacacagcccattggcatctcaggtggtaggatttgcaaatgaagctttctcacttccaaccaatccagtttgtaaaagtgacagcccccctcctggattgcagttcacagctagcctccgaaagacaaagcaaactgcagagatatgtttgcagattagaagaagtctctggtccatccatccttgagggcagcgtggccaggttgggtgccaggagagggagtgatgaacatgcttctgcaggcttgtccttaaaggagtcccctgcccagaagatgaggctggttagatggtttagttccatttcccagtgccctctgcttgtagggaactgcttattgttctgggagcctaaytgggaccagaacttgataacttttctggagggaggaacatagtctgtcatcgatggttgatgtcctaatttacagccagcaggttagctaggtaccatgagaatcttgcattttctgtgagaggcatggcrgccacttggatgcagggtcatttatactttttctgaacccccaagacttcccaattagacaatttcagcactttctctagtggctggaaatagtgttttgatgttttaagatatgcacaaacaacacacagctaagtcattaccaggtttcacgtatggggtttactgagtcttaagttgaagggtcaaatggcatgaatgatayagcggcaggttgtgggttaaaagactctttttgtgttgcaataatgttgagggtttctcctaaacgtttttcattttattgtttatagagtttcattttattgatgaaatgcaaacatttccagttagatgataccarcatattttcgcatggctccattgggagctgaagcatcgtctgtaatttatgttgagaatgcagcctggaaaattaagttgtgttcataatcttaatagagaaactgaaaatgtacttgattctgaaacattaaacatagacattttttttgtctccttgaaggataattctaattgcattttggcttcctgtgctgtagaaatggctgtgagtgtgatttgttactccatgtttaattagcatgagtaggctttcgtttctgcgtgatgaaataccgggtgacgatgtagcagttaggaaaatttggtgggacggcagtgggagagatataccaccagtgtaactaggacaaggacacagcctcgggaagcccctgagagtgggcgtggcctgttgagatggaggatggcttgcctcctcccacagcagggtgccccatggctggcagactgcgtgctaatggaaagtggagcatggccgtcgcagtgtgagcgcagaagtgcggacctaggcatgtgcgtgcttgtgctgcgtagggtgcagtctgtctgaacagcttccaggatgggcccaagacctctgcgcccccacccccagggaatgttttttcaaggacacatatacgcactgtggttttgaaccctgtgggctccatctgatctccctgtgttcagaccaactgcaatgctgcctcccacatgaaggggaatggcttgagctcctggatccatgtgtgggaaggagctcggcatccggtgtcttctggcctctgtggtctgaatgagtgtgcagtttccatccttccatccatcttcatcattaaaaccaaccttctctccagcccctctacagagggaaccagagagaagctgcatcaggccttttttaatttcctcttgygcatctcctacatgccatgttcactttgggttgactcagcatttgctcgtcatccattgttgctacatccgagtgacccacgagtttccacgaggggcaaataaataaaggaacacagccatgcagccatgaaaattctcagtcctcctcccagcagacagcaatgcatgctgaatgtcccatcagaccttctagatgaggacatctgtgcaagttacagacactcattagtccagtgtcttgtggataagaaaaagaccccaaagtgggaaaagttttgttcatttctctttcttttaacattcaagaatttcctttctgcaaaagacatgcactccggtggaatccgaggacactatgtcccccactcatcccagatgggagcctttccatctccattgtaggaaagctttggagggatagtccttttgcctgtttggaagtttggtttaaggaggagaccattatttctagctataaagaattaggttgttaggttgaataattgtaaagcctgtgcccgagccrccagttggcgatgcaggtggttgaggggagatgtgggtggtatataagaagcaaaggactctcagcccctgatgtgccccgcgtggtcttcttagggaggctcaatgcataaagacagaagaaaatgggatcctccacagagatttaatctgtagaagatcaaacacctgttgcctggtcaccttagtctaaaaagtagtggagttttgttttgttatttttttaaagcatgattctacctgaagccatcaaaagcctctttttaaatttttttctttttttaatctaagaggagaacagatgctaacagatgagatttcactggctgattcgtttgtttcagatgcttgaacggatgctttagaattttctgcctgagctacggcaccaagctggttagtcggaaggcgtttgtggctaaggccttgaaagggaaaagtctcaagtgggcttatttctactgaaacagcatttcagaagaaatgcaggaaaaagcagacccaaggccccagggagaccccttccaagcaaagcactcctccggaaggtggaagcggggccgtggctcatctgcggagccagggctgcctgtcgcggacgttgctcacggtggttctttttcgtgaaagggaacgtacaaagcttaacagttttcccttccaagcagagactcagagaaagggaaagagtgagagagagcaaaggaggggggcagctgccccacagagaaatgaaatgaacacaacttcctgatgctggccagtaaaacaaaaaattaaaaataaaaataaaaagattaagcagacctgcctaaggtgggtatctgactccattccaaagtcctgcatccctagtttgcccgaactcccaaagactgacaggcccctcggcgctgagctgacagagttccttttgtatgccagtccgccatgacctcctgagcgtccggccctgctctctgcagagacccagtccagaatacagtgagaagtggacaggccaggaagctcagatacacccattgaaactaacacatacacccgcatgccaaaaccaatccaggcaacacctcaggttccatcttaacgtgtccacaggaaacaccaccacacccaaacctcatctaacattgtccgtctttaattcgtgctcagagccagtctggggatgcctctttggaagcagtgtggtctagtttcaaggacactgggagtcagggaacctgggttctagtcccagtttcagcattcacttgctgcgtgaccttgggcaagacacttaacctctctgtgcctcagtttcccccatctgtaaaatggggttaataatgtcgacctacctcacagggctgttgtgaggaatagctaagtgattgtaaagcactttgaacgtataattgcttattaagactacaacaataataatatcatatgcctgtttactaccagaactttaagaaattcttgttttcctttgatctcttttctgttctgtaccatacttacccattgagaaggaaaattccccccttttaaagaaatctaggcaatgcacaaagatgtcaacagaggtaaccctgcaggttgcattttcacatcttaagaatagcagatttttgcccaagatgttggtcgataagggtgtctgatcttgaattctcagctgattccaagtggtggttggagtctgtacatctgatgctgagcccaagacacccaaagtggccagtttgggttttaagatcaacattcaaagtagccatagtgcagaggtaatgcagaagaatctaaaaaaattgaagtatctgaagtgtatagagaaaagaagggcttatgagcccctttcacctgccctgatgtgtacaggctggaagctgtgtgtgtgtgcgagtgcgtgtgtatgtatgtggggtgtgcggagacaggggaagagagagccagcaaactctggggggccctattcctgtagaagtggacacccttccaagcatcctgggagggcaggagtcccaaaggctaggcagagggtgggagcaatgtcaccagtgggaagtatgctttctgcaggcttgtcctaggtgtgactgacagggtcagtcccagcctcagggtcttttccagtggtgtcttttgtgcctatgacatttgcccttggctgcagtcctcactgtaccgagaggtctaacctacctggacttcagtggacctgctgtcctcattatggaaatgggcctagctcccgactctgcccccatgtgtataagtgtgcagactagttaacatccaggagctcacagtaggtgttgtgggttctcacagcacagtccacagggcccaagggcaggtttgactgcttcgtgctgcaccacatggtgatgtgggggatggggtagaaagccaggaacactccagtgtggccaggccacttgtcaagatgttgaagcacagctgcacctggtatcaaccgctgttaccctagcacctgagtctccttccccactgccagcagcccagcccctcctgagactgctctgtgacccagcagctacaggtctagtgcctggcattgcagggagcctccaggaccctgctgtgatccaaaggcccacttctgctctgattgggcagcacctgggtatattaagttataagaatttatgaagaatgtgatgtatcgtccctgaaagggaagcccgtcagtcctgtgggggtccgtcagtccctctgtctgtctttgacccacccgacgttgagttgattcagtgctgaaggatggcacgtgcctaccccctgtatgtgtcactctgtctcagagggccggtgtgaccgaccttctagatccaagattccatacactcaggcctcggcagaaaggccccaagcgattcaagtgggcggcgtttccatgtgccttctccacgctcctcaaataagtaaaaactgacaagtgaccactttctagatgggacttagggagtgatttaaatggaacaagagagtcttctccacttgggcctggctgtgttgctggggaatggcattggctaaggttggtagccaaggccagcttaggaaagacagccaggaatcaggaaagctgcttccagcttcaactcaaaagggaaagaaggcttcctgaaacttgatttgcagtcaaactgcagagacaccgctgtcgtttctcttaaagccttggcagagaagtgtagcttctagtgtagtcaaagttgtgagagacgactcaagttcattatttagaatcttcacagacacacacagcaaacttggcacccccaacaccagcatccataggctaaactcttcagctcctggatagaagatgagaggcaggccagtatacattgtagggaggctcttctcaaatagcttatactgtttaacaacccaattaaaaattaatccacaggactattgggtactacattctatactctttctgaaagtggggagatctcattcctttgagaataataattatgttcaggagtctttgagaagaaagactgcaaagaagttaagtgatgtgacgtagtagtaaaaggtggtaattatcgtggcttgttatttagtaccattcacctagtgtcctttggcagcccaattgtgtcatgattagatgatctgtgcgaaggagctggctaagacttactaacagttctagggtgggtagaaacccaggtgagttcattctccttggcacctcttagacctaagggacacagctgtttgagatcttggaagggcacataattctaaggcatggtgaaggcaacccattcagacgtcccaaaggctggctcagggaagccataggaaggccatttcttccaagagtggagaaaggtccacagaagagtgggaatcctagatggggtaaaaaagtctacacctgaggaaaaagtagtagtgcctgttggaggatagattgatcagcagttatcaaactttttggtcttcggacccttttatactctacattattgaagacccttgtgtgtcaatatttactgtcttagaaattaaaacggagcagtttttaaaacaagaacatgcaagcacaaagacgccagggtgatgacatcatgcatcaggcagcctttgaaaacctcactgtgctctcatgagaggatgagagtgttgaaggcaaagaacatccttatgttatgcaaatcacagtgacctcatggacccctgacagtgtcttgggatgccccaaggtccccagaacacacctgagaactgctttgggggaatgctactaggtccccctaaaggcagagggtgctggagccttttaatcatctcccttgttaaagaggctcctgtgcagtggcactgccctaactggagcccttctccccctccagccccttcccagtctcagcccactccccggaggcatggagctgcctgtgtccccattcgtctagcatggccgagtcttgcggcctgtgctgatctgcaggtgtgatggtctgaatcagggcaggatagaaagtgtttttaaaaatcagctcccctaagtgcacaactgggaccaaggatgtgtgccaaacaggatccgtttcagggataacttttgatcatttgtcatctccatgctgacttaggaatataagagctctgctagggtagtcaaaagagggttagccttgatcaggtggcaccccacagtcgtgactataggtgagtaagtgtgtgattcagactccaatccagcgttctttcccagtaggtgcagtgactttgcctgggtggtggttgaggtggggagtttgggagaggtaaggcagcccagtgtcacaggaagaacaggcttaggggccaagagtcctcactgagcctttgactcatttgggcacataatttaaccacatgggaataactttggctctcccttcctcccagaatctagtggaatatttgtatgtaagctcacaatgactggtataaagatgctatcagaacagaagttgtgttttacagcttctgctaagcctaaactttacagaatgctctattatcaggaaactggcaagactttttttgattcggttgttaaaattacaacgaatcagattcctgattgcaccaagaatcaaggtggaactgaaacggagagctctcagattgtgtgcaggcaaaggtcatattttagataatttctttaaagtttcctttatctttccaagtgatgggaatagcgcaacccctaggggagcttgtgggggtcatgttacccctgacttttcagtgagggttggaatcactgtggatgactaacagagcgccaggatcccaaccctttatatctgacacaaggaccattcacaatggacacaaaggctgccatcacattatccctggaggagagtggtgacaaaataaggggtgtgcccacgtgtgatgtgctgaggaggcggacggcagcttgcagatgagcaggtttattccataagaacttaatctcattctgttttctaatggaactagtctaaaaaggtcccctctcattgggtatagactgaatcctgctaaagggttaaccagaacttgtcaccagcgagacgactgtgtgcagggccagcctaggctgagtgcagcctgcctgtgatggggaacaggctctgccaggcagggttctttggctggagtctcaaagcctggcgcttgtatcctgaagatgaatggcctggcccagtcccgactagagacatgcatctcttatctccactgctacagcgtaggtccagggyggggctctgggcacttgtgcatgcttgctgtggcgctgtgagggctggcagatggctggtgtgtctgatggagctagcttagggacacaggcagcaaaagcattgcaaatgcatctaggcaggagaaacttaaccctaaaagtgggcaggagaaagaaaggtaaatgggtgttcatatttgatgtcaaaatgtcatcatattatgctattcagaagtgttttgagacattttagttttttttggtaacttaatcattcaatagaatatctatgaaattccaactaaatggtgtctaaaattttaagcagcagtctacaggcaaagcrccaacatttcttttctaaaaattatttatgataacatctagcattttaaaatcaaccagaaactaggcttgattctgtttaatattttataagattggacatcttaaaataagtcaataatgtttatattttatagcaactctgtgtttcttcaaaaccatatttctgctgtgatgttaatggaatgactttatatggctttaattgtgttggtttaagtgctaatgaccacttttcaaattaaaatagtattttgctgatagaggtagacacagatatgagatatgaaagaatagataattttactgtttgtaaagtgtttatcccaagaaaaaaaatgttcttttttttagggctgtggaaaagtaattttttcaagagtctaagatagttttctgtatttctggggattggaacttgtgcctatggaattttgggagcagcctaagctaccttttagcttgatatgtgtgctagaaaaacttcattaccatgttttgtgatatgtaataaattcagggtgctgtgcttaagcttcatgtcaattctagtttgggaacatctgtttccctcactcccagtcgtgggggacagcctgacctggccctacccagaacacatgtgaaaaagtagagtcagtccctgactcttatgaggtctgttttttcctgcctggaacaagcagaatataatcatgatttctgactctctgcttctgtgtctgggaagagcgattcttctctcctcctctaatgtctctttaataaatatgttgtcattatttgtctttggaagtggcaacttgggccacctttcaaccttctccatgatttatgttgcaaacaaattctctgtcccatgtctgttcattgcactatcttgtcgactaaatcctaatcttgtgtatcactgaagatgtgctggagacagtttttgtttctattatgcaattatgttatatgtgtatttcagtgaaatgtcaacccgtcaacagaggatgatgttaaaaattatccaaataaatagttttctatttcttttaatcagacctagtccaatcagttgaatgacagtaaataggattatatgttgtttaaacttgggagcatttctggcctttactgccttgtaatatggattaatgtaccaaatttacttgggggtgttgacttaagtgcattataacctatgtttattttgtggaagcagcagcaggtgtcttaaaccttgtctttttgtttgggagccttagatatgtaaccgagttttcttcccagttgatccaaaatcagaagtgaaccccttgcttagctcaccatcccttgatgatgtaccctaggaagctctgaatgaatgaaatgcggctgtttagtactgccgggtatgacctttcttcacgttcctgcagctgtgctgtgtaagagcttttaccaacatagcattacagttgccttcttgatgtttccatgagaatggcaggtgggtccacctcagaaccaaatgacttcccaggctcagatgtgctgaactcgtggatcctgagagagggaaagtgtgtgtatgtgtgcstgtgtgtgtgtgtgtgtgcgtgtgtgtgcgtgtgtgtgtgcacgtgcacgcacgtgtatgcacaagcatacccacatgtgcatatgtgtacacacatgcatcctgagcctgtgatcagagggacaggagagcaagaagcagcctccctgaccaccccaagaactgtcttggtttgacccgggacatgactgtctgtcccctataagatctcagcattcctagtcaggaagcttaaagctttcattcccagctcttccttcaccttcagaattcactaaatggaaagatctgctgctctatcttcacagaatggttcaaaccaaacccaacctggcaccatttttagcagaattgtctcaaaggcttggtgcttttrtgcaccaggctatttttataagggcctcttgggaagttcctgtgtgactttacattctaaattatcatcaccagcactggcattggcaactgcaggagaccagttttgagcatccccagaccagtgggacccagccctgatggatctggccagactgcagccaccatcccctcctcctccctgaaccactkctgggcatctgttctaccccatgcttgtctcagggatggtcatcatgcctatctgtccttgccacagctgcccacatgctaagaggtgttgtggaggaaggacagggaagcggtctcctctccgaggacccaccacttagtccagttttcctttgcaaaccaccctgaggttgaagcatttgctgcacatccattgtcttagctgttctccaggcctttagggctacagagctgtggacagactgccagtgagtgaggaggggctgcctggatacaggaccgtagacccagggcagagaggacatgccttcttcagatgcaggactttctgtggaaaagaataaagttgccatacagtccctattagtctttaactcagcatactgttttccttcaaactggtggtcaaaacatcatcattctctcagagctggagcagtaccttcctccatgcaccrtgcataagcatcttggaatgcttccctaatgaagtcrtgaacaatggaagggcttatcctgggccctgtctcaacatagcagggaccacagtgaggaaggcagctgtgagggcgccaggggagatgcagagtatctgtgacgggcccrgagggatctaccaggggtgtcttctggtgggtcttgcactgcctgcaaaggctgataagccactttcagtttgttgtgatcttcaaaaagcggaccccctgttggtgagttctcagcctgcacacaggctacaggccagggtatcctgatgaccacggtggccgggtcggtgtgcgtgtcagtctgctccgtcgtggtcygagtgtgctggtggttgcagtgtgttgtgtcactcactcgttccatggctttttagcagaaccagtggcctgaggactgcttggtctgcttgtgcctctggcacctacacctaggcttcctcatcctagatgcagcaagggagtccacatcagcctccctttagatcggccaggctgtgctccttgccctgctctgggcttggagagatagggctcttgtaggcgagcctactgaagactgtcactgagacaggggcataagctcttggcctggcagatcctagcactagtaaccaggcagtgttccttggaagtgggggttttgcaaaggaggttacggggttgcaggcctcaggcatcctacctaggaccttcttgaccctctggatgcctgaccataccaacaacccttagactgccttcagtgacatcagtcagtgccctggattggcttttggggaagccttcctccccaccgctgaatcaggaaggagcaaagccaggacccaggctggccccagggcccatgtgtggtctaacctgttctgccattttcattgatctaggcgggattaaggacactgcatgacattgggccagaaatccggcgtgctatatcgtgtgatttgcaagatgacgagcctgaggaaacaaaacgagaagaagaagatgatgtgttcaaagtaattattccacgcctagctacacactggccatctggaaatagcagggcaggactccagtttgggcagttaatcatccacagaagagtctggagaatgcagcccatccccagggcctagaggggctttcagaccacaccctccccctcttacagaccctccccaggcatcagcacctcttctagggccaggccagctctttccctgagcttacccagcttcccctcactgcctgcttctgaggagctcggccacagccgctggccctgtggatgagcatcctgagtccttccggcagctgcctttgctaccctcctccttcccgggccagctctttgatctgccagctggctgtcagtcccccagcccagagagcatgcccaaccttggggccaccagccagcccagctgggtataagtcaccccaacttggagcaactggaagagcacactcgagtgacagccgacagcttgctccccagctcaggaaatcggtaaccttcctcatctcggggggaccaactgccacacagtcacattcaccctgatcattgagacactcagattgttttacagggatcctacggagcttgcctagaatttgtttttcatgtagaaaaagttacctaacatagctagtctgcatcaaatacttgttaaattacctggtgttgtctcccattattttgcagagaaatggtgccctgcttggaaaccatgtcaatcatgttaatagtgataggagagattcccttcagcagaccaataccacccaccgtcccctgcatgtccaaaggccttcaattccacctgcaagtgatactgagaaaccgctgtttcctccagcaggaaattcggtgtgtcataaccatcataaccataattccataggaaagcaagttcccacctcaacaaatgccaatctcaataatgccaatatgtccaaagctgcccatggaaagcggcccagcattgggaaccttgagcatgtgtctgaaaatgggcatcattcttcccacaagcatgaccgggagcctcagagaaggtccagtgtgaaaaggtaaccttgacaatgtgtttggacttgctcatgtggtgtctgccygtgttgcgtctagtcccaaggagcaaggcgggtctgtgctctgtgctctggggcatggaggaggttccccgtaggcatttgtgtcaggatctgtgagtgccccccaggtcactgctgcctctgacactctccacgtgatggacctaaaggataagggccacgtgccatcctacatcctgtgtgggstgccgagggaccttaaaacagcagcagccacaaaatccacctctcaattgtgctcacatactgtgcgacaggggttggtgaattgtttctctaaagggtcastgagtcaatattttaggctttgagaaccatacagtcttgcaccttctcagctctgccgttgcagtgtgaaatatgtaagtgaatgggtgtgtggctgtgcccattaaaatttccctatggtcactgaaatttgaacttcatatatttgcatatgatgagatattttttgtcttcagattcttttttatgtttttcaatcctttataacaataaaacccgttcatagcccatgggtcatacaaggccaggtggcagcccctatgtggatggcgaatcataatttgctaacccctactctaggaggtagcctgatgtttgcatkgtaaatttggttggaaattaacttttatcttctccctccttcccatgttatgcctttcctggatagaacccgctattatgaaacttacattaggtatgtgctcattacctgtttttgtgttaaatactgtgatggtatgttaccagctggcctctctgagtgctgaagaatgagaaacacttctttgagccagcctattaaaggttatcataattcatggctgtggactcagaggtcagaggttgttgcttctaagcaaaggcaccttcagatccatatctctgtcgactctgttgccatccaaggactggtgtccacacacaaggtgcaccccatgggctggctcctgcaggcctcgcgatggcactaggagcatccattgtgcatttacaggggcctcagcctgtgtggctggcagctccggctgctctctggggtcaagcttcttgtgggtgctttgcagcatgacccaaacctcctgaaggtcaggaatgggatcttgtcattttccctgtagccctcaagatatgtgtagtatattccactccacatgtattgacctgagttgaattgtgggcggaatgcccattttgttgggggccaagggaggatgggtcttcctgtgtcatgttatsaagtgaagtcgggagccatgtgggcccaagttgggtgcaagaaagtggagaagtcagaggaagtgccatccttcctttggagagaggattgacatcaccacgtccttctctgaggactgaggccaggatgagccgggtttcagggagacttaccacattcctggggcagggcagcctttggaaacatggtggacrtgttctgtgacagtttcccctgtggcactgtatccagaactcactcgaccttcctgatttgatacagcaggaggtcagtggccaggaagctcctttgttccaggttctgaagtcacactgggctggagctgggggactagaaggagagggagggatcagagcagatgccctgggaacccagggtctttttccctaggtccatttttttgttctgttctccaaattgcacctattcctttggctccaaggcctctggacacaatggtttgacaccaacattgtgcagggcactgagagagaccctatccyggccckcaggcacaccacacacacagacacacacacggtgctgttgccagaagccggaacagtccagtgctgcctgaggcaggtgcgcgctgggagaagccaggagcacccgggcarggttgccggccacaggcagaggtgcagctgcagcaggaattatctgccgcctgcccaggttctcagatcctctctcccaactgcaggtccgactcaggagatgaacagctcccaactatttgccgggaagacccagagatacatggctatttcagggacccccactgcttgggggagcaggagtatttcagtagtgaggaatgctacgaggatgacagctcgcccacctggagcaggtgagctgctctggctcctktggagagcgggaggccgccctgccctggtgctcggcccactcyggaagccagggccacyrgcagctgcacttgggcttcccctaaaaagcaaaatgggagcagaaactccaggccagagggagagtggagctggaraaagagagccgcagagaggcagggtgagggctattctttcagacctgttgccttatttccactaggggcctctgaggccttttagtgaaggcttgggaaatgggagatgggcctgcttcgtggctgggttaatgcctttccaccacccgtctttggagagatcagtttttgctgaattaacacttggagctctggcggccccagggctctgtgtgsacggcggcttggccagcctggagctgggccaggtcctcatgcacagcacctgcctcctgccacttcaaggggtctctcggggagatgaagaaatgaggggtcactcagcagaggggtccatcttgcttctgtcctacagaaagaatgtttgttagtacaatgggcactctgctttaggaggcgtagcaggcggcacaggcggatgaaaatcgccctccaccctcttctctgaaccgcacctcactgtgaccaggggcccagtgaagtggaagtggaatggcagtgaggtggcttctggcatctgagccacagcctgaccctcaccctctgctcccgcagcccttccccgtgcctctctcaaatgcctgacttctgaaaccactgactctgagccagatgaactcgtgttcccttctctagggcttttgctcacactgtggcccctgcttggatgccctcactccgtctgctggcctcatcccccctgtcgagggcctgctctagggccttgctttttatttccatgactggaattgaaatccctcccccaacccccagaaaagaaaacctcacgaaccgcatgagttcctctcttccagcactggccctttccagctcgcatttgatttctgtgtgctcatggcattttctaagcccattgagggtggggctcatgcttcatgcatcttggtgtccttggtgcccagcacctggcagagggaaggcactcaggagaggggctctcacggaggaaatgagtgggtgagagcctggctcacaggacatctgcgatccacatttgccctggagctgagggatcaaaactgccagcacatccctcagcacaggcctccagtcctgtaatggcccttggtctccatctggaatcttccatgaaactgaggccagccttgttctcagccaatcctactgtgtccaagggaggaggcggggagaggagtatggatgtcagtctggcagggttgagtgacagagcttgttacctagaaccttactgccctcctctctgacctccaggcaaaactatggctactacagcagatacccaggcagaaacatcgactctgagaggccccgaggctaccatcatccccaaggattcttggaggacgatgactcgcccgtttgctatgattcacggagatctccaaggagacgcctactacctcccaccccagcatgtgaggccagattttttgttttgggtggaacctcccggggaacagtgtacctctcccccaacccccgctctgggggccggtgatggatgtgtgctgccaggtcaggatccttagtcctcaagaccagcccccagccagagagtgtgtctgctttccttcctttctcatccatatctcacgtgatagagctctagcctcttcagtgctatgcttgactctctttgagaagagagaggctgtggggccctaagattgcacgcacacatctggtaaggggtgttttgcatacatagcattgtctttgaacctgggaccatcctgagagggaggcaaaccacacacatgcttttgctgttgtcagccctgctgcactctgtgatggggtgactgagcccccaaaggggaagagtgggctcaagtgcagagctggctgtgccgcaggcctgtcttgcaaaaccccatgcctctgagggccacctgggcattctggtgtccatctgtcctcaggcccctccaagccttatcctcctccctcatctctgctcctcctccctccctcatcttccctcctcctcctccatcttccctcctcctccctcatcttccctcctcctccctcatcttccctcttcctccctcatcttccctcctcctcctctatcttccctcctcctcctccatcttccctcctcctccatctttcctcctcctccctcatcttccctcctcctcctcctcccgcatcttctcctcctccctcatcttctcctgctccctcatcttccctcctcctcctccctcatcttccctcctcctccctccctcatcttccctcctcctccgttcctccctcatcttccctcctcctccctcatgttccctcctcctcctccctcatgttccctcctcctcctccctcattttctctcatcttccctcatcttcctcctccttcgtcttctagcatcttcctttatcttcctcctccctcatctaccctcctcctccttcttttccctccccctctcctccctcctcctccctcctccctcctccctcatcttccctcctcccccttcctctcccttgccttccctcctcctccctcactttctctgcttctccctcatcttcctgtcaagtctgtcagtgccctctgctcacggggcaggttctggacttgttggtccccttcactctggggccaggaaacccatcccacctagaggggctggggctggggctggctgcttccacctgctttccctctgcagcggtgggtggcaggagctggcggatctgggtcatcctgagcaaggaactccagctgggggaagaggtgcagccctggccccttccagcccttggctgaacagtttcattttggacatgtgggcattttgctgatggttaaggactatccatttctggaatttctgaggaatgaagcatatttttgaacaggactctaatcagtaaccaaaaatagccrtgacacatcggcttctgagtctgccaactgcatatactataaagagcaccactgggaggtgcccagggccctctgcctcactccaactgtcacagccccactggggagtgtgaccagacccatttccatggttaatatttaattcctcagccctgaacacatgcagctaaatgaagtcactcctttcccataaatactagatgaagcagatgcaggtgaggcygggtgatggccctcgcccttgtgagttccactgccttcctcgggcctcggcctttgtctactgcctacttggccaagcaagcaagcacatgaatcccaccagccacagtgccagagaggagctgagtgggcaggagtggctgtgctcttgattcataaggtggttttgctttgctgccccgcagctcagaccttggacaggaagaacatttccctcctccacctgtgttctcagctgcagggggattccctcctcctycagagagtgttgtgcagagcacatgagatggtggggatccctggagcattttagaaatggaaaagcaccacatacaggagagggaccgctgctctcctttcccagcccccagcccggccattcgatctggaaacctatgctccacagcacagttggcccctgggtggtgcgtggagggaaggctttctgatgaggcagccgtgtgtgtcccatgtaggcaactgaaccaggaggccccacagtgcgcactgggcacgagagaccaggactggctgtctcgttcctctctgctgggcagtgcctagccaaggactcagyccggtctcttgtgtgcagccccagtgtgcctgggagtcctcycctggctaggccctgggctttccaatagcggaatgaggggcatgtggagttttgccagggctgagaaaggaggccctgtgatccgagaaaagcagcggtcaagataggagccatagaaatgccttgtaaacgataggtgtgctctcgacagaggcccctgcaaggggtaggaggtttctgggaggaggctgctggctgtgtcttarggccccagaattcagactgatctcccgggcctggtgccctgtgaagctgggagctgtggattgtcttgttaacctctgtgtgagcctctgttggaagagctgttagcaggacaagcattttcttaaaattagaggtgtcctttgtttgtattcagtgctagagaagctgaatctttcccaacaaaaataatttgcttattacctggtcaagctgatcagtgcaggtaaagtccctccctttaaaacaggtgtaaacacaggagccccagcaagatatgtcagctgctggggacacttagggtatctggaaggtgacagtgggaagtgtcgtggggttctggcaggacttgtgttcttgcactgaagtgctgtgcgctccccacagtatgcagsgccagggcttctgactcggatcagttgccctatgggctgccttcactcctcctcctgagaacaggcgaacgtttaaaagtagtaagttctctttgggaggctgaggcgggtggatcacgaggtcaggagatcgagaccatcctggctaacacggtgaaaccctgtctctactgaaaatacaaaatagtagccgggcgtggtggcgggcgcctgtagtcccagctactcgggaggctgaggcaggagaatggcgtgaacccgggaggtggagcttgcagtgagctgagattgcgccactgcactccagcctgggcgacagagccagactccatctcaaaaaaaaaaaaaaagtagtaagtttgtactttaaaaaacatccctcactggggcttctgccttcatcctctcctactaaagtttggagacctcactacctaatctttctcttggacaaaccgcatgcttcttcctgggctcgttgctgagcatccggggccaccctgactctgaaagacggtgtcccggcagagaacttgcttcacagctgtgtgatgccctttgctttcccagcccaccggagatcctccttcaactttgagtgcctgcgccggcagagcagccaggaagaggtcccgtcgtctcccatcttcccccatcgcacggccctgcctctgcatctaatgcagcaacaggtgagcggcccacctggccttgcccccacacctaggggcaccccacataggacccccatcaggtcactcccttctccttggccttaagcaccaggagggaaggagagaatcttcacctacagtctagttaatctttgtaacaatcctgtcaaatagctatggccatgagtcccatgctgcccaagctcacacaagtgactgctggcatttgaatccagggagccagctgccaaagctggcctcactgcccaggtgcctccctgcgatccccaccacctcttcctggcattgaatacagagcctgatgtgatctgagctcagggagtgggggccacttggctgattctgaacaagcggtgcagcccttcattttctctaagaagtggttccttcattaagtttatgggtccctccatgggcagggccctgtgggtactatgcagggttaacctcccctgcctacaaagggagcagtctggggagaacagtttgcccacgttgagggcggctgcacaggcaagagggtggggccggagcccactcactagggctttccctcaaggataacaatatggcgctttttctttctgaaaatatcacatcagagatgccattcattcgtgcacgacagggtggtgggcatggacctgtgctgtttacagacagcgttccccgtccctctctgcagagtgtgaaccccaaggtgcatctgccgtggtgggattgtaagaccggggcttgtacccagtgctttagcacatgccaaatgccggctctaggatgcattactccagagcaaagagaaccagctgttttcctataagtgctgggaagtggtagtttcccctgaatgtacttcggtatttaaacccagcatgaactgggtgrtgtgttcacacccacagcttgttgggcttccctgattcttcattctgaagcaatttcatgaattagcaactgatacctccttgggaaaagccaaaggaaatgcattatggattcggggtaaaagaaagcacagtctgctagaaaacaaagtcatcaccgcccattcattcagcgtacttcagtgtgcccatgtcctttccaagtccttgcctggactgcccctggcgagcgcagcgccggtgcttggtctgtgcgcagaaggtttgaggcccggacctctgagaacctctggtctcccaacagtcccctctttcctcagatcatggcagttgccggcctagattcaagtaaagcccagaagtactcaccgagtcactcgacccggtcgtgggccacccctccagcaacccctccctaccgggactggacaccgtgctacacccccctgatccaagtggagcagtcagaggccctggaccaggtgaacggcagcctgccgtccctgcaccgcagctcctggtacacagacgagcccgacatctcctaccggactttcacaccagccagcctgactgtccccagcagcttccggaacaaaaacagcgacaagcagaggagtgcggacagcttggtggaggcagtgagtacggttcttggccgtggtgggcaggaagcaccaggagcagcagaggtgcaactgtaacagcaggaagggcagtggtgggagggcggccaggctgtgagctaggctgcctcaatcagacacttctgagcagcaggaatgtacctgaagcatgagtaaaaactggtcaccaccactggctgcagtggcttacgtctgtaatctcagcactttgggaggccgaggcgggtggatcacctgaggtcagcggctcaaagaccagccttgccaacatggtgaaaccccgtctctactaaaaatacaaaaattagccgggcgtggtggtgtatgcctgtaatcccagctactcaggaggctgcagcaggagaactgcttgaacccgggaggtggaggctgcagtgagccgagatcacaccactgcactccagcctgggccacagagcgagactcttgtctcaaaaaaaaaaaaaaaaaaaacaaaaaacaaaaactggtcaccaccgtcaattctcataaatgagctgtgctggcattatgggtgctgttccggcatatgtttctagtttatactaaatgtctttccccagtgggtttcactcttgttgggccatgtgtagttttttagctccaggacattttcaaagccatttacactagttattatgtatgaggtctagaaaacatgattgagctgcatccccaaagcacacggtgcagttaagttagcactggagttgatttttctgtcgtccccctgccctgcaaagccttataacacccccatgccatccatccctcttttctgtacaggtcctgatatccgaaggcttgggacgctatgcaagggacccaaaatttgtgtcagcaacaaaacacgaaatcgctgatgcctgtgacctcaccatcgacgagatggagagtgcagccagcaccctgcttaatgggaacgtgcgtccccgagccaayggggatgtgggccccctctcacaccggcaggactatgagctacaggactttggtcctggctacagcgacgaagagccagaccctgggagggatgaggaggacctggcggatgaaatgatatgcatcaccaccttgtagcccccagcgaggggcagactggctctggcctcaggtggggcgcaggagagccaggggaaaagtgcctcatagttaggaaagtttaggcactagttgggagtaatattcaattaattagacttttgtataagagatgtcatgcctcaagaaagccataaacctggtaggaacaggtcccaagcggttgagcctggcagagtaccatgcgctcggccccagctgcaggaaacagcaggccccgccctctcacagaggatgggtgaggaggccagacctgccctgccccattgtccagatgggcactgctgtggagtctgcttctcccatgtaccagggcaccaggcccacccaactgaaggcatggcggcggggtgcaggggaaagttaaaggtgatgacgatcatcacacctgtgtcgttacctcagccatcrgtctagcatatcagtcactgggcccaacatatccatttttaaaccctttcccccaaatacactgcgtcctggttcctgtttagctgttctgaaatacggtgtgtaagtaagtcagaacccagctaccagtgattattgcgagggcaatgggacctcataaataaggttttctgtgatgtgacgccagtttacataagagaatatcactccgatggtcggtttctgactgtcacgctaagggcaactgtaaactggaataataatgcactcgcaaccaggtaaacttagatacactagtttgtttaaaattatagatttactgtacatgacttgtaatatactataatttgtatttgtaaagagatggtctatattttgtaattactgtattgtatttgaactgcagcaatatccatgggtcctaataattgtagttccccactaaaatctagaaattattagtatttttactcgggctatccagaagtagaagaaatagagccaattctcatttattcagcgaaaatcctctggggttaaaattttaagtttgaaagaacttgacactacagaaatttttytaaaatattttgagtcactataaacctatcatctttccacaagatataccagatgactatttgcagtcttttctttgggcaagagttccatgattttgatactgtacctttggatccaccatgggttgcaactgtctttggttttgtttgtttgacttgaaccaccctctgaagtaagtaagtgaattacagagcaggtccagctggctgctctgccccttgggtatccatagttacggttttctctgtggcccacccagggtgttttttgcatcgctggtgcagaaatgcayaggtggatgagatatagctgctcttgtcctctggggactggtggtgctgcttaagaaataaggggtgctggggacagaggagcaacgtggtgatctataggattggagtgtcggggtctgtacaaatcgtattgttgccttttacaaaactgctgtactgtatgttctctttgagggcttttrtatgcaattgaatgagggctgaarttttcattagaatgcactcacactctgactgtacgtcctgatgaaaacccacttttggataattagaaccgtcaaggcttcattttctgtcaacagaattaggccgactgtcargttaccttggcagggattccctgcaatcaaaaagatagatgataggtagcaattttggtccaaaatttttaatagtatacagacaacctgttaatttttttttttttttttttttttgtaaataacaaacaccactttgttatgaagaccttacaaacctcttcttaagacattcttactctgatccaggcaaaaacacttcaaggtttgtaaatgactctttcctgacataaatccttttttattaaaatgcaaaatgttcttcagaataaaactgtgtaataatttttatacttgggagtgctccttgcacagagctgtcatttgccagtgagagcctccgacrgggcaggtactgtgccagggcagctctgaaattatggatattcttatcctcctggttccttcggtgccaatggtaacctaataccagccgcagggagcgccatttctcctaaagggctacaccactgtcaacattatcctggactctgtgtctctctctgttgggtcttgtggcatcacatcaggccaaaattgccagaccaggaccctaagtgtctgatagaggcgatgatcttttccaaagtcagtacttacaaactggcattcttacaggctgcaccatttcctagtatgtctgctttaagcctggttcaacctctcatcgaatattaaatttttctttgtaagaaaaatttgaagttgtagagcatggttttttgttttcctttgtcttaggaaagttttaagatgaaatgtttttcctttttggtcccctccccatctgaaaaacacacatttttgtgtccacaggaataacacatttagtttctttagtcttatgtttttcataatctcacaaaatgtaaatggcagctatgatttcaccgtcaactggcagcgagaacctcactaagaaccatctctgctcagcctatggactccgacatccacccagacagctggatctcgcttcaccatgtggcactttccagctctatcctacgaagtttcagaattgggcgaaggccaggcgtggtgggctgtgagggccacgttacctctcggtgcagtctcacctgtgtgagatgggaccaggggcaccacttgctttcctgctgaccctgctatgagaaaaactggagcagtttcaccttgtgtacttctcagcatcgtaagtgtctttgccaattgcatttcctagaaaagttgtactgttttgataggcagctggctggtttagaaaaaccagttagccatagaactgacatcacgcagagagccccgactccctgattagcccaccccaactcaaaatctgactccagggatgttttgttgaaaatgttatttctctaaaacagtatttcttttcctctcctggggactaggagggcaggagacaatgaggagcaggcctgggccctggttccaacatcaagagtgacagggtggtctcagggatgtcctgtgagggcagcctgagccactaaacaggtccagtagagatggtattttatctttaaaaaatctgtattggatctgatgttaagttggcttatcagtagaagcatgaaaccacttctgagtggcgggacatggttggctggagaagaatctgtttttttgttgtttttttttgagacagtctcactctgtcacccagggtggagtgcagtggtgcaatcttggctcactgcagcctgcgccacccaggttcaagcgattctcctgtatcggcctcccaagtagctgggactacaggcgtgcaccaccatgcccagctaatttttgtatttttagtagagacggggtttcaccatgttggccaggctggtctcaaactcctggcctcaagtgatccacccacctcagccttgcaaagtgctgggattacaggcgtgagccaccatgcctagccaagaagaatctatttgaattcgtggagatgatgcctgcaaccttcgctacaagcagaaagactagatgtttgggtgcctacaactcctgcttcaggaactcaccatctccagtcaggctgccagatgctcttggctcccacacagcccacccctatcccctattccatcaggagctgccttctactagtgcagcggcttcaacacaggcttctgcaataggtcagggctcctgagagcactgggcacatggacagcgcattctgttgtgctctttgagccatttttgcaaagcacgtttctctgtttttaggtactgcaagcttttggccaaggggcccaattccctatgagactgaagatgggggggtaccctctgtgcaccccactttgtagcaagtgcctttctcccccatgctggcttcctcaggtgacagcctctcctcctggggtgaatgaaagactcccttcatggcaggggaacgctcaggttctggacatgtgacacttaccatcttttcttttgaacctcattcctgtttatggccaaattgtgcgattgtgtagaacatggctaagtatttgagagtgaaagaagggcctgggtgcaattgagcagcatcaccaatgggctcctcttaccatatgacgttttgcttattttaaaatacagccaccagactgaacccaccatggtctcagacactgacacacccatgggacacagagatggtagaactaagtgactgtcaccctgccatatccatacctgttccagagaagaagggtcagcacagtcatggttggtccaggactatcccctgcccctgaatccacacacgctccagcaggaaagctgcacgaggccctccaagttacggggctggcacctgaactcctgtttctgcactcttgcaggcagccccgagacccaggtgactgatggccatggactgctgctgtggggcaggtggggaccctccgtaggagaaataagtctcttggccggtttagaattttttttcttgaccctctcttcgaacaaaaattttaaaaaatacaggtaagattaaacaagagctgcttaagatttttaaaaggagaggtgtgatgggtttcttcctgctgcctctctcgaaggtttttctcagaaaactaacttgtggctgtcggacgcccccccccccggccccagtctgtaagccgccccaatcctctcagatccgagcaaagcctggaatcccccaatttcctcccgtccttattctgggcctagtatagctgcaggtttccacgcaacaatgcttttcttcccagcccttgacggtggatgtggatgtctggaaaaatccaagtgcattttattttcattaccttgtcagaacagtctggagaaggcatctcagttcaaatgtgagtgactggatcactttattgaatggtaagaaatttaaagagcaaagagctgttgtaaatgctacttgtattttttttcctccaaaactccagtcttgaatttatttttctttcacacaggggcatttctacagccacagggtgcatggctgtgcttaactgtgttttccatcctagtctgttcctgtggacgtctacagaataagaattaaccatccttgtccactgctgggatggctcaggctgccaagtcatttcccaagaccagtatgagagagtcctttctcgggctagctgcttcagtaggaatcagtgatctggtacgtggggtttgctcttggtttctgcatttcttggtaaaaggaaaaccttttaaaatgctaagtcataaaacctttggtagtgaagccaagcggcattccctccagactcctctccccttgaataaggtccataaaaatctcaggtttttttttttttttttttttttgagacagggtctcaccctgtcacccaggctggagtgcagtggtgccatcagggttcacaggagcctcaacctcctgggctaaagccatcctcccgcctcagcctcccaagtagctgggactacaggtgtgtaccaccatgcccagctaattgttttccagagacaaggtctcactatgttgcccaggctggtcttgaactcctgagctcaagtgaccttcccaaagtgctgggattacaggtgtgagccctgcacctggccctggtttaataagaaccagagccacaaccctctcagagtgacccagtggagccccagttacctgcctcactctgagagtgaaattaggcagcgagaaaggaaaagccagtttttcaaccagcaggcaactttcccctctcaacagggacactggggacttatgtgccagcccaggctgaactaactactgtgtgacttactgcctcagctaaagcttgcagctcaagaaggaggatgccccttccttcgcgaaccctccgtgggtctggcaggcacccagcctctgtgcatggcctgggaaggaaccactgccctgggttagagaatgccacgtgaacacaagaaaaaggatgcggcaggagttaaccatcctccccttctgtccctccaggaggcagggaggaacatctcaggctgaatgctggccttccccaaatggcccacagggaaaggctggggaaaaggagctggattcactgcccagtacttgtctcatttcccaagactttatccaattctcagccactgagtagggtaccacctgggtcctagtgtgctagatagtttcaggcaggagcctgggagcaagggctgtgctggccctcttggcttatcagggggcttccctggtcatcctccagcagcaactgtcttagcgctgggtggccagcgtcctgggcttgtagacagggacatctttgtcccagagtgcaggctgccccttgataatgtcagctgccttctctgcgatcatgattgtgggggcgttcaggttgccgctgaccatgctaggcatgatggaggcatcgacgaccctgaggttttccaccccgaggacccttgtctgcggatccaccacggcagtgggatcggagggctggcccatcttacaggtgcacgaggggtggtaggcgctgtcggcttttgcccgcacaaaggcatctatctctttatctgactgaatgtggcttcctggctggagctctttccctcggaacggagccagggcttcctgtgcaaaaatttctctggtgagcttcacacacagacggaaatcctcaatatcagtttctgtcgaggagaagaaacaggtgaggacccctccttttgcccgtgctggcctcactggaagattcacggcatggagaggctctgtaagctgtctgaggggatggtgtttggggacaaagttcagggccatgggggactgagccagcaggctgcttgtccctgcccacagcgggttagactgtaccgtgtagctcaaaggtagcatcctacacggacacagcccacccagaggcccaggtttaaatcagggatctgacttatctgtagggcagggataagtacacacaccctgcccctgctacagtggggctgtgagcaccctgcagccactgctgggcaaaacctgcccagtgggtagtgctcgtttttgctgcatgcaaagaggcaggcccaggaatggaatttgcttttagagactgctcagagtgacaacaggaaaaatgctctacctacagacctggcacctgcatggcgtggtctccctgcacatcatggcagattgttctgaaagctgaaaatctcccctactgtctaaaccctgggacttcatttatctcatgtgtcccaggacactacggggctgcctatgcaagtttacagcctaaagtgacacggtgggggacgacagagggtcacttgtgtcctagaaagtgtagtccaagggtatgattcagggataaacaggaaccccacaaaggcattcgtttgttcaagcccaggaagacacaggtgggtgaagtacctgttgacaagtagttgggctggatcacagggtggtcttggggattggcacttctcagtttgagccagcccacactcgtgccccgcatgggccccacatgtacctagaagaacacagaggaagcagtgacggtccctccatagacatccacagtgacctctgtcaaccctggtttacctgtagggtgggcctctgcttccagaatcagtggggaacagatgcatgttagcatttgcccgcatggtacccacctccacgagtgattacagaccacctcaaggaatcactctttcatcctggcctcatactccatggctcaaagctttcagaggtggtgatcccagagccaagtcagcccctctgtttgtcccatttctggtgctcggtacctagcctgcatgaaacagtcataccattggcatgcaccacgcagactgacacgctgggcagctggaaggcaggggacaggcctctgtgtcccccactctgcagccatatggcaccagggagaatgctgccttggaagatgggagcatcttccttcctggtgggaaggagacatcctgggaagccgaggctcttccacctgctcacctggtaagcctcctgctgggtggggacccgcccgtggtcaatcacttgggatggcaggaaatggaactggatgtccgggtgggggaccccaggctggctgcggatgaacccacctgtttccagatgggcagtggctccctcccctgagaagcagaagaggatgaggc

SEQ ID NO: 96211 - DNA, 90097 bp, Homo sapiens
  misc_feature (1)...(90097): n = A,T,C or G
ttatcaaaaacgccttccccatcccccaccgtcccttagccattcctacaaactctttgctccattatcttacacttgagcagaaaatcgttagaaatatttggaaacgaaataatctgtcaccttcttacgaaaaaagctgaaaatagtgcataaactgatttaacctggggatgtctctctctctctttttcttttctaaggactgagcatagagggggagatgggaagttgttctcggatacataaaacagtaaggtaagaactggataaaggaccatcaattatacattctatagggattttatatgccccttcttacatcttttctaaatagtaaactttattatcctaaatcaatgtctagcttacaagcacatccctccctgtgaatgaagaatttgtattttgtgctaagatgcaatgaaatgtgcaaattgttcactgaaagaaaaaaaatcagagcacaattaaaaccaccaaacatctttcccaacaagggaatttaggcttactcaattcattctagagcggattttaagatgataaaaatgagaggcacttgcataaaatttaaagcaattaacattgcttaggggagatttggtctaggattaaaatgaactaacctgcagtgaattattaagcctctattcttaaaaaattcggtaaaatgtcacatccactgacactgtttgcaagaacacaggatcttcctacaacgtggtggtgggagcagattttccaacagagtagggaaagcgggaggcaaagattctgtcccctcccaactcaaaagaaaactgtccccattcttttccgttaaggattcaaggaagaaactaggggttaggttgttcatatggagatactatttatattaaaaggattcttggcgtgtgtgcagggaaaaaagaggcatggattttaaagtggagcacattggggagctccaaacatgggagtctgcactcccgcgttctgaccacaaaattcagggatccacctgtctcccgccccaggaccaaccctggtgacccagggcaggcagtgcctaggcaccctggctgtgcctctctccccaggggagaacttgccctttggggaaggggaaagggaggggtcccagggcagcagtaagcctgaagggagaggaatcacaggaggaaaaaaaaccccacagagtttattaacactcgcaggtagagaggcccaggagacccagcgcagcccggcgggagccctctccacctctccaccaaaggcaggtggtcccaccaggctgtggcttatagttctctaacgcctcaccttccccctgcccttcctctctcagtcgcctcctccccatatcacaccatttccaaaaggaattttattcacaaacttttgtgtgtgtttatactagtgtttgcaatcaagagtacactttatcagaaggagaaaaagggaaaaaccctgtgtggaacttcttgcccgttaaagtttgtttggaaatcttttcagtctggtgtcatctcaacttctagcaaatcactcatgcgttctgtgtgctccacgtgaacacatactcaagcccttctttttagctgggctgggtgcacgctcttactctcaacagcactggcatttcatcccataatgaatcaatcctctgctgtgtccacagccaatgcaaacattttcaaggatccctacacactcccctttaagccattccagaccagccccccacccccgcctccacacaatcctacccatggttcaatcattcttcccaaaaggtttccaaaagttttatatcgtgatcagcattcttccatactacagtcttgttaggaaggctaataggaatctcgaaaatggacaaattaaatgctgcatcaagctacttaggaaggtacattttgtccttcagtccgtgcaagggactttacggtactttctagtacacaatttacaacatagttacagtcagaacttactcctccctttcgatattattattcaacttgacacatgcagcaccgtaaacatttcgatgggactttgcaggcctctgcagagggcatagaggagcgccttgccagtcaagtcgggcagccagggacccacggagcaaagacctaagcgggcatggctccgataaagagtgaggtccgtttcctccctgttgcttcgccagttactaaagatgagtgaggcggaaacacgacggtggggagcgcggggaatggaaaagccagaaggtctcgcaacaacccggtatcacctgaatgtctgcaaaacgtgccggcaaaggcagccatgcccccaccccgaccctggcccagctgcccgggacacgcgccacgcggcggtcgttaacactcaggggacagacaacagtcacactgcactgacagcacgcagacaacaccggcgaggtgcacacccacacatccaacgacaggctccgccactgcgaggcggctgccaacctggagggaacagggaaagccagccgggtcccagcctccttcctccgaagcacgtttacctaaacgtcgcagtttgcgtccaggctgctcccgctccaccctaaagattatgtcaacgcaggaactgtgggtgcgcgcgggcggcccggcggggagcctccccttctgggtcccgtcggttttatttcgggagcgggagggggaggagggagggctggaggaggggaggggaatcccaaattaaaataaccctcagttatgaggacgttcggtggcatcggatattcacaccagcaacagtcacatcacattcgccttcgccagatggcggcgggttcaacttcccgggatctcgcaaactcaggctgtgcgcccgagcgcgcgccggagtgtgggcacgcgggcgggctggggactgcgggagcggcgcggcgcggcgcgagcccggggcgagaacgggggcgtggggttggggggcgccgggctcaccggttccggacgaggaggtctccgtccccggggagcggcaccgggcagtcccggctcagggtgacggcctcgcggaagttggggctcagccgggtcaccaccagcttctgcatggcttggggaatggcggagccctggaagtccaggaagtggcgggcgtacgacatgtccacgatggcccgggccccggtgggcaccagccgcagcatggcctgcgcctccgcccgctctctgcgccgacgctggccggggtcggcccccgcccgggccgctcggctcggctgtgctctgctcggctagggcggcgggtccgcccctcctccggccggcgccctccccctggctccccccttccccgcgtcgcccgctcccgctccccccgcctccccggcgccggcgcagcccccgcgaacccgggcgcaccaccccgggtgtcccggcctggggaccgctgccgccccggccgctgctcctttaatctttttgttttggtttgaatctgctcggcgcagactggccaaggatcctctccgccctcccccttcctcctggcgcgggagaggcaccggatatccccaccctccccgagctctaaaagccggatttgactcctctcgggcaagggtggcgggggggacggcgggcaaggggggacgggggactcgcgcgtcccgcggtcgtctgcggccccgagccggcggcagccccgggcgtccccggagctgcgcggcggccggcgcaggcgcctccccttcccgtgcgaagcgttcacttccttgcaaggtggtacgaatcaaccccgagcgcggcccgggcggcggggcacgaccggggaccccgggcagggcggggagcccctgccgccgctgccgcacgcgcacccgtaccgaccgcggggcggggaaatgtccagtgcctcccgctccccaggctggtggcttcctgtccccggaaccccttgcgcgtgctttctgtccacggtctgtcccatgcaagttgcaggaactaagccattttatttattttggcctagatttcatgtttttccatgaatgttttaagtagatctacaagactgttacaggtttcccattgggagagaacacacatatagaaaaccagaaggccaaattcccagagcacagacacattttaaagttctacgtggggatgccgagggacttaactgaattggagacgttgcactgctgtgtgaggacctcattttcgaacccagctagaaagatctgtcgttccatcgtgtccgttttctccctactggcgtgcatggaccaaatgtcaattcactttttatagaggggccaaattaaatatttccacacttttctgtgatgaactaagtccatctttacatttttatttaaattgtaaaatttaattttaaaaatatcttgcttttcagttacccacgaattaccaaaatataaaagctactctgggctcctccccagccaaatctaaccccccaacctgagattgcaaaagcgacacagatatttttccccccaaatgtaggacatgcttcacccaagggtagtttggatgcacgtggttgcgtgtgtatgaatgtgcaaatgtgtgtatgtgtatgtgtgtgtgttgggggggaactaacaggtttaaaaatctgcaggaactaatgtctacttaacttagagcatatgggttttacccggtatcagccagtgggttacaataacaacactgaatgaattcctccaatgtacaatcttttatgttatgctgtattaagatttcttttttttgtcatattgtttagctccgaaaaaaagaaaacaaagcaattaaaaagattgacaggtatggtttgtgagagacctatttgtaattgtcagggtgacgttggcgagaggaggaggagtaaaaactgaagcaggaaaagcagctcgatgtgtctgtctatcagttgagactgtctgaaagctctgcgatccgaatgtgtgttatatttcactgaaaagaggagagagcgagagtgcatctccctctctcccaggagtttgagggggggggggacagtccacgctcatctcgcccacccagtgaatgtctgctcttcaccccctttgcacacactctccgggttgttgttgccttttttttttcttggagggggggggtgctttttgtgtatttttcaaatttttttctgttggaagatcaagaccggccaaaaatccatgatcaaaatgtgtttgcattagatttcgcattggaagaagcggcgatcctggcggccaagccccccgggtggaagcgcggggcaccaagtggcgctccggcggggtgacactgtttgatctgtgactgtttggaaggtggagcagcgcctgacatctccccccggcgcatgtatgtacgggggcttcactcctctgtcttgtttgctttcttcctcttagactaagtgcggggaggaaaaggacagcctgcatcggcctcgctggcgcacaatgagaaagctgcgacccgcgcactaaaaacactcgccgcgacccccaaacagcgaggagagagggggagagaaagttgcgctcggcgactctcggctcgcggaagaaggcgcaggggagcgcccggagcggcgcgccgggaggagcgcccgcccagcagcagcgcggcggcggggaggcggcagcatggagcgcgggccgcgggccggcccgccgagcgcccgctgctgcgcccgcggcccgcgccggggatgactccgggctcggcgcccaggccccgcgcgctccgcccgcagcccggcggccgggacgcggcccgcgccggccgccgccgccgcctcctggagcggccccgggcgcggcggtccatgcgagcggctccccgcggtccgcggcgcgcccggagcccggagcccgcggggacgaggccaaagttgggcgcgccgcggagttgcgcccgcgcccggggccccgcgtccccgcgccccgcgaactccggcggcggctgaggcgacggctgcggcggccgagcagcatgccgaggaggaagcagcaggccccccggcgctcggcaggtaacgggcgcgcggcccgcgccgcggggagtgggcgccgggaggagcaggaggagggggcttcgcgggccgaggtgcgggacgtgggccgcgggccgccccaagctggggaggggaggcccagcctgcgctggccacagtcgtctggaggctgcggtcgccgtcctcccccacacccccaacctgggccggcgcgtggagcagagaaagttcgcggtgcttctctgcgctgcgggaagcccggatggccgggggaggccgggggccgcgggacggcgggtgcttctggctacctcaggagggggcgtgcgctgaggggaagtagttgctccttggctgccggagcgcactggaaaagtcctccaaaggcggggaggctgaacctgacacttgaaaacaaggtcaccaggctgggacgcaaagaatgtgttcagaagatttctctggaaaacagcagcctttaatgtcctgtgcaagaggccccccgcccccacttttttttattacctctaaagatgtcttttgatcaggccagcacaaggcagtgatagtgcagactctgattgaacagaaaagttatttttctctggaggaggaactggcaggagctggttttccttgttttctgttttattagaggattgccatccttgatttgatgtgtgattgatcgcctgtcatctggcagcctttgatctattcattcctgataaacatcaataaatcactcaccatggaaacacacatgctcctgacagctccgccactatcagggcaacttttctctctcgctcccccttttgctgctccattttaattttgtctcrgaagttttacrgctgcagcatcccttaactcagctcacctactaatccattgctaaacctggggtgggtcagctgccgtgcgtttttgagcacaggtttgaaaatagcccagtgattctgctgcctgctcaagtcttgtctcagttttggacattgcgtttgtggggctgagaatgcaacccatatgccagtgagttatcgctaaataatagagtaaatcaactctctccaagctcttagggtaaaaatattagaaggagtgttttatgtttaaacatgagcgactctttagctgttgcagtayagaatagaatctgaataagtttgagtatcacattcagtaatgtgcacgtgttcaagtctttatacgtgctttttctggggaagcacttaaagcagagattactgctactaaaaaaatttgggaatagtatctacgtttatgaatggttcagtaaaataacctcatcatttccattagatcactgatagagatgctctcaaagagttgaaggagattaccttatgctgagtattcacaacataaaaggaacagaatggagaatatttattttggaataactttgagtaatggaggaagaaacctttcaaagagagtatctatgccactggtagcccccaaataatatagctcagtgtctcaagatattcgccacttgctcatgctagaaacaagaggtctttacattttcacagttagagggatttttttttaaatgacagaatgtacaataaaaagttgtgttcagaaaactactcctgtactcttaagaacttttgcagttaaaattgcggtgaatatttccaaggacaaacaaaatgctgagggaatgaggtactgcaactttaaataccacattttttttttttttaaataaaaggtttgaaagttgacaagggcatgatggtgcatggtaatccatcctggcagctcttacataaaaacaagccgtcaaggcgacttttttccaatattgatttaattgtctgtcttttgacaggcacatatatcattggctttaatggtcaatcaaaagttggcaggcttagtgtttccattctttcctctacacgacatttggcatacttaatcaaaatgctgcaaagtgatggctatgaagagttgatgactgagtcatctgctgtacaggaacttgagagggaaaaaaccctaaaaaatggagccaaaatatattttagttgagaggaaattgagacagcacatgttccaagtgtcctgtgttttgaagtgagatttcaaaaatagattccatactagaaggttctgtgtaagtttaattacagggtttattatctctacyttgattccaaacctgtgggattcttgtgttcattaratgagccattgtttagctcttcccccctcactcataaaaagcattaacgtggattcctagcaaaataaggctgtttgctttcatctggaattacttccattaacacacgttggttcacacttgcttattttcactaatatttacattggcataagtccttcctatatttgtaatgggctaggtgagaaaatcctgatttccttcatcttaagcgtttaataaggagccgtcgatgtttataatctctgcagaagccagtcagattccctcttaaagtagccacaatgcattggtagcaaatattatttgttcattttctggaaaagaaagagggcaatgatatacatatgtgagtcaagcgattttccaaagtgtttttattataacatcctgactgtttttttcttaaagctgcatgttggcctgcctcactgttccatccgtaactgatgagtttttcttgagartatcttagtgtcaaataattgattgtttggtagccaggaagttggtggatgacagatgtagaatagcaatacttcacagtgatgagagaggaagggaaaattatccaaatgaatcctccttatgtaaaaaaaataaagaaatactgctcagaggaaatggtcccttcgtaatgaagcggcttcttaattatcaaaaaaggtaaggttgtttagccagcttcattaacaggcccctaattatctgtaaacctgatggatttgtgacaggcgtaacgattaatgcggacaaattcagtgagctgtcaagtttgcatcccgcttgatgtaatcacgttgatattatacagtccccatagcctgtagtgcagtattaactcaatttgctggtgcaggtgacaaatggactttgctacctgactaatcatgtcacmgagacaatgctgcttaatgacctccgtaatcctggctttgaactgtgcaatcaagccaagacagaaaaccaaccactcagctgttatgtatttttatttcttcaatgctgaagaccctcatggttatagttgctgtgacttagacatgctgttttaagtgaaagggagrgacaggcctgaaataaaaagttattaaaaatcagtcttttcaggtgtatgcagaatagatctgtaccagagaatgtcgctggctgggagcacaccgggccgtctccagtgattctcatgccatctgtaaatatgtggactagggcagggcaagtctgtgtctgggtaagaattatacctgtgaaatcacaggagtgtgcctctctcaagatggtgaacatctcaggccctggtaggcctgaaattccaccctggcacacacacacaaagaaaactgatattgagaaaaagcttaaacggtggatatctcaaattttgtcaagctgtagaaatggatgtttagattcaacaccccagttgtagctctcagttgaacagaggagggaaaatgcttgatcctaaaatggcaccttttcctcccaggaaggctaaatgatgaacttccaactgcaatatcattgcaaaatattaaatgatgttgattggatgagtaagtagatttcagaggtaaactgcttttataaataagatgaacaggaaatattctgtgaaaacatgtagtgtctggataaacaatttgtcttagtggtgccactgtaatggccgccctcctaccaccctgcacacacaggttgtaatcccacggggaggggccgtagcatgtatttacatgtgttcctttgttagtattttgtcagctacttaaggctgccctgttctgctgggagtgtgtgtgctggagtctctgtgcttatactctgtgtatgtgtgtctgtgtgtttgtgtttgtgggtgtgtggtggggsagggttggaaggggaggggggctggtcagttttattcattcattcattcactaagagatttaggcgccrcctgcgtatgctttctgaatatttaagtttaattttgttaattattatttattcatacagggggatgaaaatagtaagaaacagttttgaatgaagaccgaaatatcttttttttaattgtaggcatgtcttatttcctactcactgcatctctttagcataactgttagcaaacaatggataattttctttcattgcttattatgttaatattatgttaatgtatttaaaaacatctagttgtgtagtatacttcaaaattactctttaaaaaaatggtgatattgtgtatttcctgttgcggtgcttgtgatgtttacagtggtggggtaatttgtgatgagctcttctaggccaaatagaagtgaaactggatctgggtaggaagttagagattttatgttaatgtattggggaggggaatacattccagaaagtttctgtagtatctatacaggccgataacgaaaactgtttcactgtaagaccattttctccctaagacttatcatacccttggttataagaggttttgtgttgtcttaggtcagaagtagtattttagaaatcactttgccctattctggtcgttggatggctgcatatgggtgcagaatgtgtgagctattttttgtggctgcttttgaaagcatattggtgatggagttgaaccaagacagtcgcccagggtggtgcccaccagtgaggcttacgtktcaacagagagcagggaggagggcctgggtgggaaggaggaagtgttggggtcaggatggtattggcttggggagcttctggaaaggcatggtccactgggccgggacscactcctgtttctgcctgtgcattttcactccagccaaacgccagactcaccgaggaggagggccaggggaaaggttaattgtgccctgtgccgcctgatcatrtatagtaaatgctatcaacagaaagttcctgatcaatggcgcctgctttctaggcatgctttagctgtggtggtggagaggcctgggcaggggtttgccaagagttttggctgctgaagggaaggcagggcctagaccttactccctgtgtgtggggcaaagtgccttaggcaggcctctgcagagggctgcttggttcttatgaacgattaacagtgtcataaacagaacatcccaagaaatagataatcattgattgtgtgaattcacatttgcaaagaacacttgcgataatcattttcttttaggaagacaacaacttgacaacctgtaagggattytgaatcgaataatagaactagtttgtcccctctcccctcctccaagggttttttttttctactttctgttttttattttatagaccaaatggagcacttgtcatagtagtgtttttgtttgttttgttttggtttcttgtttgttttactaggcagaaaggaaagtaaagactgtactttggaggcattagaacaaagttgtaaatgatatcttctggtttatcctttttaagaaaacaatgaaccaggttttctttttggagaaaggaatccttgtgtggttgtgcctttgttgggctgcgttcgctcttgctagaccgcaactttaataatgcaagacttttatgtttcatgcaaaatattatgtatatgggtttctacctgcatggcgtgtcacgaagagcatgttgttatgttgatcgtggaaagaagggacttagggagattgagtattctcaagtggtagctagcactcacagtgatgacagaataatgacatttatatctcatgaagagaatggatattgggtcgattgttataaaaagaaacctcaaagaacataaaaatttaaaaatattctgaaaacttaaagaggtgtgctacccagggggattctttctgtttttaggtacatgttttcctctcttccccacctcccaccttttcatttgtgtaatcaagccctaatgccttgactttatgtgtaagatgtgcactattgttgaatcatagatggggcagatattaggaagggattaactgctaccaaaacccaggtttcaaacaaaagccaggacaatttaggtagattagagcaaaggaaaaaaatatgtgcataggaagggtattaaagctgacagatgaacagggcgagggacaaattctcctacagcagctgtgactgctgccattatcttgacaggtgtcaattaagaattactgcctgctggagtcatttttccagcccagctgtctgcgtgtgaaagaaataacactttacccttgtcactttgttagttcttagctatagcctcaaaatgagtgttggtgtgctaatcgataactagtgtattagcaattttgcacattgatttatgaaggggaacagctcctcctgtacagttattagctgctgattaaatgtgcctatgcccagctaagggtggatatatgttccctgagaggccaggtctagaacaatcttctacgagactatggttcaaaacactttcatcattgtaagtcgttaactagacaagccccacttagccaagggcaggagccacacctgcacctgtacactgtgggggccgggctggggggagccgttccaccctagcagcctgcacccacrtcagttcttattgttttcttggttcctctcggaaaagcctataaaaagtaaatggtaaattactccgggacaaggctcaagttcacaatggacaaagaacagcaagtgttttattggaactttcttagggatgaggcggagcctcccagaccctacctgaccacaagagagtagtcagtcaatactctttgctgggagggctgtttcctggtcgaaagaatggtgaacatgtatattttttttttactcaaatttttttgagtcaagaataccattcatgacaacaataaaaatagataatggcacagaatattaagaatgaaaataactgaagacaaaatttatttgtgataaagcattgagaatccttgtgaataccttcatggtgaagggattgaaacagttgaaataattttttaatgacataatattttagtattgattaagggtgacagtaggttgctgacagaagagaatgctaaaggaaataatttgatctaagggatcagggttgtaaaakgtaaatatcagcatgtttgatagatttaataaaaggtgtagctgggcagagtagaaacaggtaattttttaagtttttatcaatagggttgatagaggatgcccttacaaacaaaataaagtaccactgtatttttcacccaggaaggtatttatttattaagttgataacattttgaaaagcaatgaatataatttttgggacagcagtttgcaggagcgataacactcctggaattgtagacagcctccatgatcatttgtccttgagatacactaagcaccattgttatgacatcacttaggtggaagtaaaggttaaatcggaagtagttcagggtytttttcttgctatagaataattgtagtctttgccatgcagtctttgctttttgctacagacttagattaaagaaaaatattcttgaactctttctttagactttttgggggaaaaaccccacaacaacgcagtattcttcaggaatataaaagcctttttaatagcagtgataatctgatgcagtctcattgctagaaatgtttctaataagaaaataaatgagggtcattctttgcacacgtgacacgagttgtatatgtgtgtaagtgtactttgtactgcctgctggttacgtgctgaaggcacgcgtaggtgtgcagaacaggacttgttctcatacctgtagatatggaggcacctgtgatacatgcacagtcatatgtgaccaagcccggggttgtgatgccatggtgtccaattgtttatgcaccccacactgaaatagaaaaacctcaggactgtcaggagtaagaggcctcacacattttccccagaacaccgcataaagaggagttttgttacattttaaaatccagtgttaatatttactactagagaacccttccggaagcatgaaaacctaaagacttaggcttgcgggcaaggtcsttctgcatttaaaacactgtgctccatgtagggctaaagtgctagttgacagcaactcaaacaaaatattaatttttttgcgtgtgtgcctattttcttgggggacataggaaatagtgaattgcatagagataagcatcctgaaccgactctttttttacattttaacttcactggagaaatatattgttaaatttatgtacttagaaaaacctaacagtgtggcttactgagaattggaataaacaggcctcctsttaccatttttaatggttattgtcaggcaaggaaaagaggatcatttcttgagagatttttgagctcagttatgctttggtacttccttcattaaatcacctgcttggattttctggtttgggaatatctggattggatttgtattttaattagggttaaactgtttatagattccattgtcttacagtaaaataaaactaaaacattaaggtgaaatcacaactgtgatgttcttttcacttcatatttcctaggaaggcctattcgctaagccgcttgtttaaccttttcrtgttttccaggctctcgtttctggatttgcttttgttgttcatccaccacactgctgcagcagtaagcagttttcttagatgatagacatttttttctttctatgtccattgtgtctttctgaaattctgtgccaacaggaacagggatttgtcttgtgtttttaaaggaaaaaagtcaagaatcaattacattattgtagatttttaccatttttattttctctgcaaaatataaggcaggatttcctcactcttgtgatcgtggcgcattctgcaggaaaatagccaagtagaatccctccaagctcctgggcacaggctgctcccaggctctgcctcccagcagagcccgcgttagccatctacatactgaatcggatgtgcacttccaaatttgagatgtaggcatttctgcctcaacttgctagctgcgattttaaaaggtgtgttctagtatatggtaaatataggtcaagtacttacatgcttataaattccagtttaaagcaggcacgaaggcrtggatctataggagcgagtgatgggcacaggctgactcgagttttagaaaatttggttataaaaaatatcctcagtttttagttaaaagtaaagtgcatcttcagcaagatcatatgatgaaataaattaaatcagcagtgaaggtcagtatacattctgacttgggaatgtgaacttttcagaaacctgtatttattacattttactatttttaaaagccagctgcaagattcatagcaagaaatggtacgacataccaatgaatgctgaactgaagtgaaggctcttttcaaagtggttaatatgccttattggcaagtcatccctggtgcctgtgtcattgttatagctggctttaaaatatatggatttaaagcacaagtattgtgactaatatttatttcaagtacagaatgtgtcacagcagtagggcatcctattattaatgcagtaaactgtgtaatactctataagagcctgccctgcttcagttcttagctacatgaaaataacagtaaaacatgtctgttttctcctgccttgctttattgttacctgggaaggtcctggcatcgagaaaagccaaatccgggcaaataatatgaccataaacaacacctcakcattactgtgctgtgcacaaatctccttgaactgcctccaaactttgagaatatatacatatgtatatagattaatatatatgtatatattttaaaattcttaaattgagggaagctgctataactctagaaagtaatgggaaataaatattctaagtcagccaggaagtgattcagattgttagtgcttggtgcattgtctgtatatgaaacactaatattcttaatgaaaatagcgcactggcggttttaaaaggaagccgcgcacaaaggtctgtgttgtgtagcggcgtggcttgtgtgcttgggttagaggggggttgtgctaccttgcagcgttttatttttgcagtggaaaagttgcctgacttttttttttttttaagcaggtattgaactggtattatttgtcaatttaaaatcagtaatgagaatttattttagaaaaaggaagcagaaaggatctcatacctaggtggagagtaggtgcagagagggagtttgtaacttgtcttttctccctacttttcgataactggaaaaattagtgtctcaaaagctttcaaggagaactaacttaaaactgcgatgttcacaaaagatcgttgtctccttttttttctcaactcctcctcctctctctacgcagagctccgagaagctggtggaatggggtcgagggatggtccggggcttgagcactccaggagctcaggttcaatgctggtgacagccaccctgtcctgagatcatgggagggggttttcgtcctcctcctctctggcttattctaaattatgcaaaatgagatgctaactatttgctccaggcagactatgtttaaacccagttctcaaagactgccccctccacccccctattttttgtggagacacattcgaatccagtaggtgcccgtgtacgtggtaacctaatcccaaggttctcaagcaattttctgaaagtaggatcttgttgtggtgtttggctaaatttctgggagtaactggctaaaggcattagactactgagagtctggcctattcccaaagggtctctgcaaattaatcaccctgtgagctaaatttgtttatagacatatttggaatggaggagatccacatgggatccttccgttcatttgttctgtagagcacctgctcggagtattctgtggtacacctccctgccycccagcactgcggtacttgatatctcatgatgggtgtgagggtgatgatgaagataataatacatttattcctccgttcttcctcttgggaattcacggcactcagttatctcaacgagagtggaggcggtacaagggatttagggatacatggaaattatatatatataaattcgtttgtctgtttctatagcaattgcttcttaaaaataatttagtagtttaatacaaaagcagtggatgggtttttatgtgctcgtatagggaagatttttttagtttcacacatgttcagttttaatgggtaataattacatctttgtattttgatgtcaggctggttatgaggcctaattctgcaggcagcctcctcattgatttgcacctaactgctgattttagagagagggagttgcaggccaggatccccttctgtttttcagacaagttaacacataagtggctccttcagttccatttcaacagacagttgctttcctggcctgtcttctccaggccctggaatcgaatatacatatggttttgtggttggggcttttttgaaagacagattccttaaaaaaaaaaaaattgtcccccactccctaccccgcctctcttgctaggcatccttttcccacctcctcactcgagtttgtagtttgcaggcctgattctctgcagccctggccctgcatgtgctgggaaagcagtaaaaatgagcactaatcaatcttccagagagaagcaatgggcattagaaggccgctatcctgtgactaaacacaccccctttatggagtgttggtactaataaaggccagcttattactgaggcagagaccaaagcctggatgaggtcaaccatgactgacagtcatcagtcattcttaatgatactttttcccgtgctttctaagggattctgagcagagtgcaaatcattcggggtcattcatagttcatgtacccacagatggcaaaggttttgaaagacttcagtttaaacttgtaaaaaaaaaaaaaaaaaagatcctcactttttttttttttaaaggaagggaaaataccccaaaacaaaacatagatttttcttattggaacgctttcatgttctttcaacctaatagatgttttacacactacggtgcttgtgcattattaaaagagacataaatttatgttttatgaygtctgtcttctttaattattacctttgatgtctattggtgactaaagagagcttaacaggatttctttctcttcttaaatttcgcatcgtgaaacccagctagtccctgacagatgtctgttcctcaccttcaggattattttataaatccctttctgatgagcggaagtgtcaaatcaaggacaggtcataaagtaaaagtataaaccttttaaagagagaccttggtaatatataaacattctgcacactatctgaattttttatggactaaagaaaaattatatttcagctggaggaagggagaagtttaaacatcagcccagattttaatgtatgatccccccctccccgcaatactcttatttatagccatctaagaaaccactggctttatcggctattttaaacatttggactcgatttggagcctgcctgttaattgtccatgtttaaattcagaaggttgactttgaatcaatgcttgcacacagtataggatacagggtggtggggaggggtgcggcgggcattggatgtagggtagaggcctgggtctttgttctttcattaatctctttttccctgttctttctcaagcctcagtttccttctctgtaaacaaagggcttatattattagagaattcctaacgcgtgctattctacaaccatgtgatccattgcacccatctttagcacccctgagttggaggaagtcgccgtcatgaagcaacagctgtcctttttttttttctttcttavaaaagctggttgtacttagagaatttgcttttggtaaaatttgagtttatttctacttatgaaattggaaataagctgaaatcaacaacttctgggccctcctgccattttcatgtcaaggcacatggagacatgtcagtgcacgtgggacgyggaagctgcacaaggggtgttcttgggtgtggacgtgcatggtgggcgcacaggcctctaggaaatgcttcctcggttctgggcaccttcaatcatggatgatggggctggaaacttgcctatagctttttaaagaaaaattaaatattttgaattgaattcagcaatttcttgaacacctactgtttgtgagtgaggcctggcggtaggtgagcatggcgtggagctcgcgggagagttggagatgtgatcgcttctgtccgtgtgtcagcgtgatggcctgtccacgccgctttcttctgactgtgagctggcccatctctgtacgcttgccccacaacctcagcatgccctttggaacatcagaagtcccccacagcctcagcaggtcttctgagaactaggaattagagccccactgtcgtggaaatcaactcgtcatcaagtagggccgacaatgagacagctgaccatcctccacattccgagcctgaaggggaaaggttttcccaaggagaggtgctggtgggctcgcacgccatcctgagcacagcagacagcagttaatgcaagactatatctcggtggcgggttttacttaatgttctttattatgaagaatagcgatacctcaaagccatacattttttgagagtagcttctccatgttgatttttctttggatgggttgcttagaacggagccaaaagagagccacttggtggagaggcaggtttgcactttgccctgtttttgtgtatgtggatgtcaaatgtcaatttgtttggtaaaatgtgaagctgaatttataaatctgtgctaagcaattagtttggaaattagtgctatctctaggaaaatccccttagcaggcatcagattcaaacgatgcaactcagtaggtgtgggggcaaaactgcaacatattttcaaggcaaaatcttacaaatataaacattatatcaaatataaacatatgtttgcagtgtacaaatgtcttgcatattcaaagcaaataagtcctgatgggggaggaaaaagtatttggatgtagccgttatgtttaattttcytcacacagtcagtagatagtctgtgtctgcaaaggattggtcctttcttgctccccactcacccaactctgtggttctagaaccttctattaattcccattggtgagcccatgaaatctttgattccttcttgattgctctctgaagacgcctatcaggcactgtcttatctgtttgtaaagcagctcaggccccagatttaagtcatgggtctggctacaagttagagtgtgattaataattgactaatgtagcttttatttatcacaggctagcacatttcgccattactgagttaatttatgttaagtgtaagctgtcgttcaatctgtttttcaactttttttttttttttttaaatcctaagtctatctttcacttttggagaaacaaaatcctcatacagggcacagacacactcgatgccaaaaagttgatttccttttccctggagccatgcatcaccagccctcccagccgcagtgtcagcccctgacagaatgacatgtgtcatttatcaaaggggccaggccgggccttgggaaacgccgccgacaaagcctgagagagttcattttgcagtccctcctaccctctgtgagccccttgccaggaaagcctgtgatgtttctgtcttcagagcattactgtaagtccttcaaccttcacagaattaaccctccccacctcagcccgctgcaacagctccgaggtcctgcctgggaaggttctgagacccaaaggagtgattgttccaagcccaggaacacacaagcccccggctctgtagggacaccccatggagtcccggctttccgtgcagaaagcatgacccwggtgcccctgcatctccccactttctagcaggctttaaggattcaagccctgagtaatactcagtgagacaaggtcagaggcataaagaaccagcagcaaagcatttccctggtatccaaattcataggtcccccactcctgcggcagaagtttggtcttctattttttttttttttagagtctgcctaataagtgttttactccaggctatttttgaaaccacctactaaacccgatagatgtttcttctttttctctgttgcctagaatttgtaaccccattcccgcctgcataaagacagtgatgaggttcgagtctaaaagttgctaaaaaaggatattttggaggaggaagagaaagggccatttttgcccccagattgtttactttttatataagttcccaaaccactagaaaaccaccagaaagtgcaaaggaaaaaaaaagtcagccagaggagagcatgctgtgaaaatataaaagcatttggctaaaataaatgtttttttctcttgaagagtagagttttgcattgtaatcatgtgtgagaatgtgagaaaagttattgtttctctcatccccacccctttgtacttcgtacagtccctaccacactgaagttatttacagcatcagataccatttaaagagatagtgaaggagactgttgccttcgccaggaactttccagaaagaagtcctataaattagccattgctcaggagtggctgtttcctaggcggagctagccctttcatttttctgcataaggctaatttatttttgcagccagatgtgggctgacagccatcactcagggcttccttcccccgccgttaggaggtctggaagacagtcacgttccccattttgcagaatccccatcaacattattgaagatggatgtatctttaaagcaaagattgattgtggatatcggagttatggtgtcatttatcatggtgaatattatttagacttgggttgtacaaggctgtaacttgagacacagccaggggagggacaacctgaaaacgcggatccatgaattttaatggatggatgcttttttcaaagctcaactcactatagcgtgatttacttttcttactgcaaggaaacaagcatttcagtcttaaagagacagcatgccagtggtcctgttctgtgggttccacccgggaaggcattaccaagggcagtcagagcccaggcaaaaatgctgagaaggcgtgaatggtgcaacagactctggccatagacatgtacattaaagatggctttccagatggatctcctcctcgccatccttataggaccctgatagggttagaaatggagatgtaccccagagctcaccattatcagggcagcagttaagatgctatttatttgaagccagctaacctctcctaagtgctacagatagcggccatttatatttaggaagacaaatgaagcccaggctctcccgtgtcaggagcatgatgctgtggggagaacgcacagttatccttgtgtgcctaaaggtagtagcatatgcaatacaagcagtcttgttgacctaattaatatcagtctttttcattttgcttcaggatggcagcgctattgacatttgctcagtagggagttggttctaagggagctgggtatacaggatggtgtatccaaagttgaacctctcaacggttggtcctcacatctctagtccttgaaaatggtggagatggtctagtgcatttgtcctttcttccaggagcacggatcccagcatctaggcattcactcagacaccagggaacaaggggcatcccactttatttctaacgagatgcttcatgtaccagaaacctggggctgctggtagctattagtggcttaggtcatggccctttggcccctaaggcgttttatttgttgctaatgttgttttatttcatctttccatttcaggggttttgttgcatatggtggatagaggagctctcaaagtgagtgaggggttggccacagtcagccctgggcggggcaggtgttgggcgtgctgccctggcctgcgtgcagccatgtgacatgccatcccagggcaatctgggggtgggtgccacccgacctgccggccctcctcaaagcccacctcagctttgatgctcagagagtgtggcttgcactgcagagcctaaaagccctctttggctttttaaatagggaaggtttcttggaattgtacagtctgttaaacgaaagtaactttctttccaggattgatgcgtctcatctctgggagcttccggtccgatggtgtgaactgctttctagtataatggcccacactgtatgcaccatgcagggggacccatcggagcacctgtctctgtctatgtgattgctcactgacttgttcacgtccttgtaggcactctgctccataagggcagggccatcttgttctccttccactgtcaagagtccagcacggttcctggctcatagtcagagctcccggtgcttgttgagggactgaagcccctccttggggaagccctggctcttgcgaggacaggtgagtgtgacagtctgtgacatgcggtctatgacgtgccgaccctgggtgctggcgatagtaggtgaaagaagaaagcaggaagctgtttttggtttcaaagtgctaacccaagtcaggcagtggactggtttttttggaagctaccttccatgtaacatcaatctaacctaaaagaaacaaacaaaacccagtgtaacaagaaaagggggcaaagaaagatggtgaaaggaattgcccatgcctccttttgaatgttaagtaaaaacaggaaaataccatctggaaaagtaatctgttcatcattatacatctacttgtggaaatgctcataatggtggtgatactgggtattttagaggacaaataccaagacatcctctcaatcctattatggtttataggtctgtgtttatttgcaagttaaaagcacattcttggccttttaggaacatatgacatgtctacaaacaggaagtagtttatcaaattcatatgaatcatggcatctatagtgttggccgaggtcaaatcattacactaaatgtattgtaaccattattaatgcacagggtctcctgccatctttgtgatgtargactgccgtttcctgattaaaagctgtttggtgatgagaaattcagcagctcctgtccgtcctggagtgactgacaggcacccagagctgccgtccctgctggagcagcgtgttcctaggagcgcaccttacggagggtcctgagtgccaggaaatacaggaaacaggaaacaaaaacagaagtgactcaactttcgcagccacaactgtgcatccataaggaggccaaatttatcacggcacattatggagctcagcaaatgtcatgaaaaccattgttttttaatttttttcttggagagtttgaatgaggtgatttatggtagttattcatcttaagggtcatccatcaatttttagttgctaggcaatcaacccagcagctgtttgctttgaatcaagctgaaaagttgtcagtcaccacacgcaggtatgaccttagtggttgcaaacatcatgcgtgcgaaattaaagagacgtcgtcttcttccccgattcccctgacttccccgtgatttgtggaagtggtgcgaacccttcctggctattacaagacaaataagaacaaaggagggtgtggaaaattacttgactggaaactcacagatactcttccaacgctgtattttacccaagttccctatgcragctgcatgggatggattatagaagtaagtgccatcagtggatgggaggtgaaccacttgatttataatatttaaataagccagttaaaaaaaacctgtcagttcccttgtggggaaaaaccaaatatcagcatttctcaatgtgcatcccaggctggaggccagcctgatggtgtttttgggttggctgtgggtggcatgtgaggagatgcagtttctctccagtggtggagggtgggaactgtgcgtgggcctgacaggctctgggcacacgaggcgctgtaggtgcctggccccaagcctggcacagagtgggtgcccaggtggtgcccacttgctccctctgctgagatctcaggctgctgtgctggcaggggcagctcaggcgggtgtggccctggagccaggctgcctttgcccattaccacaacactgtgatcctgcctggggcatggtccttcggaggtcatttccacagttgcttggtgtgagtccttctctggcctggggcttctccccagatctttgtatttttgtccactacaccagaacactgtgagtctcattagcattgttgaccccaagaagacatttctagatagctgttccttgctggctcatgtgtaaacagtgtttcctgcctgcactctgcaattttatttatttatttattgatacagagtctcgctctgtccccaggctggagtgcagtggtatgatcttggctcactgcaacctctgcctcctgggttcaagcgattctcctgcctcagccacctgagtagctgggattacaggcacccaccaccacacccggctaatttttgtatttttagtagagacagggtttcaccatgttggccaggctggtctctaactcctgacttsggtgatcctcccgctttggcstcccaaagtgctgggattgatgataggtgtgttccactatgcctggcccactctgcgattttagrtcttcacagggcttcaaaaattatccctaggaaggaaaataagtgcatgtgatgccttatttatttatttttgagacagaatctcgctttgtcacccaggctggggttcagtggtgtgaactcagctcactgcaacctctgcctcctgggtagctaggattacaagcgattttcatgcctcagcctcccgagtagctaggattacaggccacaatgtctggctaagttttgtatttttagtagtgacagggtttctccatgtttgtcaggctggtctcgaactcctgaccttgggcgatccacctgcctcagcctcccaaagtgctgggattacaggcgtgagccactgcgcccggacttttttttagtaattgaggctagatttccctcattttgaatctttcaagcaggaattttactttgcctctcagttgagttttaatgcgtctacacagataatttacaccaataaagccaaattttaggggactatgtgttgtatactagtatctttttacatttgatagtttcaatggacttgattttgctgatggccttttagaccatgtagctgtaagatgttttgcatgtattttggaaagtctaaaataagtttaatttggagttaggtttgtctttctcaactttgcattgagagagatatatatatcttatttatttagtaggtatttctgagggtctgaaacacgtccttttgacagatagttctgcacattggaaaagagagttttctgatctaggcttttcaggcgccagttctatttctggactccaggtaaaccctgaaggaagtggagtgtgcccccagttcattcacattttaaagatggtcccacatcttttacttgaaatccttggggccagatatgttttggaattcagagcttttcagatttttgaaaagaaatttagtgcatatactgtatattttgcaacatcctcagcttaaacatgagattttctacagataaatggattaatagtcacaatacttgggtgaggaaagactggcagtaacctcatgtctgttctggtcaggttaagtttgccacgcacagttaggaagactcttccaattctcagggctgcctgtggtgaagggactgggggtctgtattggtgcacagcccatttcacaggatgcctgtccctatttctgtagggctggtagcctgcctgtgtccagcagcctgggagcagttatgagctgggccacagcctcagcagctctggaactcccggctgctgtcatagttttctgtgtcgtaggagttctctttggagttttctcccatgttcacatataaaagtgatatcagttatatctgcagtctgctccgttatctctttaaatcattgaactgtggaaacatattttacatcccagtatattctcatgagtcttataaagtacaaacttttctcacttttgggggaatttggaattagtattatggcacactttacttaggaaaaacctgaaaacttcccctaacaacgttccaggatgtttctgctgattttcatggtgaatgtataaatatagtgacaatactaaaaagagcaccctgccaatcatgtcagctctttaagaaatataagaagatggatgccgatgttatgtgtgttgggtgtggatcaccagttgttaacgtctgagaagcacagatgtgttgggatggtttcttgttttattttattttttggagtagggggacatagtatgagtcagcctggtggattaatgttggaaatctgcaagtgctcatagcttctgcgtttacagaaccctgaaagagaaactacctgtttgctggtctgataatccctttcctagtggccttcctttttgaggagtgacgtggggcttcctcacacttttcacttggaaggactattgcatactctgaattgtcgaagtctaccttgcagcaccttttttctagcgagcatccgcacgcccggcttgcacactgtggaggatgcggttcactgggtgggaagactgtctttatgcagtggtttgggaggattaattaattgatttttagatgcttttacaaacccttttggtgactcgtatttgcacacatactgatgtccctttttgccgtcttcagagctctttgaaatggagggccacactggaggctttgttctttatattccatttaccatcatttagaagatactaattttagatgggctcccctctacacacagagagagaagctgaaatctattctgcaagtgtgggggaatcttgcacggcaacagccacacggccagtgaatacatgatgactggagccggagcctgtgggccagagagaaacggggcagcctgggagccctttattcagaactgggattgtgggttccctgcgcacctactccctgcggccgccctgggccctctccttaactccttcttttcctttccctgctgtctttctttccatccacttmcttatctcttgctgccatcttctctggcaattttcagcgatactttagctttagaagtgttcctcgtaaagtttttgcacagttttaaaagttataatattttgcagcattttgtgctcttcagaggacaattgctccaaaatctaataagtcataataaacatagttctggaggatgggatagtggcgatgctctgggaataataactgctttgctagggcttctgcatggttatttgaargggtttttttttccccccattaaattttgcatcttttgtatatgagatggtcttcattattgtgtttttatggtatttggttggataccaactcaaattaaaaaaaatgctgtgaggttgtggatatttctattaactttcctgttaaatatgacacgttcacccatacatatttctataaacttagttcaagggtatcagtaaaaatatttttcctcctcccatttgctgttcataaaacactcgagggaggaattgtttctgtgatattttagatgggttttacaataaattgtagatattgtggtgcaccacagtgccttttatttcattttctcagtagacccagcgcatcgaaagattttgtgtattgaaaaactgcttttgatgagtaataatcattagtttttctttttttcttccagtagtaaaggtgtagaccccagcccccagggttcctggtgcttgtgagccgtcagcgtgtcacacccgtgttgtgagaggtttccatgcattacctcctgcgcgtgaatgtgagggtttaatcagcacagccttcctgagcataaatcacgctgccttaaatccttctcggaggaaccaaggcggggatgtaaataagaaataaatattgacattaaacgtttaatccccttggtttcctgacatgtggcgttgggtcccttatgctcattcttgcctttctggaaccttccagggggactgccggtcgtacgttgatgccattgggtaaagaaccccacagtggctttgacctcaacatcaaaacttcccagctctatacctgcagagagggtgtgtcttttcttttgctgttagatttctcaactataaattgggatgataatacctgggaccgattcctaccttgtggagttcatgtgctcatttctccaactgctggcccattcatttgtttatctatccaatacatactcattttgagtacttgcttatttcttgacagttcaaggacaaagtaaaagcagctaagaaggtccttaaggtaatggagctcacrgtgtagcaggagtattttgaagactgaagtggttatcaatattaacttcatatgaaatattttattatgcatcctgtggatgtaaaaatttcattgagcaatgaaataaatgttatcaggattgaatatgggaaacaaaaattccattttccaattcatctcagccgtctcctcctccatgcctccccgtggtttggcagcgacctgcctcttgcctctgcctcctccagcgtctgtctggctccttcctgctctccagccagctcttccattctgagatggggaggccactcctgtgctgcggcgttgacactgtcttcactgtcttcaggttctgcgtttcagaccttgcctccacacccacattgaacaagcaagcttgcatgataggaagcgtgcgtgataggaagcttgcgtgataggaagcatgcgtgacaggaagcttgcgtgataggaagcgtgcatgataggaagtgtgcgtgataggaagtgtgcgtgtgtaacatttgtggggtgctggccaccaccctgcagccctgcaggtgcctaagggtgctggggcctcccaaatctttccccacctgaccaggggtgtgtgtctcagctgttcttccccctgaccttcccacgagccatcacaggagggagatggcgttctttgggcagacccaattctaacaggttcccctttctttaaatcacaccacattgtagctgcgtcttccccgtgcctctcactgggagggaaggggctggacaagaagatggacagctgtcaggtgcaccttttctatccatatcccaaagtcacattggcaccttttagattataaaacacgtttaagggatggcgttcattattctttataaatactaattgtagcattcttctgttttcagtgtacccttgcaaagtgccgatatctgataataataacaatagctataacaataataacagcagaaggtttggagtttaaactccatggggacaggggttttgtccgttttgttcattgcctgtacaggtagtgtctggaacactagcagtactgcctggcaaatgataggcgctcactaagtattttagagttgctgaattgactatattcctgacacactccacttgcattatataatttcagttttatagttatcttattattctcttcatttatagagtgaggcttacggaatttaaggtcctatagatagtgcacacaggttgatgtcataaggttacagggtaagacagatagggtcatgtaagttaagcccaggaaggtctgactccttgacctctcaaaccatccgtaagttgttaaagctttagtttttgtcatctgtttccctagactttttctcggattgttgtggcggggaatagcagtgggctgggattcagggtagcagcgtgagccctggcctttccactaggcggcttctgggtggccgttagtgcctcagtttcttcagacgtgtcaacagtgagttcagccaaaggatcctgagatctgttcttgactgagagttgcgtgtcagggcggttcctgcaccttggtgtgaatctttctgttgctgtcatgttccatgtatgaaataagaacagtcaggccaggtgcggtagctcatgcctataatcctagcattttgggaggcagaggtgggtgggtcacttgaggtcaggagttcgcaaccagcctgggcaacatggcgaaaccccatatctacaaaaaatgcaaaaattagccggatgtggtggtgcatgcctgtagtcccagctactcaggaggctgaggtgggaggatcacttgagcccataaagttgaggctgcagtgagccatgattgtgccactgcactctagcctgggcaaccgagaaaggccttgtcttcaaaataaaataagaacagtcatatatcttacatgcatgcatatatatgtgtgtatacatatatacacacaggcaaacatatatgtacacaccttttttctgtttgtttctgtttttctcttgccagtgactgcaagtatttgtaggagaggctgagtgtccttgctcacatcaagctcaagggtgagagatgtttttggaaacagtcctcrttctgmataactcaccatgcgtctcatttatgaattagactgaagccttctttctttcatttatttatttatttatttatttatttatttatttttgagacggggtttcactcttgtygcccaggctggagtgcagtggcgtgatctcgcctctctgcaacctccgcctcctgggttcaagcgattctcctgcctcagcctcccgagtagctgggattacaggcctgtgccaccatgcccggctaattttgtatttttagtagagacagggtttctccatgttggtcaggctgggcacctcaggtgatccgcccaccttggcctcccaaagtgctgggattacaagcgtgagccaccacgccaggctgactgaagccttcttaaacaggcttatgctttgcttggaactctcctcagctacccaccggttactgctgtatttgcagccttgcacgtgacagatggaagcagaagtttccccgtgggcactcaggatgctactgggtgcagacatgccacgtagactaagactcatttctctggacaccctctaactgccacgggcaactgtgactcatgatggaactcccaccagcgaggtgtagacgtgtagtagagtcgtcgtaggcagctcctgtagccacctktgcggggtacgttggaagctctaagatgactaagaattggcaaactgggacatgaaatcacagtgatctgggaaaagcgtcgacatggatgatatctggtttgttttctgtacagggggagtgtgttcttggagtgagactaactgagaagatcttatccaaggcagggaccaggctctgcctccccgaagagcccctcagtaaaggcatcaggatgaagactagaaaagtctgtgcgtttctgcagggtttagtgctgggggaggagctaggatttggggggaggggagtgtcttcttaagaaaaaagtacaaaatcatgaatgcaaaatcatgaatgcaaaattaagtatgagggtgactgcttgtttagtatgagaaagaaatcacaacagaacaaatcttaaaaaactgaaaatgtggcagaatctcaaaaaataacttgatttttaatttgttgcctgacacatctgttttcctgcatctttggctgcacaggaaggtaattcagtcattcctttagcctgggtcgtgggaagtggttgtttattcctgatggctgggtccaggaaatacctggcctcacgcactgtccagcttcccctctgcagtctgcacaaggctgcaggcccacgacgctgcccaggcaaagaggcttggggctgggatgcggccacgcaagatgggaggtggccgcggtgtaaacttcccctggccaggaagagcaagagtgccgtagttctgccattttggaagcccacatggacacagggtccccagggctctggaagggccagcgcaggccaggggccctgaggcttcacctgcatgtagcaatccacctctgtttagggccctgccaactatgataattgtccttgttatgtgagtaattgatgcttctgtattaatggttttattttattttattttgattaaaatctcaggggagcctcaaatgcatttcttaagaaattatataatgatttcattatggaagaatacggacaccttgaccatgtgcttggtttaatttgcaaaattaaatttttgttttaaacttttggttatgaaaacatccaccctcttgaacatatctccttgagtgagattaaagtcccagtcctttgtttttttaagagactggatctggctctgtcgtccaggctggaatgcagcggcacartcatcgctcactgcagccttgaactcctgtgctcaaggaatcctcccacatcagcctcccatgtagctgggaccgcagatgtgtcctaccacactcagctaatttttaaattttgttttgtagaggcagagtcttgctgtattgcccaggttggtctcaaactcctggcctcaagccattctcctttcttggcctcccaaaatgttgggattctaggcatgacccaccatgcctggtagattttaggtttcttcttctctgataggacatgtacatttatgttggaagcagagaactcaaagcattgaatacgaggaggtacgcgatgggtgttgggggcagcccagcatgcttccaccatttcgagaaaactctatttcttgatgtttctaacatgtgtggcagggttgtggtcatttgtttccctgcttttctttgttgaatgtgatgaatatggtaaaaataggattaaagtgtttgatgtcccctccttgagcccagtgatagaatttatccttcaaagataaattatgaacttttgaccttagggaatataaatatccttggagagtttaacgttttaagaagtcaattatggttttaataagcaaagctaaaatttgcttaccgttgcctaagtacggatttagttttaaaggctgccctctctctctcttacacatggttttaggatctcaatttctgcctgaaagtgatatttcttaaaaattttaaggatagtgaatcttacagattttaaggatagtgaatcagcttttaaagaaaaaaaggcattgctcctttttttttttttgacctttggtcaagcttgaaattttagtgagttatatagataattgtgaagtgtagaatttctggctaggggcctgtgagtacccaaagagggttgggttgcttgtgtgccgcgtcctgcagtgggtcctgcccccaggtgcaccgcgagcctttccttgctgtgaacagtgagattttatgatctcagtccatgggtttctctcagctggagcacactgtttctctccacgtagcagcagcacaagttcctgttttgacattgtgtcagctggtcctcctccccagcgggggcgcccgtgagctcctctgatgcttctggttggtcccccacttagttatgtgcctgtgactgmgtggacactccctgcacgagggtttcctcttctcctgtaccataaggtacttcaacaaaaggatcccattgcacaatgttgcaaccattacaagacacaaacctactcaattttgatcttaagaatcagtaatttttaacaggtttaaaaacctgctatttagttaaatgcattcagaacagtggctcatttgggggtgtttgtcatttgtaagtacgtggtttggtgtaggaagatggaatccacctgctgggctctaggggctcctgctggggtacctgcaccatgggcagagccctcattacattttctggccatgggacagtcatttgcctgttggctgctccacgacaattttgttttctatcatcagtcacaggtatttattgagcacgtgttgttttggatgctgggaacacagtttcaaacaaaacacgttcccatggaagtgggtcgtgtctctagtatgcacccaagggctctgcagcttgtgggatccagagtccggagtgggctgggggtctgctcctgcagtcccggcatgtttctgggattagaagagctatgctatctctcccctgtaaaagcgatyggtagccttgttgtgagcttgcagttcagatggcaccataggactggctagctggggcctggctctcctgtgccatctgggtggctacttgctgcatcgctgatgggggcaggtgagtctccccctccgcataaggagtcacgggccgggggttggcgggatgtgcgtctgtgcctgcaggtgggcaaggaagcctggggagagagttgatgtccgcggatgggaagggccacgctggccatttcattctatacctgggctactaatgtttattccatcttgtttatggttcttttagccaacttcttccttatttagtgacattcataacaaatcaatacaaattaaaaccataaacaaaccaatagttaaaacaacatacatttattctctcccagtgctggaggccagaaccctgagatcaaggtgttggcaaggccagcctccctctgaaggctccagaggagaatccttcctcccctcttccagctcctggtagctcctggcagtcctgggtgtccttggcttgtggtgcatcacwccagtctctgccttctccgtgtgtcctctcctctgttgtaaggtcaccagtctttggacttaggacccatcctgatctagtatgacctcaccccagcttaactaattatatctgcaaacaccctatttccaaacaaagtcacattgtgaggttctgggaggatatgaattttagaggacactattcaacccatgagagataccaaaggacaaaattacattatgtcctgtcatttgkgcagcagcctttattgaggactggaggtagagaagtaacccactctgaatcacagatgtgctcaggatactttgtcaagaaaacagccattaatttggtttgataaccaatagttgtggataacccatagttatcattgataataagcaactcacagagtgtcctcttgaccatgtggtgttttgactttggccattgctggccccacagtgacacacgagctggctggtcccagcagggagtcatcgcatctacaggcacttactcagcagctgcaaggaacctatcactttaccaggtggggagggtggcacaaaagaaaggtccccaattgcttatcctcaagaaacttgcactgttttgattccatggtacatgttgaagcaaactgaggtcagtaaataggtggaccatttgtcattctgaatacatttccatgaaattcggcagctcattagcaaaatatttcttttatttggtttgggcatattgatttggatatcatcttcaaacaaaatggtagctgatgtctgctacatagggtccagcttttgtagaataaatatcagcagagctgtcgttattagatttggtaatgacagagatgtgggcagttcagcagtgagcagtggtgacttaaagtgagagagggttgggtgaagggtactagctgattgttgcttggattttatggccataatgcatggtgtttccatagcttatacttattcgtttgaagcagatctgttcctaatatccgtgggtcctgagtcttgaaattctttgctttccaattctgtcttcctccacccctagaggggcctcctagtgaacatgtgttgctctatcctgcatgtcactctgctgtccctgaggtgcacacactgggggtgctgtggtcatgcaggagaacagcccgggggatggggccggtgaggtctggaggcagatcagagaggtcctgggtgcagatacctggagcacagcctaggatgcagctggggcatggctggcacctttctgtggggttctgaggccagtcrgggacaagaggggtactgcaggcttacccgggctggcccattttaactcttcgtggacttttgtatcacccctgggtaaggttgtcattcacaccgtaaagtggtgtagctccgatggtttccagttcattcttccaacagccattgttgagtgtctgtcgtatctgaggcattctactggacattttgagaaatgcaatgatgagcgggacggatcttgccctcagtgagcttgcaagtcttgttggggaaaaagacgcgtgtgtatacctctcttaatgaagtggaaagtgatagatgttacgggggcattccagataacttgttatggggagtcaaaacccagaaagatactgcttgtctgggtgggctgaggggtggggaagatgaggagatcaggggctttgtggagcagcagcttgtgtgtggtttgaaggatgaatcaatgtgggtttgtcattgtaagcagcagttggaaaagggtctcctccttgtggcgtttgtttgtggattcagtaggactagctgaggaatgttcagatttaggagaatgacaggcaccatgtattttcacctgtaacatcaatcttttgacttagcaaccctaaattagcctgagagtccaacatttttttatgtactatgtgtgcatagtcctcctttgagttgaacttggatagttttgcctttcctcaacattattaatagggtcttggtacagacttttcagttataacacaacatgtacgtcctgaaggaacagggcttatggaaaaaatagagctggggccaggccgctcaaactccatgtagcttggaaacagtataaaaaaatacatgatacatttctaatacmtaaagcaatattatggtaagtatggggttttatattaggaaaaagcttgttggaaggggatgaggttgcttgactagctagatcggagcaggaaggagcaagtggaaagcaggttgaagacagcgtggtggagctgcactgtcgggggaataggcatcgtgctcggagttccgggttcccttgcaccccagaaaattctgaggctggtgacctttgctgtcggtggcccttccacccacggttgtgccccttttaactcttcctggacttttatatcacaaccgggtaaggttgttattcacaccgtaaagtggtgtagctccgatggtttccggttcattcttgcaacaaccatttttgagtgtctgtcctctccaaggcattctactgaacattttgagaaatgcaataatttcttaaatgcaatgatttctcagtgatgtggcgcattcctgtgctggaaaaagcatgtgtgaacccatgggctgtcacctaractgatatgacagtggcccctgttggctggtggaggaggcgctggcctggttacagagcctgccttctggcaggtagaccaggccggctttctccagtgcggttgggccggaaccccgggatggtgagcctttctttgtggtcgttgctctgccaatcttgagtccgtccttgctttttgctggcataaagcgctttgggtatgctgtgttctgcaggctcagtgcagcgttgagcttcagtgccccgtgtttcctgggggatgaggttcccggtgagtctccctgttatgacttgagacagtggataatagttacaaaaggaggccttggtttagtgagagctggttcaggtggctgaaaaacacgaccgtttgaccgaattcctttcaaagatttataatccagccctaaatatgtgaacgtttgtctcttctctctctcctctctttctctccaccttcccccatctctctctcttgtctgtctctccctccctctttctgcccacatgcaccatctttctctgtcaacactgaaggagagaactcttttaaaagttaatgaacgagttgcagtggaaccctattagattttccttccattaaatgcctgctacagacttctagtggatgttttaactaggcattgttatcaaaaggactattgcacaaattaaaaccaggcccacaatctatgaagagaaaccggattgactttttgccttcaggtaaaaaagaaaaatgcatggaggagttgaactccacattggtatttttagaagttggatgcgggaaatagccagtgccacctgaagctgtggaaacaaacaggagcttggactttgcaggcatacctctttttaaagtgaagacattttcaggaacccctggatttttaagggtatgtcagtgttaatttttaactatgtaattggtattttaaatatctttttagtttgtacgatgctgctgtgcgtgtcccatttttaaacctgtggagctctcttaaaaggaaaaggtcaggctttccaggtgcccgctgcaccagacgtgggctgtctccttgcaatcaccgcaagaatggagaatttttaaaactgccagatttttagtttcttgttttgttctgattgattttattttagcaaatttacccctttgtccctgtaaaatttgcttagtcaaatgacagattttgtgtttcacatccgggaagtcgttgtcttatccaggcaggtcctggagtgttcttctatttctccatccacagctttgtgataaagtcactgtcagtttctatcataaattattcataatcatggtgcttaacaaaagatgccaagttctcaatggatgcccactctatgtaccataacagaaaaaaagttgtgttttcttgtastaagtgttgttctgattagtcttagtgttaaatcttggttagcacttggctttgacttccacaaatacaatgctctgaatcaaataagtgccaggggagcgggcttcccctctcccccagcaaacaccacctcaccgcccttccaggcacgtcaccagcaccgaagcgcctttaccttatcagcgtggattcaaccaagacctgcgcttcacgttttgcttcttgaaagccaacattttgaaaagaaagtcaaacagagcatttgttagttgggcatttcctacgaaagaccagctccagttctttggaaggaaattggccagatgcatgcactgttcagggcttgtcttagtgctaaaatgtagctaacgtgtgtggcaaaggtgaggaagtcctgtgagcttcatagtgggaagcgtctcttctcatctcagggcagtggggatgacgatgggggccttggttctctgttcaacctctgatggggtgtttttggtttctggtgtgtgtgtgtgtgtgtgtgtgtgtgtgtgtgtgtgtgtgtgtgtgtgtgtgtgtgtgtgtgtcagagagaaagagagaggtaggtcatatccctgtatcaggtccatcaaaacacaccccagtgcagaactcttgatcccttgattgcctgcaagctcacagcacacagtgataagtgaaatctctgagagtagatttaattttatgagctgtattatccaagaatactaagccgtggagatcatgctcaagtcatggggtttaaaggggtgatggcttcagttctctgtgtgggggaagaaagcctgtggcctttttttgtttttaggcacaaagctagtttaattgaaagaataatttgatttgctgctgctacagcagaagagcttgagatgtggcaaattttctctcctttcacccaaactcaagaatttaatgctagcaggtgaacttctgaaggctgctatcaagtagacagagacaataactgtcttaaaagcagaattttgtcaatattttttgctgtgggccaaagaacattcacaataatggagtactaaagccctgcttgaaaatgctgtagagggagcgggagtggaggatttattccaagtttgagcctgcagtgttttggtggtatatatgatttctgaataatctttttgctcgagcaaatggaggcacccagatataattttctgttcaggaagagcatttggtaggcattgctacccagggttgctgaactggaagtgccctaggctgtagtttcttttcagttgccgcatcgacccaccaccgaccgtacaccttcaccaaatgccagtgttttctgacagataaaacaggaggtggaatggccaggagcaggccatgcggtcagggctgaggcggtgggcctgctgctgggagaggtaccccagagggccacactgctcctgccagggggggctgtgcctcttctctcagtgagtggagtccctttgcccttggttttaaatatgccatttcaccatgcttttgtagaaagttggttaaacagcaaattgcacaacccacaaaatgtaatggcctttatgacttaaaacagatgctagattcagttgcgtgaattgccttgccccttaagttatcttactttgaaaagaacgattccctgaaatttcactttggaaaacactgtttccctcattctgcttatgagaactggtgcctacatttttaatgctattgcagtaaagcgattttctgatatagatagaggtgaagccatttttgtaatttttccagtgttctccgtatttggtataattagaagggagagacggaggagcagtcacacactcatatgtgagcacacacacactcacccacagcagagaagcacagctttgtccttcttttgaagtgtgaaaaatatcagtgaccttatcattaaatatacttgttgctgtatttatttgaaatgttcagaccttactttttttttttttttttacttcctgttcattttagtgggaaagggtgatagcaaaagattttatttattcagagccacagtgcaggcaaagtgaaagtaaatcctaggcttccggtgcattcagaaaccacagtaagaaagcactgttttctcaaatataaagataagcgcactagccaaataatttttttgaggaggttggaacaatagaagccatctagaactattatttgaggctatatatgaaaaatatatgtgagcttacaaaaatgtttctcatactggaaactgtatccatcaggcagacaagactttcatcatgtttatagacagtgatagcaatgtagctctgtcataatatcagtggcctcagtaattgtattctacttcaagtataaggttctgattctggcgcaagttaataattctgtttttactgaagactttttcccttcagaaatatcatatgatgaagttgcctgtggaaggtgatcgaagtgtattcaccctcaggttcatctggaaagtcctagactgtggcccacatgtttccttcacgctcaccttcgtgtgtatttcaggcattaccttgtgattgtttagatactcttatcattatacataatccaagggttatttatcgtaagatagactgagtaatgctgaactcacaaatatggggctgaaaatgtaaacacatttttgtaaatccaattgacagttaattggcccacattaatggagagttgaagtgaaagaaaatagaaaaccacaaatttctaaaagaaatttttcccctcatttggaatccattttataygtttattggaagctaatgtttcagttaactatgacatatagatatacgtttacttgcctaattatacttgctgttaacaatacatcatgtgtttgcctgtgcgtccagctttgcgagtgtgatggtttaattaccctctgtggtgtctgcacgctctgctaagtcttgtgtgggggaacggttagaaatagccgcagaggcaaggatttagaagctggtgtgccgtgaagccatagggtcacccaccagcagcagtaccaggcgagccacctccgcgtgggaggaggcccaggtgtctgcttcctaacgcggggcctgagccgggcaccctggggtggagaggcttggatgggagccccagatctgggccactgtggtccctgggctactgggggaaagccaggtccttcaccgccctcctgcctacccggggctctgggctccaggccgtggctgctctctgtcccttgtccctgcggccacccaggccccacctgctacccgggcaggctgctcagacacacatccttcctagtggtcttcctgcaactcctctggtggagaccccggagccacacgggttgagagccctgggtgcctcgcctgcccccacggggtcctggggagaggatcatgccctgtggctctgcatcgctctcacccctgtggcgggtgggggcagctggccttctccctgccctacccctgcagtaggtggcgcagggtgcaggcgggtgggtggggggaacagatgacttcctcctcatctaactcctgcagtggatgggggtggctttggtgggggggaagggtaggtaacttccttctcatctcacccctgaagtaggtaggggcaggtgacctcctcgccatctcacccctatagtaggtgggggatgcgtgacctcctccctacctcacccctgcagtaggtgtgttgtgtgggggtgacttcctcctcctcaactcacccrtgcagtaggtgggggacgtatgacctcctccctgcctcactcctgcagtaggtaggggtgagggtatgacttcctcctcctcacctcacccctgcagtaggtggggggaggttacttcctcctccctgcctcacacctgcagtaggtgggggtatgacttcctcctcctcacctcacccctgtagtaggcggggcgggggtgacttcctcctccctgcctcacccctgcagttggtgggaggtgcatgacctccccatctcacccctgcagtaggtgggagggttgacttcctcttcctcgtctcacccctccagttggtggggggcgcatgacctcctcatctcacccctgcagtaggtggaggacgcatgacttcctgccttcctcctgcagtaggtggggggtgggggtgacttcctccttcttgcctcatccctgcagttggtgggggacgcatgacctccccgtctgacccctgcagtaggtggggggtgacttcctcctccccctctcacccctccagtaggtgggggggtgacctccccatctcacccctgctgtaggtgagtggggtgacctcctggctggccctgccaggctcttccctgtccccagtygcaagggtactctcccagcctccacgctccacgcccacaccctcgccccacttgcccagccccggcaggagcttctccccgcagagtccccagtgttttctagaagctttgcctccccctgtgggctctcccttccgtcccgctctgtagctggcaggcggcctgtcctccctgcagcaaggggccagggtgggcgcaagccctcctgccctccccgcgtggacgtggacggggcggtgcgggctggcccagggtccggggtgcctgcagcgtgctgggccagccaggcggtagagggtcggctcagccagtgcccatggcagcacctgcatgaggtccccgcttsctggaaactgagcccgggaacggccttggcccggggaaagcagggctgagtgcatctcccctctgagagcrtgaggtgctagcagagctcgygggccgggcctttaccgtccggatgggtctgggatgaaggccacaggtcacccagagcgggactgggtcaacagtggcttgatgtcctggcacagacgagggtccaggatggattcgattccttcggtgcctgtgggagggcggaggcctggccgcagttctgcagccgacgaagggtggtctgaagacccccgacacctatttcagtgcctgtgccctcaagatgtaccagccccgggcgtgtttgcggggacatgcctctttgcaatgagtgtagtagttaaccccatgcacaggagttatttagaccacactctsctatttttgtaggatcttttaaaaaattactttgcttttgtcagtgtgttcttctatttctttttactggtaaagtcaattactgaagaaaaataatttcgaactagaaattatctttttagtttgaaataaaattatgtgcaaggagcttctaaattatctaatattttttcctctttgcaaaagtgttaatattatatggaaaaattggaaaaacacagaaaaataaacaaaccaaaaaaagcattattcaagatcctcctaccccaatgtagcttactgtgaacattyttatctgaattctttcagggtctttttctttcttgtttttttwttgctctacagatatttttcaaacaaagatgggakgatggtagtatttattggcttgctttttcactcactaaatggtgaacagctttttacacaattctttatacattttcattattctttctttagggttttttttttttttttttgacattgcttggtcaagctttggcacctactgcaaacctgttttcaaaatatatccatctatctttccatttctagtgcatgaaaacgatcatattcctgggccgttgccagcatgggtattttttaatttgacaatctttgccagtttagtaactgtgaagtagtgttgtttcagcttgcatttcttggattacacgtgaggggggagcaatttttccatatgttttatgagacaaaggtattttttcctttttgaattattttcggtcatgttatttgctaatttttctgttgctttgttccatcatcttactcatttggaaaagctggaataaaggtgttaactcatcgctttagcatctctatacttgcagtccccaccttctgttgtcttttaagattatgcaagtgatacaggcttattttagaaaaacttgaacaaagaaaaaaatttaaaaattaatgaaacttatttgaaatcccatcatccagaaattaccaaaattgatatttgggtatatattcttctggatcacttcctatgcagatctattaatgtctgtctgtctatctatatttatctctgtctctgtatctatttatctatctttgtcattttcagtgcatgtatagtatcccattttgttgttatgcacaaattactggagaaatcaaccattgttggaagtgtggttttctcccactttcatattataaacagctgtgtaattaatatctttgtatgtatatcttggccatagtctcatcatttccttgataaattcccacaagtaaaattaccaggtcaaaggttttggatgttttaaattattttgttgcgtgtactgccaactggccttctgggaaggtcgtgcacattttcagtcccaccagtgacatgcatttctctgggttatggcattttttgatatattgagttgtttttatgtagtttagttggtcctttcttgcatagtttctgcttttaaagtgatgtttaaaggtgccttccaattctcaagattatgtaaatattcagttttatttttatgaattgattgttttatgtttaagtatttgatacatctaaaattaattttggtatatggtgtgggaagggcatctcaccttattatttttctaaatgccatttatttaaaaatctgtttttcctaattggaattctaaatgctaacttcattgtacaccaagaatatagatatatgtatatatgtatatatttgcgattgtctttcaaattccattttgatttcaatgaacaatctgcctctgttcctgccctgtgtccccttgttttaagtactatatctataaaatacaatttaaataatatagctttctacccaccccctgtgcccattactttccttttttcaatgamtacttttttctgttctcctaaagaaactttagaatcatttttgtcacaccttgggtaatttgactgaaatggtatttaataagttaattctggaatactcagcatctttatagtggtaaattttccattctaaaaacaactttggtatattttcaagtttattcaaatcttatttgctactattaagttttgtgagttttttcagaggtaatcgcctaggttatttatttatctgtttttgtgattttctcctttgtgaatggacttttctgttatattttaactggttgtgtattgagatgctgttgattttgggaatctttctgattagctgtttgtattagcagatgctgttgtttgcctttgtatgtggtagctagatttcagtactagattttagtacttttttatcatgaccttctcttgtggcttttctattttgagaaaatactgtaactcttcaacattgctgaatcaatggggagtgtttggatttttaaaaaatcaaatatcagttgacaatgatgccttaacgcatcttctgcaaataaataatcaatggttaaaatcagcccaggctgcagcagcatgggaactcccgctcttcagcggaggtttgggaagcagaaattttacttgggtagtgtagaatcagtgagatactgggattatttaccctggaaaaggaaaccatcttcaggtctgtgaaggctgactgtttaaaaagtgaaatcttttcagagtgaattggcaggaaaaggggcttaaacacaatgaaatagtgaaagcaactatatgtgcaagtaaaaattgcccactggatagatggcttaggcatgagggaaaggacctgattttttaaaaggtgtgttaataatgaaatcttcctaattttctcacagtcttcagttttagggaaggccttttgcagatattgttcagatgtgctgctttataaaatacccaccagtttttcagatcagtgttatctggtagtggtgagagaatctttaaaaacatataaaatcatatgggtttgtatttgccactgcacaggcctaattcctgttgcgtaatctccagatcctttagcccctggcctgggcctggcgtagcattgactgcagtattcctgtgtttggggtagtttttcatggtcgtctttaagctaatgtaaaatattttcccctttttcatgcttctgtttggttttaaaaatgaaaattaaatcttggcttgctattcgagtacactgtgatttagaagttaaagcaaggaattgacagtcatgtttttgctcagttttaataaatgtgtctcttagagccacccatttcttctctgttaaaagggaatactactgctttatgggactacaggatgctttaatatgataatacataaataaggatttgagacattaacagaaaatatctttttgaaacatagtaaaacctcgtctatgcagaaacctattaattaccatctttatttttctagatcagaactaagaatcagaagggataaaaagacactgagcatgaaaagtccatgtactgaattcattatttactcatagacaatatctccaggttgtcaatcattatttaaattttattgttctgttacacacagttctgatattcacgagtatcttctaggctacagcaaattaaaagtagtaaattgggagtgggaaaagacacacagataacagggagaaatgatagcagatgacctaatagtaagcaagaagagaaggaaaaaaactatagcaaaataataaataatatgaaaagcacagcactgtgggccttttcttagaaatggaatagctctttgccctttctggttatcactgatcrctcacaggttttatttctagttgttagagaactttaattttattcagcatgctttaaatagtgtggcaaaagcatgtagattttmtgtagatttttccagtgcttaaacatttttataaaattctgtttaaaagggtaaactcccaattatccagaaaacccagcctccaaaaatgactccccagaatagttgtgattttacttcatgatatactttcaataattgatagtataaattctttaagtattttatggacacattttttgcatatagtctctcgatgatgaaacacaccttctgtatctgttttaatgtatgtatcctttgaattgaatttgctggaaaaaatttggttctgttcctctgacatgtatatttcctttcttcctcctctaccatctgggatgctttctctaatatcgcatttggaagaggatgacgctcactgtgttgtttcagcatatgtgggtctggttgaattcacgtctgcctgttcacctctagtttttcattttcacacctccatggaggtggtatgctgctcttccatgcctggtagagctgtaggaaatgttacttaaatgtgtgaatgtgaccaccagggtacatttatctcaataggaaacaaatatgctaaatacaggtaacatgctatttatacttacaggtaataacttatatcttctaaccaatcattttccccctaacatagctggggatattttacaagccaattgtcgcattaaaaactgtaactctttttgattttatatgtgatacaatatctaataatactcccaggaaaatgccagttgtattttttagtacctgtgtgattttcttgattgctaaaatatacgtatgtagattgaacataaatgaaaaaattgaagtccgggtttgaagatttctaggaaattacttttcattgaacacagctgcccaaattgtttgatttctgttaaacacaatggaattgttccagtgatgctgcagttacaaaaacaaaagataacaaatagaccacgtttctgcatgtgtattttacttcttgtactcaggaagagactgagctaatgaagaaattaacatttgtacttatgtcctagaagaatgtcatcagaactatttattgctcactaaagaaattaaattacttaatgaaggtgaattattaacttaatttattaggaatttaatttcggagctattttcatagggatattggccaaggcaagaatgataacactttaatgcataaagacactcaaatgactttaaataggcaactaaaactatttcagtggaaacagatatttctgtgctttaaataacaatttttcaaagaagatctattatcaatgtaactatgcaatcataaggagtatgacttctttaagatgaattaattttcaacggtagtattgcttatcattgacaggcattgtatcattactttataaattaggttccatttctaaaataattgcaaagcagtttttggtagcaggggagctgttcattgttaattttcagtcattgaagcccagaaatcagacagatcaaagtgttctaggtctggtcatagcagatcagctgggtcacagaggtttctgaaccacatgacccatggtagaggggtgtgtatagttattctgaagcctaaactgagtctacttcccctggcctaaataagatatgatatcattgcctttactggatagttccaccttctcctattaaaaatgccacaaaatggagagggaagagatttcttaatatctatgtgttagtgatcatagtgaaagccagaactggcaattccctggaattttctataaatatcttcatataaacatcattatagtgattcatgaattagatgaaagaaatgtggggaaaaatctcatttcttctttaaattgttgtttctgtttgaaatttttagtgattttagtaattttcatgagtatatgcaatatgaagtttttgggtaattcctgaagcaacatgtgttatgtagataccaaaacatctcgatgatgtgcattttacctgttccacacccgaatacaacctcggatagttaggtagctggaggtttgatgcttggaattaagattatgttttaatctttaagttttggtatttcagatgaagtatttttacttatgatacacttatggggaaatgctgctctttttaaaatattcagataacttgattgtattgcctgtttatcaaaaaagagtggtgatgtgcatttgttgcttcaaagatgtatgtgaaacaccctactctatctgcatcgctgatgaaaggggcccatacttctattggttgcagttttaaagaagacagttgaagagctttatcaaattgaccttcaattgggggatcattaatgaactaacctccttcattgagagattattcaaggccccgagtagcatgtgatttcccttgttttgcggtaattcatttgaaacatttaccaaaaaccttaatgtatacagaagatgctaaacttttttaaagggctgggtcctttttattgctgttgtaagccatgcctcttctcatcgtgtgccaaaacaaaaaacaaaaaacccacacataattctgcccatgtttcagaatcttggctaggacaaggcagagaaagtgagagtttaaccwattaataagagcaagtgcttgaactaatacaactttctgtgagaaaatgtttttaaggattattgattatctgaggatattttgtaagttactaatttaggaaatttttcattttttaaaaatttagtcttcagttactttaggaaacttagtgttcgtagacagaaaaaaaaaaaggctggtgtctgcagatgaactaaggaacggctttgcttttgcctctgggatctctctgatttggtattcctgatgaggaagcatcaggccagaatgtttgtacgcgcccttcctcctcctcatggattcaaacgccagtcgtcacgttagtcatgttgcacatgttcccgtggtaacagaagctctgccatcccctagctctgtgagcttgggtgcctcatctgcctcagtttctttgtaaaatgatagagctgttgtgtgaagtacatgataggagggctgcacgcttagaaccggggctgcacacggggctgtggacgtcacagcctcgtcatcagagggggcatctggactcctagcagagcgggaagagaggmattcccggcctgtggagcagtgctcctggaggcggcctcgacctgctcctaggacccatctgccggctgctgctcctctgtctgggagactctctcacctgagcgtgactcggtgtctgcagcgtcactgcagtgtgtgaaggccagtacagggacccttcctctgtgctcctccacagccaccatgcgggttttgttggatgtgttgatggagtgcacgtggtacccactgtcagggtgctctctgcaagtgccgcacccccaagcgacatttattttgtactgaaataacatctctagtgtctactatatgagcttgtatctcatatgctcccatatatacttgtttcacacttaaaatctcacatgtagtaacggttgctttcaataagtacacatgggcatgatttcctgtaaaggttagatagcttctttgtaaagttgcaagtatttgtgtactttataaatgcaagaaactaagctttacaggcctcatttaagaaaaataaagatttctttatttgggaaaaagggaaatttttttctcctagagaatgactttctgtaataaatatattttccatggtgatacagtatataaatgtgtgtgtcagtgtgtcagaaacatactagactttactaaggtgaggttgtcaacttttctattctattttattaaaaggatgctacagaactgatttcatgatccactagtgacttatggccctcagtgagaaaaatgccatcctagagtagccatccaggactgccctcctcactcgagctcacagtgaagatcagggcaggtgactgtgccatccactgatggatgacgatgatggcagtggtgatgttattgccagctgccatttactcacatgttcttaacttgctattaaaaaaattataaaaacagatacttaaaaatagtaatacaaagttataaagcattgacattttataagaaaaggtcaaagaaggtcactcatcttttgccctttgtccatttcactttcctcctcccctcaaggtaaccaataggagccgcctgtttctgttttcctcacctttctatgtgcccacataggtctatgaaaacgtatgaatgtgtgtggggttttctttattttctaaaaaatggaattcattgcagcacagttttgatttttgcacttaaaaataagtcgcgatcattgctccagagagagatttcactcagtctctttcatgctgcagactctccaaggtgtggccggcccatgtgagtggccattgcagtagctgccccgcttatcctcagttttgctttctacgattttactcacccacaggcagtcaaccattgtccaaaaatattaaacagaaaattacagaaataaatgcataagttttaagttgtgtgccattctgagtagtgtgatgaaatcttgtacagtcctacacggtccctcctaggacacaaatcacccctttgcccggcatatccagactgtagatgccacttgccccggttagtcacttagtaactgtcttggttatcaaatcaacagatcacagaagaagaagggtgagtacagtgtgatagtttgagaaagagaccccattcacaaaacttttattacagtacatagttatgattgtcctattttattataattgttaatctcttactgtggcaaatttataaattaaattttataatgggtatgtacgtatagaagaaaaaacagtatgtataatgtatcccctgcaactaaggggatacattaccttattggcaaatgttcaggctgtggatcaccctaaacaatgctgctgggtatttacctatgggtgcttttatttccaaggatataaaagtaggatatcctggcgtcaaagagtatgcgtacttttaattgccagattgcttctggaagggaacccctctggatagataacggcaacttccacttcttgagtgtgtgtgatgtcccagctccatgcagccctttgtactgatgcctttcaggtctcaagtcagctctgtgcttcatagcagctatcggcccatgattcagccgttcttttcctaaccttgtgaattagtaaatgaataaatgaacgaatgcacgaatgagggcaggcctggccccggaggggttctttctgtgccccaggccagcctcttagcctgcggcttctcgtgtttccctggccttcagtcactaacatgtgaattcatttcaatagcaaatatttatttttatcttcctggacaaaagaaaaatatctcccgcttttgcattttccccagcattcagcctatactctaggatattgcttacggcattttgttgtgtattaaaatgggttgaaggtttccttttttcacatcctacctttaagttctatgaagacaaagacagtcttcatcttgtattccccgcagaagtagtctggtgccaagtagcagaagctcagtaaatggttttggaatatgcagaagagcaccagcagaatctctgtctgtgtctgtgaacgaagtcatcttttccttctattttgttatagcccagtattgtgcataaagttcaggctgtctgtcctgcactagagagacacaggcagctgctggctgatcttcaaaaaggtgtgcagagggcagagttggggaggtgaggggaggaccactgccccggccttttcactgggagtttcctggatgctcctcagttttgcctttgtgactccttcagtcaacattgatgtgaaacacgccctggttgaatgcccaggcatcagacccaagcttatggccgtggtggtgatataccagggaagccttacctctccaagttcgaggcacccacaggtggcttgacttcaggtgctctcttagttttatacctactctctttacaggagctctaatgtcaaaggaaaatggatggacatttctcaatccatgggacgcgcgtccctttttcctggctgtggatctcggccaggaggagcatggtggggtgtatgggcttcccccgggagtgaaactrtatcacttccgctcacgtttcattggccacatctcctcccacggagacagagaagtccagttccgcgatgtacccggaggagcaggacctgagtgttgacaaacaactctaaggactactaccccgccaagtaggaaaaggaaaggagagatggraaagggtggaggatttgggacagtaggtaagagaactgtatctcttaagagacttgctgtctaactctgccatagagaccttccaaaaatgctttgactcatgacaacatcattgtaacacatttatggccttcccagggtgattcttttgaaggacaacagtcacctctttacagaaagacattctctaaagaatgtcaggagtcttgtcagctcatactggcacctttgatacatggcctgacccatgcactacgaccatcagctcaaccttggatgagacgaccagaggtgagaaagcctcagtccctcagcacagccacagagcaagagggtggccattgcttccagcaggggctgctgcccagattgacatgtgcacagcctgtgagttcggtgtggctttcttcaaggcttctggttctatcttgtttacaacgtaatttctcatttcatagttacatagtgtattcagttcttaaatgactgataaraggaagtcacagtgcacttctaagagctgctgtcatcatttgaatgctgtaggacctttggctgaaatgaaaagacttgctattgggtatttgaaatcaaatgagagttttgacrtcgggggtgcgtgttaatttccatataggataaccttacaaatcaacttaaagtgtaatgaacaagcaaataagtagctacaactcatatggcgtttggccatgattcaagccaaacccttgaggcttttggtgttgagaaggaagagttggaggagtgacctgtattctctccaggagacaggggttgtgcctggtgtgacttcagagtgcagggggaagctgctggtttcgatgagatggtggcctgaaaaagctgacagactctcagagccagttgagagatgcaaaactggtctctgaggctttcctttttaggaagaaatttacactgaaataagagcttggtgaagcaaaactcctgatttctcagaaagcatttattttgctccaataggttaccagaagattgtgatcactatagaccttaaggagctgccttcccctttagtgatactataaaaaatacaaaacaaacaaacaaaagaccatggcaggaatgatgaagtaaggtactgtgttgtactacatgacactgagtcatactaaagataattgtatatgcttttctatattttttcttttatttattcaacaaatattcaccaagtgtgtgccaagcattgttacaggtgctacccagactatagcctatatagacacggagagtgtggcttacaggcttatgatatgaatgtaaatcgtcaattggcctcttggctaggaccatcaggtttgttcttttaaacctgagaaaatagtatttattctctataaaatacgcttgcattaagcatatatctggcctcaagagtggtcctgttataacaaaagcaaatgcarcgttcactctgggatggcagcagggcacttctctgtttccaagtgccacacagtctctggtggccatgcctccccttatgtagtycctcttctcagcgtctttcctcttcctgtgccttttgaaatctgtttagattcagggaggctccattcttctccttgagaagcattaccaccctctcttccatctgtgccctgtacatggcattgtgcttctgaccttcgaggggctcagagaacattttcaggtcacagtggtttttagagatcatctgctccaaccctgccattttcattgatgaggacacagagacttaggctagattatggaccctcttcaagtttcccagcagtgtcgtatgattaagacaagaggccggttttctgggtaacagtccagagctctttctcttaagccatgctgcctccacagtcaatgtgttgtgcgtcaggaagcttcatactattcagtatgcaggttcgttaaatatttgattaaacatgttacttgtggtcatatctttttttaaaaaaattcagggcatgaaatcatctggaatgtaatctagcaagctaagattatttctagggtgaaaccaaattcaacttttatcgctttgacttatgacacctttttgaggaccgtgaagtgctaggtctacctgcacttccatttacatcactaccatttaaataatgtctcctttgttctttctcagtctcgtagagacatactcccatttgttttgtgttaaatatcggtataaataagttatcaataatcaatatattctctgacaccttgttgtatattttataaatcccttttcttgcaagtgaatgttagcattcctaactcttaacataattaaattatgtacttatcagttaaggaactggtttgctttagtgatggtgccaagagacagtaaccatgttcaatatgtctatgtttcttatttcatcttgggattaaaccacagagatggtattttttgtttgttatgttgtttgtatcaacatttcatacagatacaataattcagtgtgaaggaaaatcagtgttttcttgagctgatttacatatggatgtcagatccagttatgctatttttatagtattgaggaaaacaaaatgaccttttactaagtttttgatactggaagattctgtgttttgagtttggaggggaggaagctgcagaggaaaaggaaagaagcaactgttgatttataccatgatgctagcaacagtcaggcatctaagatgcttttcagctataattgtgtctttgctcaaggctactgtagttatactacattctattccattgtccatcaattccacccrtttcaaggagctgaagctgatgctaaccatagaatagtccagaatatcctttatgttttttctctttgctataaatgcagcrttattttatagactggagatactgcttcataagatcacatagtgccactcatttataagatkatagtacaataatcagaagtatgtgttaaaaatatatttagctggctgtcctctttaagtccctgctttttgatatgattatttttccaaaaagaaattgaaaacaatatgtcatccagtaaatatgttcgtggatagcatatatctgaaatggatagtttacccttaacgggaatagtaaaatacactacagaagctttcagctggcttctatcaaaataattactttagcaattatctctaccgttcagataacttttgcatgcgggtggtgtttctgtgcctttctgttcatcaacctcatgcttagcgttctcccaggaactattacactgacagattttttttttttttaagtgtaggagaaggagaagaaagggaaagggctatttaaaaggaattgcactctgatacataggtagttagcaacttaattctgagcccgaggtgattgtgctgtgaggtggagttctttggcagggtctcctgaatcagaagcatgatacctgggccaactgaaggccagctactgcgttcaagggaaggaactgtgtagatacgggattatggaagcgagtcaggataagcttatcagggtatgcatacttaaatgtctttttaaaagtttattcttaaactttagtgtcaaatctgttattttagaaggaattttttgacattgaggagacaaacatttctagttatgaattctaggcattttttactcaattacgctttaggcaaagatgtactatccacagctaaaataaatttctactttctgtttcttctcacttctcacaagagttcagcacaaaacaagtgttattaagagagattttttggcttaaattggtacgttaaatatgcttctgttttaaaatattttaatttcatagagcaattttacatgcagaatgtgatcccacttgttcaaatcttggaccgtggtagagaaatgttttggaaagcagcccactttgacctcttctttcccttttatctcgacatctgtgagttttaaagcaaaaaaagaaaaaagacttttaagagaaatttgtctttgagtggaatgttttcttgtagttcactgaggtgggattcctttggctcgtcatgtatgtgtgcttgagtaagtagaaacactttaagaaaagtaaactgtgcttttctactgtcatatttgatttgggctgcgtcctgatggttgtttgaagctaacatgaaatgcgatgcctgcctgacccattttagcaacccattatcataatttcactgtcgtatggccgctgagttaatgtacttacaaatgacagagaaagtgtgttacatgaccttagggttttcaaaaattaaatgacgtcgtaggtcgtatttcaaagaatagctaaggagaatggttttctttgctgcataaagtgtcactgtgcatagcaacaggatattgtatttcttttttattacgcaaaaatgtgaagcttttaaactcctagattccccacataaaatttaatattggggtagagaatgaaacatccagtggataaatctgcttctcccccatctcattccctctcactttctagacgagaccccttccaagctcagaaatgcagaaatgctttgtcattttcttgtccgatgatgaatttactatttcccccccttactcgaatctcatgaattcccacctaaaaggcaataaagtacttatatttactgaaatacacttttctaggattgcttaacaatacacygtcttttttcttgtcggatttgggaatcagtttacaaaagtgttctttggaaagaaccgagccttctagcctgaggaaactcttaattaaagcaaatggtatcaacattgtrttactgcacagagacctgcactgctcaccttttttggtgtcctgagcctagaccncagaggtccccatccccgggtgagtgatcgatgctgtcccgttggacaaggtttactagaagggtgacagaccacagcccatgatacacatgtggtgtgggaggagacttgcagcccggtgmtagggcctcaccctgtcctcacacttagctgtcgaagtcaactcatctgttctagagttctctttccaagttaggaatagatcaaacagtagctctttgaggaaagcctctgacttcaatgcagtggattgatcataggttgtagataatactaggcctccaagtaaaaacaagaattcacagagtaccctttcattgagttcgtgtgcagataacataggtccccatgtaatgaggcaggagattcgaggaggggtgggtgtgagctccttacagaccttggctagaatattcatgaacagaaatccaacttgtatgtagaagtaatagtaattaatgcagtcctcaggaagcacaacagaggataggaaaacaggtcacagtcttatattctcttgaaacataaggatgtcttttgaaagccaaaaagtggcactaaaattgaacagcttaaattttctttcacctaccacctgcagactgcaattgatggtgcctgagtcaagaactgtagttgtgggctcctatagatcacctgcaggagctgggcrctgagtcctggcggggactccctgggactgtgttcagtgcaatttgtagccttacaaatgtcagatcttgttacgcccctggcagtattgacataaagaatattatttaaagtttctaaaatgtgatgaagcttctaaatttaatctgcactgtattatgcaccaaaattaaattgcagggaaaaaagatgtggttgcagtgtgtgcttagaaatgacttgtcataatgaaatttcttttacccaaacaattaagagcattttcaaaattttctgacatagccaaaaagtttttatttctgttatagacttagtagctctgaaaattgctttatttccttgatttcaatggacacaaattgcatggctctattttttcttaaaatgaatatacaccatgattacagaaatactaaaatgtgtcctctgggggaaaacctcattttacattgcagctctgctcataatcctgcgaaagctggtgtgaagccgtctttttccgagttgaagaaatgatgccaaccaaaaacaggttgatgctgcatcttggacacataggatagtcacagaacagacagaccccatctcacccatagaccgtggagtcaggcagccacactgtgtgtgggcttagtggtaagggtttcttcagaggtttggcatatggaataagaaccagagatgggattcaaggagatggaacgctgctcattgcttccagagcgtaaacagtggtggggctgcrccagtgggtcctgaaacacatcacgggcaataggcttcgagtgtctcgaattaggaggagacattaggaggagagaggataaaggagagggaaggagttcagttctttcctaaatggagtgaataagcaggtactgttaaatgatagccgtttctcacagaaatgatgctgggtataagaaatgcttctgaaaaaaggaagagagacctttcgtatgcatattcagttctgacacatgcttgagtatgagaaagatggtgaatgttttgcacaagtggagatgcataaaatcgggcattctgaaacaatagcagcacagtatcctgtatgacattttacatcgtctcctcgacacagggcagacagcactacacctcatgactgcaacttctaaatgaatctcagggacaaggtcagaatttcccctcccctctgagtcagcttccttaagaagaagtgggttcgaagggggttattaacaatataaatcgcccttcctgtcagtcaaatgctcagaaatgcaggacatgatactggcygttttggtgacagaatataaatcaccaaagattaaattattagataatttggaaacttaacagtttgcattttgcacttccaattgttttgctgacttgcacttttcttggctgtccagggttttattaaccgtctttaagacatctatcacctccttcctcttcattttccaatgggcarattttyccaggaaggagagttgcagcactgatgcctgcagtcgctgctccagaaagattgctgtattttcattgacatgccgtgcattaccataattggcttttctacatgataggagagaggaaataataatgtcattttatttacagccagagtgtcgctttatgagacttctccaagtttctgccatgctgtgtaggtcaaatgacatcttttgatcagtcctgtccaaagacatcaaagctgagtggcatgtaatggagacctagtgacaaaccaaatctagaaaagaaataagactgccagtttcccattaaactgcctgctaaacagcgcagcttccccgtgtcggctacaaaaccactctgaccacctaaatcaggggaatgaaaggaggctgaattggacattagtactgcaaatgactgcggtgattgccacgacttccctcctccccctccccaaaaaatcagcgagcaaaccatgcgagttacagtgagactgctctgtgcccattcatttccctcctgccayttgctggttttctgatctggtttatttaggtttgacatcagccaaatggtgtagcgcgatgtctctgacagatattcttactgatttaaagggaggcacaactcaggaaagatggatcttctgagacaggatttcagagtggctgtttttcccttttccaccccattttcctcyctttatgattccagttgatgtgttgttcctattcacagtcaaatcattagagccttcagaacttgggaagaactgtgtttgattgacgacagtgaggcttcatgttgactgccacatgggctaggtggccagcatactggaaatacgatttttaaaaaagtctcctgaaacacgtattttatgctagagattgataaaagaagtatttctgctctaatacagcagggttcaccttcccaggtgattgggccacatggaaattgacatcacatgtatggaaaaaagccacagcctcagtgcatttatctgcatcagtttgctttggattacatgcagcgtctgctcattctgtaattcactatccagcctgtagttatggaacagctactttgttccaggcaccatgttagctgccaggatccaaggtccactacgatgtggttctgtgctcaaggagacctggcccagcaggaagacagatcactagacccgtggttacctcccctgtgctatgattaagtggctgcagggtgtgggggaatcatgagctgggggaagttgggggagggccctgaaggctggcaggtggcaatgctggagcctgtttgtcgaggggcagctgtcgggtggagcagagctgactccacagagggagcctggctggtgtggttggaaacagacgtttttgatcctcttatttttctattgtagtaaaatgtacaaaattgatacgatatataaaattatattaactcttattaagcgtacagttcagtggcattaaatacatttgcattgctgtgtagccatcaccaccccatccattcccagaactttttcatcttctcaaactaaactgaaactcggtacccattgaacagtaccyctcgttcccagcccccctggctcccagcagccaccgttctaccttctgtctctgtgatgaagcctgagtcgacgtggctggaaacagattccgacagggctttgtagccatcccataaatggcagtcctgaaaatagtgtcctctgtagcctgtcatagcggatacatgtgaccagaacttttagggagaactacccaagaccagttttgttgactttcatgtagacaagaacctgattttgcaaacagcctattccgaaattggaatcagttttaaactcatgccacttacagttgctgatagagatggcccattgcggcattatgattgtgtgtcaggttgtgtgtccacccccggctgtggggtggaccatctaggtaaagcccctgctccttgtcttactgatggcatggcctggggcacctcacttaacctctgtgcctcagtttcctcatatgggaatagagagtgaaataggatttccccttgtagtgtcagtgaggagctaacacagttaatacatgtagagtacttacgatggtggctggtccagaggaagggttcaacagatattaacttgttattattcaatgacattttaatgcaaagcataacgctggttgagcagatattctgtgggtatgaaatgtttatccaagaacaaataatttttttctctcaaatatagtcctcccaaataaattacaagtgtgctgggaaaatacccttctctatccaggtggatcattatccaagaatatatttgcttcctatttgagattagatttcaatattgccactggaaaaaaattgcttctgatgattggagtgggcttcttaccctttctacagagagtatatttgcatgtgtatactgttttctttcaggctactgtcgtgagtatttaggaactgttagcatcaaatatccttttttcctactctgacttgactttaataacttccactgtttagcccactcccatggtgtagtttagatttttttaatgtattttctttttttctgaatcttttctttccccgtctgttttcattaagtgaagcacactcaacattgttctccaagcattttcatgagcagaaccaaaggaggccgaagggaaagagagaaccacggaaatgaagttaaaagttgggagttgaggacctgtgcttgcttcagctggtctcagtaagagactttcctgcagaaacaaatgggatagaatttgttttgtttcttatgccccatgaatgcatcatttattttagaaattgtgttacccaaaccttgtgcattctccaggaatcccacttatagtctgtgtctagagacgtggttgcagcgtggactcagggacctcacaggcagccgatcagaagaaataggagaaaatatccttagactaggaattgtttatactaaatttttgaaaatgcaagtaatgactagcataagggccctgygtatcacctcgttaagtgggcatccctccagcctctccttcggatagatcaaggaggaatactgtgaagaatgcttgaggcttgaacccagactaggactgaagcaccttcttccatctttttagctgggaaactttatctctcgcttcactcaaggatgcaaatgaagagtgaaatccactcacctgcagaattcacttctctgggtgccccaggcaccctgggcctgtgtcttcctgagccccatccctggtgtgctcaataatgcagcaggattttgctccaccaaagtgtcacctgtctaggtgagttgtgcccgtgcctatctgaagtgacagccatctttgagcccccgcgtctctaactgacttctcttttatcattcatgttgggaaggtagcattttcgacaaggttgtttcctcttccccctcttcttttttcttgccgctcccccctccccgcttcctggtcccctccccacccccttaacgcacctgatcaaaacattatcactgacaaaggtttctctctccaaattaaatgagtccaactagcctgggaatttccacgaagaaagaaagtgaaatgctgatgtgcgaagttaatgaatctggtaacagagagaacattattgagcccggataatatgatctagctgccttccttctccgctcgcttcctgtaaagaatgtatggaagtcagttatgtggcgtgattctaacatctgtcytaccccataatggtaatttgtataagtaatggaaacaggttaaatacttccattccaatgttgccagcagggatgaaaatgaacatttcaatgaaatcatctcgacagagcagagaggggagggggcatagaccgattcatctccactccctttggtgatgggagccctaatgagaatgctcggatgtatagtttatcagatagaagaggaagagcacgyaggtctgagagatgagaatcctgcagaactgcgccggcacgcgaggcgccttggtctcctttgcagacctttagctaataacgtgctcttttcattctaagggaggatgagagggaaagaggggaggagggccagggatctgtgtgcacccctctgatgggctgcctgccaggctcatcttcagctgggcaaaaccacagggcgattctactagatttcttaggactctgctaaaacttaaagggaggaaggagaactggtattttcctcatttctttgtaattggaaataatcctctttcagagtggccttctctttgcctagagagtcactttacttctttaagttgttaatgtgaagaagagccatttcacttggcttgctagtgctatttaaaaagaatttaagttggaactcaattccttgtcactgtatccctatacttgtactctccttctagagagaatatcaggtcatctagcaaggggaatacgtgtcccatagcgtcgttgtcaatccaagtatgttaatgtgggttgttcaacatattttcattctaaaatgctgcaattgaacattgtattttccagtatttctacctttctcctatgtagacagtgttatttactatccagatgagttagaaatggaaacacctagtcagctggcctgtcatattaaatgctaatatcccaatgattccaaacatccaaatttgggaacattgcaaaagctgagcaccttttatgaaggggacacaccttctgcttttcatcaggatattttgccaccgaggaggaagagatggggtacagggatgttccatagtgcgtgtgggtatttggggtgtctgctagatttttcagcatagatttgaagctgacttttagaaagcagagcatgttcagggaagcctttcttctattgttgcttcagctctttagcaaagcacccacacttgttcatctatccacagagcagcgataacagtgaggcagcgttctgggagtgttcgcctcttatggaatataaaacaggatggtttaagaaaacacctttattttgtgcataattggggtacagattaagatgcaagttcgaggagaaaacaaacctaattgctcagagccagtgttattaagactcgagggaatttgcaacttcaccacatttagccattaaaaaacaaatacagctgtcacttctcacccatccctaaaaatgactgttgactagagtgagtcttgttttctttaaagaaacaaagatgttttaaacaatgttgggctacaaattgagaaacataatttttatctgatttgctaaaggtatgatgtttgtgcctcatataattacaatttgagatgaaaatgtttttcagacggtgtatgtgtgtttacgttgtaaaccgtcagctcacacattgttggtgtcatatgaggctctaacagggaccgtatacattgccttatgtccactcacattagaacacacagaatttcatgttgctcaggatgacagcatatcttcaggcacacattggcatccagaaggcacattttatgacaacaaatattaacaagatttaattaaagaatgaagtctaaccatcagatccagttgtcccatttccattttgggaatggtagggcctctataattttaaatgttttattcacacccatgcacatacacactcacctgcacacactcacacctgtgtgcgcacacgcgtgcactctcgcacacccacacccacccacacatgcatgcgcgtgaaggccggcggcgcctcctcctgggctgctggtgcttgctggttcatacggttccttgcggtctgtagggtgctgtgcrtgtccccccgatggcaggacacactgtacacgctcacactgtcacattctgcaccatcgtgctaggctcaggaagggtgggggagtgatggcaaagctgttttgacacaaaaagaaatagcaaaaatgatgatctggartctttgttttatttgatggggaaaaatgtcatttatttctatacgtaattgtaaaagaagaatttcatactgcagttaccattttcaagcttactcattcatcagattttcatgaggtggaggtggggtgatggtggggggctggtgacgccaacggtgagggtgtagtggagaaaatgcagaggtggtgactattttctgtgattcagtggcctctcttataaaaatcttttagtctaaaagattgtattcattcccctggtaaaggatattctgataggttaatcactagaaataagcatttctacaaatatcataatatattccagtacatttgtacccataagaactaaagattgttagaaaactgtagcttatagtgaaaacaaaagatttttggaaaattgtagcttataatgaaaacaaaggattgtcacaaataattagctaaacttgtaagttgttatgtctctctatatctttgtctgtctgtctctctctctgccaaagtaattttttttaaaaacggcatcttgtaaagcaattatgagaattcactgataatagtaaaaataaacctaattattaagataaagaattttattttctgtcatgatartgttgatataacttttgattcagacaccaaatattgttactaataggatttaagtaaagtcaggtgtcatgttaccctctgtttggtttccagtcaagtatagagacaattatgcaggatgtgttagctcatggttcatcacactgataaataatttctgtccgtagccacttttaaagataaaagttctcctaaccctgtgctggatgttagtgctagtctcccatcagtagcagcacaggtgcctggtacacgtccttgccacttgcctacatccatgccgcgacggcctagaggctggcattcccatttctcttctgttcctgtgtgtttatgggaataagctactggcttttaaaatggagacatattctgagacataagccctttgtgggttttggagactgtggaagaccccttcactccttgatttctcactcccatcctctgagacccttggaaaggcctgtagaagttcacctttttggaataaactttgtgttaaagtattgcaagagtacagcgtgcagtgctgtgaaggtaactgggttatcaggcagcagtagatttggcgacgtttgtttgtagttcttggtgatggctggcagcatgtagtcagagaacgagccagtacttaatctgcgttacgtttctttacactcatttcagccatttgaagaggtatgccatgcayaagtctcctctctggatttctaaatgtttctcatyggggcgagccctaccctggctgatgaaagtccttttttcgtttcagggggtcagatagtaccaagttggaacctggtgttggctaatattgggtttgtagaccyggagtcatcagactgcttcagggtaggatttatctttccccagacgtgggggtaaaaactgaaatcggctgatgttttgagtgcaggtcattgggtatgcaggtcttggggatgactagcttggtttctggagtaagagaacatttccaccatgtgttaacatgcactccagtagtcagcaaacagccacgtgctctytcaggtgcatagaagtgtcacttgctttttgctgttctcactttattttaacttcttttaattttttaagattctcatataatgtcctctttttcttcctgacaccactgaaaatcaaagtttttcatcttttacatacrgtttaagctctgatttgtgctacttgttaagtacattgttgacaaactctagacaaaagattaacacctaaagtgcttattgggaacagcaagagggtcttaaattagttttcttattccccacttaacttgaaattgaattcaggggcagtgagagaaagaagaaattatgtttgttttaaaacagttacctgtggattcctaattaaaattagaattgggaaaagccattaggtcattttatttgcagactctgaaattcttaaaaattgtttctattgttttttttttttctatcatgtcagagcaaaagtagcctttcagctttgcttggcagggtgtcagtcttcctgcaaggaatcagaacgatgttagtaaattagtgcgtatattgtatttttaccttctttcctgatgaggaagggccacactctgcctgggtctgctctctgtgcatttttttgtttcccagcgtattctaactttcatcaaaaccacctgctctctccataaygaaggtgacgttactttatgagtgatcaattataactttggaagaaagtctgtttcgtaagattctacaatgaatcgaagctgtacattcatcacttaggtgtggggaggccccttttgtgaattggccccttggagtaaatgtattttgatataatggccatctgttcatgggtatcacatttgccagtctgcaaaatagtttgatttagataaacatgtaatttggtaagattatatagtttcaccaggtggcaatacaatagtgaaatttggtatttactgtaaggcagtcaccaagcagggactgaagacctgcgtttgtgtttgtcacttttgaacatccattcgtctttcacagccagctctcacttacgtgtgctaatgaggaaaagagagcttgggtagacagtttcctgacctcatkgctgtcatttgtgtccaccacctcctccgtcaggcctccaaagagctcttcacaaggaacagcatttctgcctggtgtgggtttccccacctctctcttccttcctctgttctttggcagacgctctaatcatcagcaaagcctctgaaaggcaggcacggggaaaagaagaacaagaagggcccagccggtccatggcccgaatttcacatctgactgtcggagcaccatctacacaacaattaagacggatgctggctcagcttcagtcttaactgaagggatgggcttgggctgggatgggcatatcatcattttgttcccattgttcccatttatttgagtggcatgaagctaagcaggttcccatagccacaggacgatggcacatctgtgtgcaggatgttttctgattcattctgtgagtctgtggggtgtgaggaggaggaggaggaggagcaggcgtcctcgttccttcaggctgttgtagcagagcaccgtagactgtgtggctgtgtgtggactgtgagcaacagacttgtattactcacagttctgggcttgggaggtgggagatcaaggcagcagcagatctgggagctggtgaggagggcctgcctcctgtgtgtaygtagatggtgtcatctcactgtgtcgtcatgtggtagaaggggcaagccagctctctggagccttttaaaaaataagggcactcatgctgttcttgagggctctttcctggtgacctcctaaaggccctacctccttctgccattactgtggggggttagatttcaacagaggaattcgagggcggggatacaaacattcagaccgcagcagctgacaagcacacagttgggccacatactgatggtgatgattctgtcattgccataaatacttcctataaccccaaaagacattgttccaatggggacagtggttgttccagtggggaaaccgaggtcccaaggagcgagtgagtgtatcgggtcacactgtgtgtatgtatctgagcctgggctcctaccatgctctccagacatcaaatccgtaccttccatctctctctccttctgccacgctaagggggtgggtggggggatctgttctactaaagaaaccacagcaatggccacgttagtgtaagccccatagaggcgaaccactggggtgtcagtcccaccccagtttactctgtcttttcaggcccaggctcctggggagcacccctttggatcacccctgcacacatccagggtggattagtggaccttgctgtgtgtgacaggtatagcctgggggtgggttggaggggggctggcttcccaaagtgatttggcacattcctccctgatacagacktagcaaaatccaagcactccttccttgcctagtacggaggccaaggtgctgggttgctcctgtttggaggcacctgggttctgggttggaatttctcctatctcaggctttgtcccgtgactcctggccgccttctccccaggtcctaaactctaaatgaaactctgttgattttcagtccttctgagtgattctggccctgggatctggtgctctctgcctgctccccagttttggaagggtacgggcccttgttgggggcctgtgggggcagaagaaccagaagactcagcgcaccgtgaaagaccgggggtggagggaggcagaggctgcttggagcctggcctgctgctgcctggttgagccttgggagggtccttggccactcagctgtgacaggggagatcagaagcgcaggtcctccagtgctggctgctggaggtggtcgtccggaggtggtgctgtggctccagttactattattatttgtattattattgagtccttggaactaagccaggcctcgaagggtcttggaatgatgcgaggaagagggtaaggtgaggccggcagtcagtcacaggtttaatatggagtctttcatggggcgccctcctgcccacctccgtctgtggggtcgttgagtcccttgcacccactaagtctgtggctgtcccaaagaccgttcccttccatggtcacaagagcttcagacaagaggccactctgaccagcacttcagcctcagggcccctggcctggggtggtgggagaatggtgaggatgtgctttattcgagggggacaggagagctgcttggggtcaggagggcgggttcgggctagtgagaaatggtgcccagtgatgtggggtggaagggaggccgtcctcccagctgtcttgaaggtttatgcttcctcgcatctcttgtaagttagaggggaaaagtttagctagttaaaaaaatagatatgatgagctaaaagaacatagtagaatagtaaaatagctgaaaaatagaagatgatcaggattcaataaactggaagagtatatgataaaagtataaatgccagaaggttcagagggcaaggacagcagtgagcaaaccccatcagctaaggcctagcatggtgacaactgtgtgtgggtgagccgccggccctcctgtttgtcagacactgcagcccctcccatgggaaggctggatggagaaccccctgcagtggctgtggaattgaggagctggagcaggaggacggtgggaggcggccactgtggttggggacctgggggacctgggrcagagcagcccaggacagcctctctggcagtgcggggcaggagctcactcatgttctcaacccagacaccatctgcatccctgatggttccaaatcccctttcatttttaacattaaaacacagtaacaattaataaagcctttcacaacattcctgccccgggctgggccctgccattctccgtgctccccagttctcgggatctgactgctggctgtggctgtggctggtagacgttccgtgaaagtttgcttctagcgaatttattccagtaatggtgttcaatggctagtccatgttggctgaactgaaaatattgaagatttcaaaaatacagatattcgtgaagaaccacttcattcaatgataaataacttgtgtatttattatctagatagaaaaacactgtaacattctttgaaaaggattttctctttgtactgtgtatataattttgtcttctgcttttttcatttaatgattttctccatgtcattaaaacatactttctcatgtttgaaggatactgcatcctgggaataaacactagttcatgtaactactccttattgttgaagatttagaccgtggcaagttttatgtgtgtaaaaggacatcttgtataagggacatctttgtgcatgaagctktttctgcatttcatattaacttcttaggctaacttcaaaaaataaaatgattgggctaaagagcatcaatgttttaacatttctctccctttactctttttctttgagattctctcatttataacactgtgtctggcacataatggctgttctaaatacttaatacagagttacttttggtcattcattcattcaaaaacatttactccatatcttctctggcatttagatgttaatgagacaaaagaaaataacttgatcccgatagtggcaaaggggaaagaccagggctgggagtcagtgactcgctttcaaatcatgtttccatcatttgtttcctgtgttactttggggaagtcggtcaacttccccaagactctgttttctttcctgtggaaaaggtgtttcagtgataacttagcttaaagggttgtgagattaaatgaagcaatgggatgaaaatactcaacccagaggcgcaggagcctgtgccgtgtgagctgagtgaaagaagtcacagctctatgaggaggacagacaggtaacagctccagattcttccaggagtggtgaattccgtgaggggattgagagggtggcataaggagatgacctttgagcctccctggagggatgagggagggcccagtagctcacaccaggcagagagtcggggagggctggcatccagactgggcactcccctgcaggggaagggctgcctgggaccagatagatagagcgggctgggcacagagggctgggcacaggcggggcagcggtgagggtccagacgccctgcctgggacacgcagcttcagcaaaggcttgcactcagggttgtcgggagcacagcgtctgctggaagggagaatgtcacggaccaggagtggagcgaggtcatcyggggaygttggaaggctctggccacagctggtcmtcagtgcggggggccagtttggatgcggggcctgaggaccaggaggctttgaggatggcgctgcttttctgcctcggatactctcgtttggggttattcggtaacgtctgaatctggagattcagaaggaggagaaagtgtgctgttgttttgaggaggagggtgctggagagggcggtggggtgtcattttgtttgcacacaacgtaggtgtgatgtggagcacccgtgtcacattagatctgtggcagaacagtggggctccttccacgggccctacatggggccaggccctgaaagcaccatgggggtggcatgacaggcgtcctccctgatgggcctgtgtctggcaggtgtgcaggggtgctcatggctgtggtcggcacaggccctggggttgtggagaaggtgagattggccagagagaggctgcagtaagaacgggcaagagcaggaggcagacctggggatgcggcagctcagaacggggagcgggtagcggtcaccgagggtctggagacgagggagagggccacatgctgctcatgggtgcaaccgggtggggagtgagaagttgcctccagatggcatctggaaggggggcatgctaggtgcgggcagggagagcccgaacctgtgggggcccagccttcaccctggtccacacggggctccctgccttccaaaagtgtccctcacctacccggtcagaggctgcctgatcaccctgctttgcttcttccctgggacatgagtccccgtccctagggcagggactttatggaccccctccttcgacgtccgcactccctggagtccacacagggccgtggacatctgcgcaaggaaatggcttgctgggaagatgacttcttaggagggccttctcgttctgtggatctgtgaggtccaatctgttctgacacacattggcgatgagatacattgtagctcagcctaggaacttcccgggtgcagaatggactgtcttggagcgtggtctggacaacgctctgtgcctgctgggagcatgagggtgcagcatggtgtgggaagaggccatcaccatgtgagatgccgggccaggccctgagacgcagccctgactccggaccctcatcctttgtgggcacctgctccaagcaaggggatgaggattggtcagtgttgaacacacctagaggcatgagagtaagtttcccatttctgtgttttcagtgttgagaggaaagcctgccaaggacagaattgtgtccccgtcattcatatgtggaagacctgactcccattgtggctgtatttggagaaggggcctttaggaagtaattaacattaaatgcggtcacagggccgtcgtccaacagaggtggccttaaaagaagtggaagagctctctctttccacctgctggaaggaagagccattcagggagagagctgccatcctcaagccagggagagccctcaccagaaaccaaaccctgccagaccttaacctgggacttccagtctccaggactgggagaaaggaagttctgttggtcaagccatatccgcatacggtatgtggatatggtagcccaagctgacgaacacaaagtcacttattagcacacacaggttggccgcctgctgtggggtgggccatgggagggctggtttagcctgtgcagcagccttcaggcacctgtggccgggagcagaggcacacagagcagtgcgccagcagtgacgggctccccgaactgagcagatccaagtcaagctaaacgtttcctttgcattagtggccatgaaactccctttcacaaagatgggttgacgaaagccgtgaggccgtttcctatagtcgatcctgatagaagggcctcccgcacacagtgggaggggcctggggccaaggccagcacatgctcaggcctgccgacatcttaaacctgggccttctgcctcccctgggcgttgccctgcccagcacatcctgcagccttcagagtcaccctctgaatccacagaggagctgcaccttgtagcccaagccaacatggcccaggccaggctggttcaaaggtgatgagtctgaccagtggttcttaaagtggggtccctgggtcctagcagtgaaccctcagaactgggccatcctaaacctttaataattacaggctaatgacaatgtgcctgaacttggcaattatcttttaattttatgagcgttatattttacgggagagtcatagaatcatctagaacattccccacatgttgatgcccgtagttgaggcctggggtcttacatgattggttattttccacactcacagtacagtgtgaacaggattgtgattcctggctttgctgcttttccacatacctccatgaaatgcgtgaacacaggtgcgcagattgtcgtgtgcagaaaagggcagtgtgtgcaagcactcgggatggcctgaactagaagattctccacatgaccgattcagtcgtctctcattgtgtgtgtgtgtgtgcgtgtgcttgtgtgtacacatgtgattatgcgtgtgcctgtgagtgctggctgctgctagaatctgaagccctgcatttgcgggttttgaggctctcacactgctccctgctgyccctggcatcctccctttgggcggccaagatgttttctgtccctcccagcagtcctccctgaaaacgtctgtgctccttgtcgtgttccctcaggccctggctctgatgatgtcatcatgaatgatgatatttaatgagacacscctctcaggtcagatgaatgcattttaatagggattttctgcaaaatatctgaaccccaaataccccaagttgttgatggaactgtagtccagctagttgttgcctcgagacgggaaaagtaagtaaaagtgccttggtcaaagaagctgaggcagtgttccttgcagtagtctccccttgggagttaggaaggtgtgttgcatagtgaaggatctgacatgtcctgcagtcacaagtccaggtttcatctcggtttctctgccttccagcctcatccatgggacaacttccatatcctggaggcccctctgggaaacgctgccttcagcccatgaagtcgctccgctgtgcagtcgtgggcctgtagtaggcagctggagcgtggaccgttgggcttttgtaattaaacagcttttattgtgataaaatatttataatgtataagtgaccattttaaccattttaagtgcacagtttcatggcgttaagaamgttcatattgatgtgcagccatcaccaccctccatctccagaactttctcgtcttcccagatggaaactctgtccccatcccctccttctcctggcacacgccaccactctgctttctttttctatgaatgtgrcaactctagggccctcacgtgaggtgagccatgcagtacatgtcctcttgtgtctggctgccttcaccgagcactatgccctcgaggtgcgtccgcgctgcagtgcgtgtcagaactccctttccaagcctgagtgtggacgggccacaccgcgttcatccctccaactgtcastggaccttttggtgccttccagcttttggctgcagtcaatgaggctgctctgggccttggtgaacaaccgtggcttttgccgtctggcagccccatgcgggtggcgctttgctctgccaggcaggagattggcggtgccatgttggtgcttttggtgaagaccagagtgttttcattgcttgccattgaggagtgtttttacttatggaaacgatatactgtctgtgaatatcctgctctaaaaattgataaccaggtcctgcccgatgggtgtttacaaatatttgccatatggaagtcatgaggggactcctgggtcacttacagagggaacagcctataggaggggtacttggcaggtggtggctggagtcccaagttcctgcccttcccaccaggctgcaagggtcaaactgacatctttgggacgagcacaggacatcatcctccagctcagtcccctttgctaaagacacactcaggaggggacagcaccttttgaaacctaactcctgcaaaggggtagatatgtaaacttggggtagccttgtgtcctgggggctaggctgacaaatatctttttaaagatcatctaactgctggggaggctgtstctttgaagatgatttacttcttctaactgggtttcatttttctctcctagcttatgttcctgaggaagaattgaaggcagcagaaatagatgaagagcacgtggaggatgacgggctgtctttggacattcaggaaagtgagtacatgtgcaatgaagagacggagatcaaagaggcgcagagctaccagaaytccccagtcagctctgcgactaaccaggacgccggctacgggtcgcccttcagtgagagcagygaccagctagcccatttcaaaggctcttcctctcgagaagagaaggaggatccgcagtgtcccgacagygtctcgtacccccaggacagcctggcacagatcaaagctgtgtatgcaaacttgttctccgagtcctgctggtccagcttagctctggatttaaagaagtcgggttccaccaccagcaccaacgatgccagccagaaggagagctccggccccacccccacaccccccacctgccccgtcagcaccactggccccaccacgagcacgcccagcaccagctgcagctccagcaccagccacagcagtaccaccagtaccagcagcagctccgggtacgactggcaccaggctgcactggccaagacgctgcagcagacgtcctcgtaygggctgcttcctgagcccagcctgttcagcaccgtgcagctctaccgccagaacaacaagctctacggctccgtcttcacgggcgccagcaagttccggtgcaaagactgcagtgccgcgtacgacacgctggtggaactgacggtgcacatgaacgagacaggccactaccgtgacgacaacagggacaaggactccgagaagaccaagaggtggtccaagcccaggaagcgctccctgatggagatggaggggaaggaggaygcccagaaggtgctgaagtgcatgtactgtggacactcctttgagtccttgcaggacctcagcgtccacatgatcaaaaccaagcattaccagaaagtgcctctgaaggagccagtgccagccatcaccaaactggtcccctccaccaaaaagcgggcgcttcaggacctggcgcccccctgctcccctgagccagcaggaatggccgcagaggtggccctgagtgagtcagccaaggatcagaaagcagcgaacccrtacgtcacrcccaataaccgctatggctaccagaatggcrccagctacacctggcagtttgaggcccgcaaggcgcagatcctcaagtgcatggagtgtggcagctcccacgacacgctgcagcagctcaccgcccacatgatggtcaccgggcacttcctgaaagtgaccacctcggcttctaagaagggcaagcagttggtgctggaccctgtggtggaagagaagatccagtccatcccactaccgcccaccacccacacgcggctgccggcctccagcatcaaaaagcagcccgactctcccgcggggtccacgacttctgaagaaaagaaagagccagagaaggagaagccgccygtggctggcgacrcggagaagatcaaggaggagagtgaggacagcttggagaaatttgagcccagcaccctgtacccgtacctgcgtgaggaggacctggacgacagccccaagggagggctggacattctcaagtccctggagaataccgtctccacggccattagcaaagctcagaatggtgcgccctcatggggtggctaccccagcatccatgcagcctaccagctcccgggcaccgtgaagccactgccggcggccgtgcagagcgtgcaggtgcagccgtcctatgctggcggcgtgaagtcgctgtcttccgccgagcacaacgccctcctgcactccccagggagcctcacgcccccaccgcacaagagcaacgtgtctgccatggaggagctggtggagaaggtcacgggcaaggtcaacatcaagaaggaggagagaccccctgagaaggagaagagctccctggccaaggctgcgtcccccatagcaaaagagaataaagatttcccgaaaacggaggaagtcagcggcaaaccacagaagaagggccctgaggccgagactgggaaggccaaaaaggagggaccgctggacgttcacaccccaaatggcacagagcctctcaaagcaaaggtcaccaacggctgtaacaacctggggatcatcatggaccactcaccggagccttccttcatcaacccgctgagcgctttgcagtccatcatgaacacccacctgggcaaggtgtccaagcccgtgagtccctcgctggacccgctggcgatgctgtacaagatcagcaacagcatgctggacaagccggtgtaccccgccacccctgtgaagcaggccgatgccatcgaccgctactatyatgaaaayagcgaccagcccattgacttaaccaagtccaagaacaagccgctggtgtccagcgtggctgattcggtggcatcacctctgcgggagagcgcactcatggacatctccgacatggtgaaaaacctcacaggccgcctgacgcccaagtcctccacgccctccacagtttcagagaagtccgatgctgatggcagyagctttgaggaggcgttggacgagctgtcaccrgtccacaagaggaagggccggcagtccaactggaacccgcagcaccttctcatcctgcaggcccagttcgcctcgagcttgcgggagaccacagagggcaagtacatcrtgtcggacttgggcccrcaggagagggtgcacatctcgaagtttactgggctctccatgaccaccatcagccactggctggccaatgtgaagtaccagttgaggaggacagggggaacgaaattcctaaagaacctggacacagggcatcctgttttcttttgcaacgattgtgcctctcagttcagaactgcttctacrtacataagtcatttggagacacacttgggcttcagcctgaaggatctctccaagctgccactcaatcagattcaagaacagcagaatgtttcgaaagtcctcaccaacaaaactctgggcccactgggggccaccgaggaagacttgggctccacattccaatgtaagctctgcaaccggacttttgcgagcaagcacgcagtcaaactgcaccttagtaagacccacggcaagtctcccgaggaccacctgatctatgtgactgagttggagaaacagtagcgtccaggtatgcaagagaccgcggaacattgcactaaacgtcgtcgagctgcactaggcctggcctgagcctctgaaatcagtctttcctttgttgctggcccgcctctctggaccttggttttcttacacatattttgtatatttatatgctctctgtccgatctgtgcatgttatttttctttttccgtgagtcaaagtctgacctttattttcaacatctgttcttggtgttaagctatcttttgtaggaaatagtggggcacactactcagagacattatttagcagtaaagaaagacacaaataacaatgataaaaagacatcctaaaatggtgaagttgccatgacaataaaggtcatagaacctggtagtgtcaaatttaaccctttgaggactgtaattgcatttctgtgcctttcacttgaaaaaaaaaaaagaagaaaaaaaggcttaaaggcatttcattcagatcaaaagctgtgtcagacacaaaacttatttaataattaaaaaatgagcttttatatgcagaactggtttgtgaggaaacatgcatgcagctgtgggaagatagaaagctgtctaggactcacggggttcggaagccacacctctacatgtctaaaacaaaaaacaacaacaacagataccccactcgccactatgcccaaaccctctggatgctgaaaaatgccactttcggcaaaaaaaaaagtatgcaagctattatttaaaaatgtgtaaaaatgctatttcttttttcctgtaaaatattgcagtttatagttatttacaaatgtaagctttggtacaagctgacctttctatagcgtgctgcattggtaaatgaaaaaaaatggggcaaacgttggagtcctttccttgtaaattgccagcatcagcttaaaaactcctgtatgttacatatcgtaccattttaatctcttcaactttctttgtaccttctggctgtatgctttctcttttaactttttatattgtcattttatattaaatttctgtgtatataatgtaaaaccacaatttttgaataaaatttagttcctgcagcttgatttaaatagaggacttttactggcacctgcatctctccagatgcatgtactcagagggactgtcagacaaaaataaatacataaaaacaaagcaagcaatgcactattaattatacattttgatgttctatcattaatattgtacagtacattttggttcacacaattaaatccactgttttctcagatgtaaaataaacccacatgcagttcttgatttacacggattgtcatgtcgtcattattttgcctttgagatgttatttcagcaacaagaggtattgcttatgcaatcaaccaacaaaaattctattcagaatcatcatttcatgatttgtgtgctgacatgtttcattcaaatgataagtattgcgttttaaaaaatgataattaaaatttttaactccactgggtgccaaggattgccgagtttagccattgagtgatggctgttttgtacttagatgggctgagatgcgtccttcagagaatcctttgcaaaatttaaaaatatgtataattaacctgtgtgtctatccagatatttaatgatgggagtagaggggtagggcttactccaccagcaaagaccccaaggaccctggaattagttctgtgttactccaaagaggaaaacctgatttctgagcttttaaaaatctacaattttaaaaagaaaactggctgctgttgtattcagtgtttgagatgaggcttctttctgcagattagagcacggcgggctctactgagaatgtcaggacccttgccatgaaaacgcccatcctccagggtgacccccatccctgaaagcccaggactcactgcccagtctgtattgagggaagcattgacattgaggccccctggcttctccccccagccccagaagcacttaatgatacgaccaggaaaatttacttttctgccttttgcttaaattttcataaaattatatcctgagaaaggttagagcttacaccgctctgttcagaaacagctaagcaattgtgatattttaattatttctctcacattgccccgtgacagcaaggattgttctgtttccattaatgatttgaggaggaggagcaggtccaggtgggtcatatttacacagtcttttgtactaacgcagcagagcgccagggaggtttgctaaatttttctgacttttttcattggtaaatagctatgtcctttaggagcctcagccatttagacatttcagttcaattactgggtgattatgtactttgggctcaaggggtgacagagaagaataacaattaggcttatggcagtggtgtgggggctttgcataataatcctttgaagttatgtttattttaccacaaacctgcaaacatacgattatgtgatttcacccttatagcaagagtgttagcagcagcaggtgaagtggtacaaagggaggtgagcgctccccagaacggggtcgctgggcccagtcccagtgtgcagctaagcactgagtcattttaaagcagcttgcaacttgagttccgatcactggggatagacatagaattggggttttcctttaaatttttttcttcctaactcaccaactgtattgctacgttgtcattgaccctaatttcccaaccaatgcataggagactaggttatcttaatcataccactgatagtgataatgaacgtggcgaccccgactagtatttgtcgagtgcttcctctgtgcccaggactaattcgaagtacttcccacctatgaactcattcattcctcacaactgtatgcggtgggttctgttagtttcatgctcggtttacaggtgaggagccaggcacagcagggttgaggaatggacccaaggccacatggcttacgaacgactaagtgactaaacatgggcttcgagcccaaaaagctgttgctgcagaaccacactctgaacacctccttacaggccttgggatctgccccaggtggggatctctgctgtcactcagaggcagggtgtctcctacggggtggggagctagaggcaaggcttcaggatggtgctgcgcggccagggctgctcatcacctcccactgcagcccttgtggatggcaaaatgtaaccaccccatggtctgctggatttgagaaaataagttgaaagatgtttttatgattctgtagcaacttcaattgaatacgggtatacttagtaacacagaaactcaatttgtaaggatacaaatggattgactaatccggggaaggattgggatacctacaatctgaagatttgcttgacacgtttccccttccttcattgatgtccgaggaaacgtgtccacccttcacttcgtgtagttttgtgtgtcccagcaaatgaactccacacatggcattggggcccctcggcctcctaagtcggtcccagggaacagatcttcatcttctgtggtgtggggacaagatggccctaggcacttggagagagtcggccacctgtcccagcctgtgggacgctggcaaggaggccagggagagggcaagtggcttctcagtccagcagtctggtttggcttggtcgtcgtgcacctgcaggcgtcaccctgatttgcactcatgtttgcagtttgagacttggagttaataactaatcatgtatttttttccttcaaatgtagaattttttaaagtttatggtattccccaaaatgtgtgttgggtgaggatgttgctttataggtagtcagtttttaaagagagagaaaacctgtgaaataatgacagacaatggtttatgtaagtgaaacaaacttttttaggcagtgtatgcaaaaaggtgattaaaaattctaaggtttctgattcgacatttctatagttgacagcctttgaaaaactgttaactttaaagcatgtctaatctatttccaaatgttcagaaacctgtacatgcaaataaaggtttctacttttttctgagggaaaatttcttattattttattataatttatctgaagatagcggataccattgaaagctaattattgaattgttagcttaaaagataccaaaaagtaaaatctcttttggtgacaatttgtgctttttacataacttttattcttatgacaaaagtgatacatagtcattgtagaaaacttggaaaataaccatgaagttaataaaaagtattgttttcatctagagaaaaatcactgttactattttagtgctaacatcttttttccatatttctacaaactagagatcatgttcaacatactttttgtaccttgcttcttctttacctgacagtagataatgtctgttttctcatttcattacatatggaggatttttaaatcttattgagctgtactgtaatttatttaatcaattccttattacaattttaaaagcaacatttagatttttcaagttttctcagttagaaatattgagtacaaaaaattctactcaatattattgtgaatatttttgattatttccttacaacaaatacctagaattgaagtcgctgcatcgtaatgtgatttgatgcacatggccaaatcacccacaggaagacttgtactggtttacacacttatttgcatgagaatgactttctacacacctttgccgtgtgaatacaagggtttgatgtttttaagtttttggccattttcactaattaaccaatttaatcttgatgttttcatgtataatattttttaacgctggttgttcacttacgttatttaaaaaagaatcattcaaggacatgtatgattttcggagtacttttacattaattatgattttatttatttatttattttaaatcagggtcttactctgttgcccaggctggagtgcagtgacatgatctgggctcactgcagccttgacctcactgactcaagcaatcctcccacctcagcctcccaagtatctgggaccacagttacacaccaccatgcctggctaatttttgtaatttttttttagagataaggtttcaccgtgttgcccgggctggtctcaaactcctgagctcaagtgatccgtccgccacggcctcccgaattgttgggagtacaggcgtgagtcagcctgcccagacttcatgattcatttaaactcaagtggtcacagacaacaacagcaaagaggagagaaagagctgaactgagacactggctcctctgtgggtgtggagaaagaactggactgagaccctgtggctcctctgtggatgcgggactagaacagggtagttattttccaggtctgttcccccttgttcgtccacaaagctatgtctcattaaagggtccccagtgacttcaagtgcataatgtacttttgtactctcttcagatttcccaacttgctcacagggagaggagtttccaattttatgagttctgttgctgatctgcaattagtattgattagcaaaacaaaaataatctcaaaatagagtggtcaccaccctagtaggatgagatttgatcacttagagtaactccataaaaaaaaaaacacttggattagacctagaagtcaagagactgggactacttttaaatctgtatcagaatatctcccacaggtgagtttgttccagagctgaaattcaagggtcctgctaagcgcttgatatctttgacccagattcttgatagccacacgcagaggccaacaagcaaagggtgaggacgatgaggaagcatgttaccttgaataagaccaggatgcgctgaagagtacgtgggattcattttctttcttaaacatcaatagtgtttcaccaaaagtgtttagatgacctgtaactagtcagtcattatttttcttacatcacccaaaaatatttacaatttgatctgactggtataaagtctgtcttatgatgtgtagagtgtattttactttgaacagagagtagaaacagtgggcccacatatttgatcatattttgttgaaatacttcagatatggcacacatcatatttaaatagtagctaaaaatgtagttttctggttaggatgcagtgcttaaagatgaatttaaaaggaggtctttaagactgaagcattctgaacaaagctgaacttgcagggatatttttccttgaaagcttttttgaccaaaagtacattagcggcaaggaactggggacagatacattgggaacaccagtttctaaagtatgtaaataataaggaaaagcccattttgtgtaactgtaaccgtttgccaaattcatccaatcaattcatacacaactgggtttcctatgggctgttacaaaaccccaactggtcctaagactaatacatttttctcctttcagtaaatgtttcttctttagatacattttaatgtatttatgcatgttttcgagtaatttttccaattttctccaacaaactaaactaaaattttccttttctcattgtagaacagcagagtatgtggatgtgtggtaagcacggtgtgataacaaaaccaaaaaggatgggcatttgggaataatttattatcatgtagtttaaaattatatattcaatcgtatttctaagccatagctttcatgtcattatgaccaattgattaatgattgggcattaattgattaatattaattaatgattgattaaacatacccatttcaacttttgactcttttatgtcattaaaattttagaaagcagtatttagttctgttttgatttgttaagtttaagagacagtaatgccctaaatacttgcgtttcatttgtaatatgtttatttacaaattagaaaaatctaatttccatttttaaagcaattaattttcctcccagatatccccatccttattgttttagagttgtgaaattcacacatcattcacttggatacacaagattccaggatggggagctcaattattggtcctatttagtggaaccatgggtttttgcattgttgaatgggtaataaatgaccacatctcaaaattggactctggacatattgattaggacacattccattttccataatttttttcatcaattagtggaaactaatagcattaaactctaaaataatctgcaagcagaaatctgatggaaagggctttgtccaaacttcagattatgatgaaaaatatttttttaaatagggaatttaaaacaatcttttgcatggtgactgttttcttaaatgtaacgtgaa

SEQ ID NO: 96212 - DNA, 34740 bp, Homo sapiens
acaattagaaagtcacaggatttctcatctaagacattggaggctagaagaaagaagcacatttttcaagtgccaaaagaaaagaacagccagcccagaattctgtatgcagtgaaaatatgcgtcaggaataaagcggaaatcaagacattctcaaatgaaggaagactaagagcttttgttgctagcagacctactgtgatggttaattttagatgtcaatctgacttgattaaggaatacctagaaacctggtaaagcattatttttgggtgtgtctgtgaagatgcttccagcaaagattagtgtgtgggtctgagtggactagctgggggagatccacccgcaatgtgggcaggcaccatccaatctgctaggggttcagaaagaacaaaaacagagaaaaggtgaatgtgtcactctatctgccagaactgggatgcactttttcctttcttgtcctaggaaaacaactccaggctccccagcctttgaactctaggacttacacaaaagtcaccctccctccccaaccaactgggttctcagacctttgtccttggactcggagttacatcactgacttccctggttctgcagccttggagcttagaccccgccacactaccagcatcccagagcctccagtttgcagacgacctgtcaagagatttctcagcctccacaattgtgtgagccaatccctctaataaatccccttacgcttcacttgaactactaacatgttatcgctaattgactgttttaagttatgtaaatataatgtaatacctagagcaaccactacaaaatttacagagataaactaaaaaaaattatacaaagagatacactcaaaaaccttgcagacaaatcaaaatagaattctaaaataatattcaagaaatcaatagaaaaacaagaaaaaaatagaaaaactaaaaatagaagcaacaaacagaaaacaaaatatgggttggaagacttaagtctcaacagattacgaattaccttataaacaaacagtctactttatttctaaaaggcaaaactcagaaacaactaaaatgcccagtaagtgaatggctagacaaattgttgtacatccacacagggaatcctactcagccataaaaagaaatgaactattgatacacaaaatagcttgactggatcccaagggccttatgatgaatgaagaggctgatttcaaaacacttatactgtatgattccatttacataacattctggaaatgacacaattatagaggtggaaaacagattagtggccagtgattaggagtggtccgaggaatgtggatggatgtgagtacaaagaggtaacacaagtgctatgtttgtggtgatggaatagttctttgtgttgatcatagtggtaattacatgaatccgcatgtgataaaatggcatagagctatatgtacactcattgcatcaatgtcaatttcctggttttgatgtactatagttatataagatgtaattcactggggaaaactgagtgaagggtacaaatgactttttgcagaagtttataataattaaaaattataattataaagtaatgtatttataattataaatataagtatcattataattataaaatatttataattatttttaaataatggtatttttaaataattgtagattttaaataattgtaggtttagataattgtagattcccaggagaatctacaattatctaaaaatagagtttaaaaagtctcataaaagtctcataaaaggcatggtggcttacacctgtaattcccagcactttgagaggccaagatgggtgaattgtttgagttcaagagttcgagaccagcgtgggcaacatggcaaaactctgccctagaaaacacacacacacacaaaattagctggatatgttggcgcgtacctgtagtttaagctactcgaaatgctgatgtggatcacctgagcccagcacgtcaaggctgcagtgagccatgatggtgcagttgcactccagcctgagtaacggagcaagataaaaaaaaaataacataaactatacatatgtgtgtatgtgtgtgtataaagtctagaaaagcaatgataggcactacaaaaagttagcagagttatgaacgtatctgtgttatttcaatattttttaaaagaatgcctttatgaacttctcatataaaaaagaaataaaagtaatgtaaaactgtaaaaaattcagatgtacataaaaatataaacaagatggaaattgcctgttctgtgatgccacagataatttcattaattcacctaacaaatatttactgaatacatcctatagagctatgatctatcacgattttagtgtgcatttcagacctttcctgtacctccagagttatatacaaattgtaatcattcattgatatgtattgttacaagcgtaatatgtacagctggccctctggatccacaggttccaaaactacggattcaaccaacctcgggtttgaagtattaggggaaaaacccaaagataataagacaacaataaaaaataatggaagtaaaagcaatacagtataccaactatttacataggatttccattgtattagatattataagtaattgagagatgatttaaagtgtatgacaggatgtgtataggttatatgcaaatactatgctattttatatcagggactggagcagccttagattttgttatttattgggggccctagaaccaatcccctaccaataccaaaggacaactgttacatcataagctcttattacttaacattcattattcattcattcagcatatatttattgagcatctatgttagccaatatcatgctaggttctgagaatggaaaggtgaataaattgtctgttccttaacaaaatttactgatatggtttgtctttgtgtccccacccaaatctcatctcaaattataatccccaygtgttgagggaggggcttgctgggaggtgattggatcatgggggtggtttcctccatgctgttctcatgataatgaggagctctcacgagatctgatggtttaaaaggggcaggttcccctgcgtgcacgctctctctctctcctgctgccatgtaagacatgccttgcttcctcttcaccttcttccatgattgtaagtttcctgaggcctccctagccctgtggaactgtgagtcaattaaacctcttttatttagaaattacccagtctcaggtagcatctttatagcagtgtgaaaactaatatgcttacaatatagtgggagagaatgtcactaaagaaagaatatttccaagaagtatacaattatagattatgtcaagttcagacaactgtaaacaatgttctgaatatccatctgtgaaaggaaagggtgatggctatgatggcaagataccatggcatgtttattattgatgggaatgagccagtagaaagaggttaaaaatacaagagcaagagaagggaatcctggatttatagaaagcttccttagaaggaagaagccggagaacaagttaaagggttggcttcaaatagaagcgaactgcctcaactgaaataagcaagagtgaggatgactgaaaatataccttagtttgtagattcagaggtttgaagaattgccaaaatatgggacaatgtcatctgcctagagcaaaggagtatattggaagttctgaggtttgaagagaatggagtttttaagtagtagtttggggaaagcatgckgaatagagaagggcagtaactgggcatgcttcattaagaacctgtattctgtcatgtggggcagattctaaatattttcagctctcttactgcaggcaagayaaaggcaaaggagtaggtattagaagagagagacaaacttctagagggaactaaatttttgaagaggattgtcttccaactgggaagagagggaaagctttttgaggggagtagatctgagctgggcaagagaacacacttgctagagaaagaaaatggccagagagagaaaaggggagaaaaaagtctgggggagatggagataaaagcagagtagtgggggatttctggcctaggtgcaggaatgtccttttatcttccaaagtaaatgtggtcacagtaatattaacagtttgtcatctgatgttgtgaaattgtttccatatattatttagactctcagacctgacaatctatggaggaattcccaggcatctttagctgctacagagatgcatgaatgaaggacaagtatattatcctccacacattagaagagaggctccagggagcaacaggaggcaaaagttcttcttttctttttttttttttttttttttgagatagtcttgctctatcacccaggatggagtgcagtggcatgatcttggctcactacaacctccacctcccaggctcaagtgattctcatgcctcagcctcccgagtagctagggttaaaggcacatgccaccacacctagctaattttttttatttttagtaaagactgggtttcaccatgttggccaggctggtcttgaactcctgacctctagtcatctgcctgtcttggcctcccaaagtgctgggattacaggtgtgagccacactgtgcccggccaacatttatcatttgtgttgagactatcccaacctttctcctctattttgaaatacaaaataaattattgattactatagtcaccctactgtgctgtggaacgctacaacttattccttctgtctaaccatattttcgctccttttaacttctcttcatctccttctccctccttatccttcccagcctctggtaaccacaattttactctctatctccatggagtcaacttttttttagctcccacatatgagcaccaaacttcaatgtaagacccaaaactatgcagctattccaagaaaacgatttgagaaaatgcttgaaaatgttggtctgggcaatgattttttttttttttttaattaagactttctgaagaaaagggcatacttttcactgaaaaagtttgagttttttaaatgagcagatactcatgcattactagtgcagccaaaaattatcaaaagtagggaagaatgcaaaatagcgtgtgcctcttaactaaagaactgttaagatacaaaacttggctctttgctgcctttcccgcactgccaagagggaaacatgaattagttacattgccgtggtgctcactgggagttcgctgtatggaccagatgggtactgctccgaatttccattcaagtctgacattcttttgtcagcgtttgtgtaaccggttttccttgcattcagaggaaagacagcatggaagtatggatgggaaggttgagacgattggatactgtatggtaacctcgatcgcagctctcctatgagacttgcttcttggattctgagtcacttaagcttgccccttctctttcctgaccctcttccgtttccccttagattggagattctcctcagattctaagtctctgaaattattagtgttggcagcccctgggcccatggaggggtctcaagtcttcagttctcaaagatcaccttttaagcttcattcggaacatgacacagccacacgagtcctagccctgaatctcacgaagacctcagtacacctggaaaaggcagcacacccagttacgacactactagagacgtcacacgcctcagcacccatccgctcccagcccagaacgagcgcacgcgcagaacgagagagcggccacccagggatcggcgctatctgcacagcggttacagtctcggaaaggcctggcttcttcgtggctttgtggagatcccttacagcggccatttgattagcacccgaagagattcaaaggaagcagttgttccgtccccaacatatttccgtttcaaaccacccacttccggtttttcagccggttccggtccygcccttcacttccggtcgctttcggtctctcagcggccggtttctgcgtccgctgccgcaggttccaccgcgctccaggtgaggggttgcggggcaccctggcgcgctgcccttggagacgctgttggggctcggggacagtggctttgcggcccgcgcggcgtggcttgcactgcggcgggctggggatagtgtctgtcctagtctgacgcccaggcccctagccccggcccgcttagtcgcgggggccgctgtcctcccatccagcagtctagcctatttggagggctttctgtttcccagtgggttttgcgtccccaaacttcattcctccgtcttctcaggcttgtccatccctcccctcaacctccttgttgaaggcatcccggcctttttggttctggagcctccacctgcctcctaatgctcccctaagtcagttagcacagcccccgaccctgcaccacctcgcagttgttgctggtgtgcggttctcgccggagttcttagtgcttcacggttatcttttgctgggattgttgaaagttaacctcccgttaattcccaaagtgttacttttactgctatactttaaaatttcttcatttgccactttttaggtttgtggtcccgggcaagtttaatttcttttcaggattcycatttgtataatgaggacaacagctgttggttcaggattgtgaagcttcaatgagataattgtttagcatgtttttattccatcatgaacaccatttgtattgtgttttacagtttacaaagtgctgtcacaggtgttacttcataccttaacactactcctgtccagtgaatattagtagcctcatcttgttgagaagactgaggccaagaggtggattgactaggcaaagtcaacacagtatgttaggtagaactccaacctaaacagctattcttgaccctaggttgaccatatggaagtgtattctttgcttgcttgtttgggtttgccaacttcactcctccccacaccccaaatcatttttcagcttataaatctgatgggatctgaaatgatacaaaatactaagaaagaaggttaaatgtgaaagcaaaatagctcatgcatttatatcacactgcttcattggtgtgaacggtcttaatgatgaaataaggttcagtaacttttaaacaaatcttaaagacatatgcatttacaatttttatggtgtttgtttcgcttggccctttaaggcatttgccaacttggaatttccacttgtgggataggtgcttcgtaacgtttttatgctgctttattaaccatatagagcccatgccctctggcacattttttttaaggctgaaaacattgaagagcctgtagtactgactctcaaatttgagcattcatcagaggtgaggaggactgaccttgttaaaacacagattcctaggtcccttctctccaccccaattacatttctaccaaattaccaagtgaggtcaatgctgttsgttagcccagggaccaygctttgaaaaccactagtctagaagagcaatcacttgtccagggtcacctggaactcagatgatttcactccaaactctgcactactacgcatcacaatatatgcgatattagtgctggttgcctttctagctctcgtaggattcccttttattcttatgtcttacagaaaatatttaaactgtatttcagtttaactcaaaaggtccacttttaattgaagaatataacatttgttatagttctgtctaaaatggaatacgttaccctaaattaagacacttgctttacattttcagtagaacacattgtaaacataggagtaaatatacatttatagttcatatttgtattcatatatgagtaaatataaatatgaatttatggctctctcttctaattggccttttagtaggagacactgtttttaaattatttttggaagtggagattaaaaatttaacctctttcttgcagttggtcctaatagttgcatgaagagtgcaatcaaatgtttcatcaaataagtgaaagcattggaaataccaataccttgagattagaaaatccagttctctggactgtgggaggaatgagtttaatgaaaaatagaaagctttatgcaggaagagacatatgtttggttatttacatgagtggcagccactatataatctttgtgtgcttagatctgtacccatgggttttgtattttctgattgatatggtttggctgtgtccctaccaaaatctcaacttgaattgtatctcccagaattcccacttattgtgggagggacccagtgggaggtaattgaatcatgggggccgatttttcccgtgctattcttgtgaataagtgaataagtctcatgagatctgatggatttatcaggggtttccgcttttctgtcttcctcattctctcttgccactgccatgtaagaagtgctttttaccttctgccatgattctgaggcctccctagccattgtggaactgtaagtagctgggattacaggcgcccaccaccacctctggctaatttttttttgtatttttagtagagatggggtttcaccacattggccaggctggtcttgaactcctgacctaaggtgattcacctgcctcagcctcccaaagttctgggattacaggcatgagccactgtggccagccttgggtatgtcttagcagcatgaaaacagactaatacggtaaattggtactagtagagtggggcattgctgaaaagatacccgaaaacgtggaagcaactttggaactgggtaacaggcagaggttggaacagtttggagggctcagaagaagacaggaaaatgtgggaaagtttggaacttcctagagacttgttgaatggctttgcccaaaattctgatagctatatgaaccataaggtccaggctgaggtggtctcagatggaaatgaggaacttgttgggaactggagtaaaagtgactcttgttatgtattagcaaaggtactggcaacattttgcccctgccctagagatttgtggaactttgaacttcagaaagatgatttagggtatctggcagaagaaatttctaagcagcaaagcactcaagaggtgatttgggtactgttaaaggcactcagttttataagggaagcagagcatagaagtttggaaaattagcagcctgactatgcagtagaaaagaaaaacscattttctgtggagaaattcaagctggctgcagaaatctgcgtaagtatcaaggagcctaatgttaatcccctagaccgtggggaaaatgtctccaggctatgtcaaagaccttcatggcagcccctcccagcacaggcccggaggcccaggaaggaaaaaaggtttcgtgggcccggcccagggtccccgcgctgtgtgcagcctagggacttggtgccctgtatcccagccactccagccatggctgaaaggggccaacttacagcttgggctgtggcttcagagggtggaagcctcaagccttggtagcttccatatggtgttgagcctgtgggtacacagaagtcaagaattgaggtttgggaacctgtgcctagatttcagaagatatatggaaactcttggacgccctggcaaaagtttgctgcaggggtggggccctcatggggaacttctgctaggacagtgtggaagggaattgtggggtcagagcccccatacagagtccctactggggcactgcctagtggagctgagagaagagggccaccaccctccaggccccagaatggsagatctgacaacagcttgtactgtgtgcctggaaaatccacagacactcaatgccagcccgtgaaagcagctgggagggagggtttaccttgcaaagccacaggggtggagctatccaagaccataggaacccacctcttgcatcagtgtgacctggatgtgagatctggagtcaaaggagatcatttcggagctttaacatttgactgccccgctggatttcggacttgcatgggccctgtaacccctttgttttggccaatttctcccatttggaatggctatatttactcaatacctgtacccccattatacctaggaagtaaatagctttcttttgattttacaggctcataggcagaaaggacttaacttgtcttagatgagactttggactgtggacttttgagttaatgctgaaatgaattaagactttgggggactgttgggaaggcatgattggttttgaaatgtgaggacatgagatttggagggrccaggggcagaatggtacagtttgactgtgtgcccaccaaaatctcaacttgaatgatatctcccataattcctatgtgttatgagagggacccaggggaaggtaattgaatcttggggggtggtctttcccatgctattctcatgacaatgaataagtctcatgagatctgatgggtttatcaggggtttccgcttttgcttcttcctcattctgtcttgccactgccatgtaagaagtgctttttgccttccaccatgattctgaggcctccccagccattctgcaactgtaaagtccaattaaacctctttctcttcccagtcttgggtatgtctttattggcagtgtgaaaacagactaatacactgatctttgatgccttaactcttgtatgttcaactgaagagatacaattgtggaggagaagaaacataagatttagtcagaagacctgttctgtaactagctatgtgtctatgtacagattgtatagcctctcaaaactcctgtttccttaattgtaaaagagggaaaacttaccaaattactttctctaatgagattgtgtaaaaacttcaattcataaaatatgaaacaaagaatggctatttactatttatttagcacagtgcctgcctggaacatagtaagcttttagtttaaaaagatttttgtttaaccaatacttaatttatgtagtgtttactaggtgccaggcactatgtaccttgtaaatgttaattaagttaatcctcataaaagccctaagaagtaggtagtatcatcatccctattttacagatgaggaaacctagacactgagagtcaagtaacttctcaaagtcagatggctaagtgggagagatctgggatctgaacccaggtcatctggctctagaatctgtgttcttaactacaccacactacctttcaaatgttaaatgaacatggatggtctgtcagggaaggacttgcttgtagcatcaacctgaccaaatagaacaggaggaatggtagctcataattgcacatttccagttgaacagtgagactcagagtattagaaagtagtaactctaagccaaaaattaggagtgtgggggaatttaactttgagtcctagtatcttttggtgttctggtagcactcctgtatggacaaaaatcctctctatcataagttgtaaaataaggcttaaactgtacacataaaacttaaaagtttggcttcaataaacagtatctattttaacttgttcatttttgtcttcctttccaggtatttttttttctgaaggaaagctgcttcctcatatgtttcaagaatggctctccctatcattgtaaaatggggtggacaggagtattcagtgaccacactttcagaagatgatactgtgctcgatctcaaacagtttctcaagacccttacaggagttcttccagaacgccaaaagttacttggactcaaagttaaaggtaattctctcccctcttcagattttttgcattgaatttttagtattatgaattttaataattattttgaatataattgtttaataatttatacttgctatttgtagtttagtaagtctctccctttcgagatttctctggtagaaatattcttaaaattgttttagtggtaaaagtaagaatattaaagtgttctcgaaaataccatgattattaagattacttttgatgttttagacagtcagtatttgcttgttaaacctttggcacagaagtcccggatgaaactcatttattttctgacatctaccttttagcacagtgtttcgttgtaacgagggcctcgtactcttcccaaattatcttttctgtttcaaaagtaaagacaacatttaaaaattacaggcagcattcatatccagtttaaaagggattttttttatggtgttttgtgattatcatattgaagagtgagttttgagtaacagtaaatctgcagttttcttaggcactcaatttttaaggcttcctggaaaacagtaatattcatcttgaacaacagaataaaacatgaattaattttgtttaggtagttgaataaaggtgttcatctaacatagaattggggagaaaataacccttgtattaattttgacttcttcgtgtcttagatatgactaattcagcagaaacaatttgttaatgtaggaaaaaacaaaacaacaaaaattgctgtgacatctgtaccaaaccttttaatgttagggttttatataatggaatagtgaaaccagcacctgaactttagtgagaaaacagtcatttgcttgtattgtaggcaaacctgcagaaaatgatgttaagcttggagctctcaaactgaaaccaaatactaaaatcatgatgatgggaactcgtgaggagagcttggtaaatgtttactttttgttaccatttgtccatttgaagatattatgatttatactacactgttgtattatagttttaattgtggtaaaattgtcagtctagcaatcaatgaaaaataaaaccygcaccgtgaatgtgttattaactgtataagtatagtagtagcacaaatgatcaaatttaatatggtaaatctgcccaggaaacatacataacgaattattaattgtggaaattttccagtatgggcttaaaagactctggaactcaaattgtatctctcattttatttttatgctatgcatgtatttgttatattaaggataatatggtagaacaaaactttttccatcttaataggaagatgtcttaggtccaccccctgacaatgatgatgttgttaatgactttgatattgaagatgaagtagttgaagtagaaaataggtaagtgcttttcgctttagaagtaatsagttgtcatgtgagaacaagtgaatattttatctaattatatgttttccattagggaagaaaacctactgaaaatttctcgcagagtgaaagagtacaaagtggaaattttgaatcctcccagggaagggaaaaagcttttggtgctagatgttgattatacattatttggtaagtcagttaagaatgcttttcattttctgttacccacaacaactctttttttcttttctttgttttttttttttcttagcaactcatggttctcgtgaaatacttgaaaacttttcttattacaaaagtaaattgctcattgtaaaaaatacagataagcaaaaaaaaaagtcatctgtaatcctgatacccaaagatgaccactcttagtaatttgatatatatcttttagactgtttgtatggatctcctctaaatcttttatttaataacacattgaacatcttctcagtaaaatattgtttattatgaatgatatatatatatgtgtgtgtgtgtatatatatttttttatttttttggccagaaagtattctagtttatggatgcatcatcatttaaccatgttattcmctgttgattataaataattttttataaggaatattttaaaaattatgtttgatattttatcactagttttctgtttagttatattcaagcagattcttgaatttaaaatttctcatgtaggccaggtgcagtggctcacatatgtatcctggcactttggaaggctgaggtgggaggattgcttgagctcaggagttggaaatcaacctgggcaacagagcaagacctcatctctaataaaaactaaaaatactcgctggatgtggtggtatgcacctagtcccagctactttaggaggctgaggtgggaggatcacttgagcccggattaagactgcagtgagctatggagtgccactgcactccaacctgggtgacagagtaagaccctgtctcaaaaaaaaagaaagaaaaaaatgttttgtgttcattgaaaaagaaagatgttccttttatgtctaatgttggcaagaaatagttaacttctgatactggaatttatttctaaccctaaacctaaaacataagttaatgtacagtttttaaaaatttaattaattggttaattggcctgtcattttgatgaaatgtgattatatmtgcaaggtagatgactaaaggtgagtataagtggacatagtttgtttttcattattaaaaaataacatctaaactttagagactaggtgagaaaaaaattttcagtttactacttaagcctgaattttcagtattgctttttgcaaattgaacaaaattgatcgactaaaattggatcttaaggattttaaattgtgttttgaaagacatctttttgtcagccaacgtaattcagtctgaagcagtttgcaatgaaatgtttatgtttgcatttcgtaatatattacatttaataataattggtattaggtacttgttcatgatggtaaactaataattatttatgatcaattttcttttagaccacaggtcttgtgcagagactggggtagaattaatgcggccatatcttcatgaatttctaacatctgcctatgaagattatgacattgttatttggtgtaagctgtatttttttgtttagatttccgtggaaataggttgttccatatattattgtgctgtataaaatgtgacttaaaatgacctgtgtttaaatatgaaatagttttcattttttagcaaatttctaaartgaagcatgtatcacaatataaacttaaacatatattggccaaataccagtgagatagttaatttaactataggacatgagtacattatagtgtaagaataaaaatgactaattttcccaatgaccccaccttgatttgaagtttttccttctgattttttttttttttaactaggcacatatctttagggtctcgctgtgttgcccagactggttttgaactcctgggctcaagtgatcctcctgccttggcctcccaaagtgctggattacaggcataagccaatgtgcccagcctttccttctgatctttgctgtgaaattcttgatgcttcagaatatttttcttttctccttttttcctgactccagttttaaaatacttggaaaaaggtgtttaaaacaaaatcacagtgatatagttctctggaaataaaggcaacttgaattacttaaggaaaaattaatatgtggactaaagccagtgacattgaaattgtggtctgcggaccatttcaagaatgtacaggtctgtgataagatactgagtttgttccaagaagtaaatatactgtaatcgtaagcacactattcagttcaattaacgttttttggtagcaagattttcttggaaaatgaagcaatgcattgatttacatccctcctccccacaaatatttaaagttgcctcttggcaatgtcataagcagagaagagttatcctgactgaattaaatgaagtcccatcaagtaaaggtgctacatttcattgtactaggtctttgagagaaattatgttagttgttgcagtctgtaaattcattttgtatttttccttataatcagagtacttccgttgtttgtgatatgtgagttccatgtgagttcacagctgttaagattaaaattattgtcaaaatatataattttctggtttagtaagataaggtgaagaaagcttgctggtttgtttagcaactttgacatctaagatgatatttgagaaaaaagtttatcctttaaatgttattaaactagacttataaaatttgagaaccttttacaatagtatatttaaattatttttataaactgtgatattttgtggtagttcattgaaaagagtacttcactttggagctaaatagactaggattttaattctggctctgttcttactgtgtgacactggacaggtcacttaatctttctgagccttagttccctcacttgagaaatgaagatatctaaatacatattacaggttagttgtaagaatagaagtatcaatatagcaactagtactatgtctgacatatagttacttaataattagaaactttttattagctgtgggtctttttgtttttcgtctgataattacagatacaaagtaagtaccggattaaaatttttttctatcttatgattattttcattggagatacaatagtctttaaaattttagctcaactgaccagttttgtacgtgtaaggtgattcttctgtttttttgtatgtgtgcatgctgaagattttttattttgagaactcaggttcctcttttgcttttaaaaatcacacacacacacacacacacacacacacacacacttcaaataattaaattgctttttctctttttaaacattttacttggttatacctgtatagtttagtccagtaaaccaggagagcacataaagatgaggatttaattttagtattaatgatctcaaagctggttaatgtctgacaatgagcagatacatgatgcaggtatacttcatgaatttgtctcatttcttgttagaagctgctagactcagtgagctttaatttgctgagactgacaaaatgcagattttcactgaacctgactagctggttttcaacataaacttttgacacataacaatatgcttatattgacactatgtatacctgtgcattgcctagaagtaggaacatggaaaaaagtgatccaggcacccaagtttaagtttggaattgatagagtgtcagggctgatttaaaaagagagtttaggtcttgatttataaatttcctaggttcagagttcttttgagcatggattacctgtatcttacagataaaagttgtttaaaatttattctgtcttgaagacacactgcagtaagtttacttttatcaatatttaaaagaaaattaccataagtatgctagggactgttaattctgatgcatttaaacttttagttttgcttagaaaacttacttatacagattttttttaaagaaattcaagcttttcatatgtattgtattatcattcctcgtgttttagctgcaacaaatatgaagtggattgaagctaaaatgaaagtaagtgttagaaagcaatccatttaaaaatattttcaaactgcatttgtcttgttaaaagttctagaactgaattaattttattcttactggagggcacttagtagatagataaatgccattattgggagtagaggtgtttttaaagtgtgtttaataagtggattgtactgaatccctaagtcttttttaagaaaaagtataactaagcttgtcccctcccccacattcttcctcattttacaataatactttattttccttcttttgctctagtgtgcartacttaaagagtcagtattctcctaaaatggtaaattaggaagtaatctatttctattttccttggtttaccatttattgacttggctaagtgaaactaaaatacttcctagttgtttagcaagatgtagtggccagtggtgtagaaagttggcattatgagaaattgcagctagaatattcagaaaatctgaaattttccacactactatgttttaacctcacaaatatttgtgtttataggagctgggagtgagcacaaatgcaaattataagattactttcatgttggatagtgctgctatgataacagtacatactccaaggagaggattaatagacgtaagaagtcattttatttctatttaatgacaccatggttattttccagtgtactttttatgtttatacctatggagtaaatagtgtagagattcatctgagtgaataataaagtggttgagttttgacataggaaaatgtatttaaggttaaaagatttttttttttttttttttttttttttgagatggagtctcattgtgccgcccaggctggagtgcagtggtgcaatctcgctcacgcaagctccgcctcccaggttcacgccattctcctgcctcagcctcctgagtagctgggactacaggcacccgccaccacgcccggctaattttttcgtattttcagtagagacggagtttcactgttgttagccaggatggtctcgatctcctgacctcgtgatccgcctgcctcggcctcccaaagtgctgggattatgggcgtgagccactgtgcccagccaaggttaaaagatttgaattttaatgataaaattarggatcttgaagtaggactgtcaagaaaggaacttgtgattgtgggtaattgacctgtgttgatgacagcacaatgttactgggcagagtaggtgagaaaaatactgaatattatcaaggaagatactagaaacaagcgaaaacactcaccctgccctgtttgaaactggtaataaaagcagatgcatcatgatgcatgtactttgggatgatgctgaagaatagcaacaagaacaatcagagaaaagggtttggctaaccagttattttactcatcaagtaactactcatactattaagtatctactgtctggaaggccctgtgataggcactgttgggaataaagagatgagtgagacacagtccatatcatttgaaagcacccaaactgttagctgggctggataatgcatgcctgtaatcccagctactcaggaggctgaggcaggagaattgctcaaacccagggggcggtggttgcagtgagctaagattgagccactgcactccagcctgggtgacagagcaagattctgtctcaacaaaataaagtaaaataaaagcacccaaactaataggaattgaggagaacttaggatacgaggaaaccttaggggagacagtattaaaattatcaaaaccataaatagaatgatttaagggcatggggacttgttctataaaggaaatactgcatgtatcgagaaaaagataacttactatatactaaagtaaaataatacatttacaaaatcttaacattaaaaattacttagggaaatgttaaacatgttttataacagtgaaaaattaaaggaataaaaataatcctcaatatccagcaatagggcattggatatataaattactgctacccatataagggactgtagctcgtcatttgatgtagtaggatatgtaatgatttagaaattttcatgacacatttaagtgaaagaagtattttagagaacactgtygtaagccgttagaaaatagttcttaacctttgtttggttcaggattacccttaatttaacaaagaacctgtcaactctctgaggctgctcttgtttataaaaatgcctggagtcaatgtatcagaatattgagttgttgcccttggtactgactagattattgatttaaaattttcctttatgcttttcagtattttcatgttttttttctgtagttagcaatattacttttctaattgagagcaaagtagtttgtgttttggggaacataggtgcttgacctaattaacaaatgacagcactttttaagaggatgtaggatttttattctggatgtcataaaaaatgacctctgttgtcatatttcttgaggcttttgttagctaaaaatccacaaaatatggcttattgtattaattcttatatatttgtcttcatttcgtggggggagtagggggcggtttctatttcggtagtaaacaagatcagtagcaaaaaaaaatcaggaaagtaaaattttagtaaattaaaatatttcattaacattttttgtaataggcaagacaataggaaggaaaaagctttctccaaattaaattataggaggaaaaaaatttttaagttacaacttttatcactatttatttcttaccacttaatctcatatatttattattacattctgttctcataataccgtaagacttctgtcttcagcaaaagtaattttctagaaatttaaaaaattttctgaatgtgtaatacatttgcatgactaaaaaaatagtaaagtacataatgaaaagtcatctttcacctggtacctagccacaatcagtgttatttcctgtgtggtcttacagagactttacacaaataccaacaggtaagactatataagaaattatttatttgaagcttcagtttaagaattcagaaataagagtaagaatttgtaaaatatggtgcttccgaagttaagcaatcaaattccctagaaattatgcacctgtgccactgagttaaagacaaaacgagtttttcctctataaaatattcaaattattaattgaaaaagccaaatacagtttttttttgactagggtgttctagttttgaaagcagactccatgtgactcccaagctctgagaaggaatgtgttaaccaaggaagtcatgtgactgcatagcagacatctaaacaattactttggatttttaaaaaattaaataatttatttattttacccaaaatcttcacgttaaaattatggaaagttttataatgggtttagttcagttggacatgaacaaacctttcagaagttttaatattgcaaaatgcattgtgctttaaagtgggttgcatttaatgattagctcacacctgtcttacagggggaaaggaacactttggcattgttctgcagggcagtttgcagtattcctgcttttaagacaggatgaaatattgataaaatttgagttaaatgtaaacttttattctaaggtaaagcctcttggtgttatatggggaaagttttcggagttttacagcaagaaaaacaccattatgtttgatgacatagggagaaattttctaatgaacccacagaatggactaaaggtaagacrtacttttacttgttatgtgctcatgtaatctgggctgtgtggtagaacttttgtagtaagcactgttgaatttcatatatttttggaagtactgtattcttatgtcataggcgagaaaagtttaagaataattcatatagaaattgaactttgtcttttttgcattgatgtctccatagttagctagttcatccaagtatttgtttgtttatttatttatttatttttgagacgggatctcactctgtcgcccaggctagagtgtggtggtgcgatctcggctcgctgcaatctccacctcctgggttcaagtgattctcctgcctcagcctcctgagtagctaggattacaggcacgcaccaccacacccagctaatttttgtatttttagtagagacagggtttcaccatgttgaccaggctgatctcaggctcctgtcctcgtgatctgcccacctcgacctcccacaagtgctgggattacaggcatgagccactgcgcccggcccaagtgttttatttttaattagctctgtgggagcaacatgggcttcccaacattgacttttagcatccaaagtgaaatcattagttatttttttaggtatacaaatcttggcattttaaacattctggttagcttgagaaatggcagtaagggtactttgttttttctttttaaactgaaactaaagacgtttttgaaaattcctagacggcaagtacagatcttagaattagacattgccagagctagaaggaaccacagtcatctcttgcctaccttcttaactttggaaacagtctgaggttgaagaagttcctgacttgcccaagattgtatatgtaactggctaatgacagaatttgggttagactctagtgacttggttcctaggtcagtgacaatcttagcatgcaactgcatgcagtcttatgtgacatttcatcctggtaacagtataaaattggtaagagtgaaatttgaaatttaaaagtttctggtacccatagttgattacatgttggcgcaatatgaaaatggaaaagatagctctatactatggcactattgcacatggagtctccattcgaagtggcagtcctgacactgagatgttttcattctcagtcctaaacttttctactagctgggtccttggtagttttaaaagacaagagagaaaaacttaaaagtacattttttaaacctttcttacagactgttgatttgagtttttgtttacaatgaggatattttagggaaagaatactaatctaggtagtgaattgccataagtataaaaactgttgacttggaagaaaagtggttatgttgtcyttaatggtttctgtttaaggcttggagagaagtgcttttcttaatatgtactgcaccaggtaaaggtacaaaaatgtattcttgagtcttgagaagaaatgtggttgatgtaaacctaattgtttgtgaaacgaatggttattacctgttcttgcaaggaggtgatcccatgatggtcaaggaataattttggaggagacgtttaactttaaaaaaaaaaatacaatcattagtttcatgtttgtttaaaagaaactttgttttcstaaccaacatttgagctccattcatctcttgatgcagggagagatgttattgtaaatgtctagttctttatgttactttacagtagggtttttaaaagactgtactcagtagacccactgaaggaattcctaaaaatacgtatgtccccatcccctaaattctaattccagaggtagatttagacactccacaggctgtccttgtgtgtcttttattgaaaacctcttttttataaaattaatctacccaagataacacttcatgaaaacctcttttaaggttaaagattaaaggttaagattaagattaaagatctgcccacgtyggcatagaaacaggtggggttttctgacagggtcttgctctgtcacccaggctggagtgcagtggcatgatcagagctcattgcagcctcgacttcccttgctccagtgatcctcacatgtcagcctcccaagtaactgggactacaggcgcacgttaccacacctggctaatttttgtatttttggtagagacaaggtttcgccatgttgcctaggctggtctcgaggtcctgcactcaagcgatccacctatctcggcctctcaaagtgcaggattacaggcatgagccactgcgcccagcccagaaakagttctaaaatggagaaatatcctcaaatgctgtgttttgttatcatgctttcataatgcacttggtagaaatctcaaagatttcatgtagatcttaaaaataagactgctcatttttaaaatagttaacttctattaaacataagcttgtcagtcataaggtttgaagtacatggaaggtactgtgaatatgaatttagaattacactaaaagaatgtgaatcttggtcatggataaagcagtttatcggctgaaaactccatttttattgtctgtacaaggaaattatgatataggagaattcagcttatctagacagtcttaagtttctaaaaatgcttccttgacctgagacaagatgatggtttcctgtccttttagtgatcacttagatcagtttttaaaaatgtacagtaaacagtggttatactggagcaagtgaagtcaattaggtgcatagattttcacccttaatttgtttatttaaaattttagaaccagaatcattagaatattttagttttgttgtttaatagtgcttaagagcaaatgtttggaaagtaaaaataacttagcagagccttgggttgaaaatcttatttactacccaccaaccctgtaatttcctgctgtttaaatttggacactttggtacattatatattaattgcttaaaagttaatttgttacctttcagtccttaggaagtgaatgaaggaatactttaaaacattaccatatcacccaggattatgcagaaactcatttcactacatcctcatatcatgactctgtttactcccatccccagggcctaagcaaggccctgtaaagcgtcgtcttcagcccccacattcactgctgctcggaaacagcactgctgcactacctttttggaagtgggatctcccacaaatgctgatttctgaggagactccctttgacagctcttgactggtgcccttcaagcagtatgggagccagctaacagtgtggaggtcactggcaccaagctgttctgatgagagtagaacacctgggaaaattttcttctgtccrtttcagatgggtggtgtttttccaatgacagaagaaaagtatgtaaaaaatacttaaacccttccctacacttaataggtatggtagtagactcctttgggctcactcattgttcttgcttctcagtaagtgacaatgattaaatatcattcatttttcagtgttaactgtgtaaaattaataactaatgaccaaaaaaaaaaaaaactaatgaccaatttgcattttctccaaatcaaaagaatatactaatactttgctaagtatgatgaaatcagtccttacatgtgtgctttaggaatatgtgtgctttaggaatatgtatgatttttttttaacgataacagaaaaattcaaatgtaaacagaactatataaaattgcttaaacccccatgtagatatcattcagtttaaattagcttattaattcatggatggttattgtttgctctatacgctacttccctctccttaatattttgaagtaaatcttagtcatatcatattatctaaaattaatttaaaattattgaaagactatcttgagttgtataaagatatttgagcaggtgtcttttacaaaacagcagaattctttaytgaagctataaaataaggaaaagtgcataaatttatagttcaacaaactgtaaagataattcttgtaaaaaattttattccactaaaattactcatgattttcctttccaaagataaacactattaccatcttgatttatagtcctctagtctttttaagcatagatttatgcacaaatctagatgaagattgcatataaacatatgcattcatagcaccgccactcaagtcaagatatggtattccttactaattgcagtcccctacctcggtctmttattctgacatgtgtggtttgaaataatgctttttaaactctttttcatcataaaatagatcagccttaaacatttggaaaatatggcagttctttttatggaaaactcttgcataattaaaaatgattttaacrgagaatttaatgataaagaaaaatgcttatgataaaatgtaggaggaaacaggttatataaatgtataatgatatctcagctatataaaaatttaatagaaaaataaaataaaaatcatcgttaaaatttatctcactgtactgttagatcaagctggtattggggttaaatttttatgaataaaataatgtgaatgaaattaattagaagcaactagaatgataggaggcgggaaaggctaagtagttttgcaaagtagagtagctgtgtatggattcaagtgcaataagaaagctggtgttgtcaggttcagattgaaaagataatgttaggtaaaataggtagaagagtttgtaatttgtaaacattatacatgactttctatttaggctaatataaaagtaatttttagtatttatgttcttggtgatattttaacctcattaactctaattgaaatgatagtatagatttgttagttttccttatcacattgtgatgtgttgagtaatgtttgtttcctaatagataaggccttttatgaaagcgcacctaaatcgtgataaagacaaagaacttttaaaattaactcagtacctcaaggagatagcaaaattagatgactttttggatctaaatcacaaatattgggaaaggtaagttttaattgcttatttattttctctttacatcaatgaagaaaaaattatcatttttcatcagtgacyccagtatatatatagctgtcttaatttttatttaaaataggtgacttctraaaacattttctaatccagtgacctacccccaaaagtattttcccctttcatcttaacctctaacttgttcataaacatacctcttgtaaactctttaatacttctagaagagagaacttgagagactagcatatgttggtgatgctgcctgtaaattattttgtgatgttaggtaagctactcctttatgaatcacatggaatataatccctcttctcatactgtaacttaatgtcaggataagataaaacacatgtaaaaatttcataaatagtattaaaaattaccagtaacttgwgtgtagcagagaaattagaaaagtttatcctactaaaaaaacaattactcataattttcctttttaaagataaccactgttaccatcttggtatatagtctttcagtcttttatctaaacccaaatgtttgcacaaatctatatagacgttgcctataaacatcaaggttttgagacagagaaaagtccccagagaagtggaaggtattactatgtattacagtatttgrgggggaattagatctttgaggatctggttccagtaatacagcaccaaaagaaactatttgtgtaataataacactttggcttttcagattccacttttgacttttcagatcagtttgacacaagtcttctaagagtctataatcctaataggaagataaagcagacatttttacccccatctttaaattgcaaatgatgtaactgagtcatggagatagtraatacttagtgcagtgccacaaagtgagcaaattgtaccagcaaaacatgtccaagtttgctgattttaggaactctttccccatccccacaccaccaattatagtagtttgtaaatgttagaaatagagatcaagtttttaatttagtggtagatttctattaaacaatatgaaaaacacttgtttgcttagtaatgtcttatatcttttacactcttgatcaaagacctttagcatcttttgcccactgtcttgatgtaacaaaaataagatctttatggagtttgatctgtatttggaagttacaatactagttaatatagtgactttcacattggaagtaaggcagtatggagtggtagtcaatgagtatgacctctggagccttgttttgaatctaggctcttccactttctagctgtgtgaatttgggcaaattgcttaacctctttgtgcctgtaaaataggaataattctaatagtaactcctcagagctgttgtgaagactaaatgaattaatacatgtacttagaactgtgcgtgcacataatcagtagatgtaagtgactattaagaatactcatcttgaaatgttttgtcattagaacaaactcctttgggagcaaagttaggttatcttcatgaatttagcatgatacagctttgacatctttattttatttcttgcagatatctctcaaagaagcaaggacagtagttacaagttatactggcagttattgaagatacttaagatccaagaacttcttgcttttatgctagaaatcattatgatagtgctggacactgaagcaaataccatactgcttatacttggtcttccagttttttgtaaatttaattttatattttttgaagatgatagcaatatgctaaaaaatgcttgtcccctatatgaatattctgttacgcttgaaaaatattttctccagcgttggttactgaccaccccaccctcccaccacacacacacacacacacacacacacacacacacacacacacacacaaagtggagaaaaatgtatactcaacaatgtcattttgtgactttggaaacaagttatgttttgtgtttttgtctcattgtgttattgtctgactaaatctaaaaccaaacccatgttgaaactagtacttttccctttaaaaacaaaccaaaaaaaaaaacaaaaaaaaactttttaattaaagaacctagtttgctatgcttaaaattaccaagaattttttatttctttgtcatagacacaatttctcttctgtatgccactagttacatttctaaattctgagcggtctcagttaggcctgtatgtgtgtacatgtccaagtaaagctggaaaatgtcagtcttgacacagctgtgtcttagtatgagaaacagaagactgaagaataaaaactaaggaacaagaatgagtctctttttggtggctaagtagaatcttcctaaaaccattgtcataaaagcagttaaaggcaataaatttttaaaagggacatatcactgattcattcctaaaaagcatgaacaaaaagtttttgttctgttccagctatatcttgtctaagtgctaacactgtttcagtgaaaatatctagccataagattaaaaaaatatattatttgcaatgcttaagcctgcagatacgtaatgtgaccactgttttgtgttgacaatattgctttatacagttcttgtatttgaaaggaattgatccttttaaagaaacatggtgtatattgttcttacaggactaatttcagtggtgtaaataataaatatcttttcttaaaacattcgttatctgttctatattaccacatatattttacctctttgttgaatgacaaaatgaacattatattcaggcaaggatctcttgcaaaaacttaaatgtgtatggtgatgttaaaggtgtgtatatcactatttatacattcaggagtagttttagcagctaatcagatacataaaattacttaattctaataagtaccttttttcagaaatatatactattttctttgtgacaggttttgaggatatacagtgcagaagagtttgaggactctaaagtgattcaattaaaatatatttcttaattatgaagtaaaatttaaatatttaaggatagaacagaaattttagagtattcatttttcattggtacatttttcccactgtaaaagacaacttattccaaagtacgcacggaaagggcttaatcttctcaagaaaatggaacacttaaactattaacataggtcaagaacgggcagacattttcgaaatcagtataaactaaaatacaaaagttagcaaatcacagggagcaaagtagaattttacaaaaacatattctgccattaggtggtgcccaaaccaaagcttcttagctgctgtgcttaattaagccactccggagaacattgtcattgagcttgttgagataacgtgctatatgtgattaataccattatagagtgtgggagttttcatttgtcttctgcatctcatggcttattgaacagctccatctctatatatctatgtgtgtggcacacacaattgaatcaatagatcacttaatttggatgcatattttggtgaaaccacaaattatttttatcagatacatgtgttaagcattaaaacagtattatacgaagtatatttagcctaaaaactacagaacatcagtaaatctttgattcagagggaagtttctaatttcccctcaggtctttgttaccgaaatcagttattggactaatgatacctatagcagctcttcagtgtaaaaggtaaggaatggaaaaacaggttgttacagtaagcaactgaaacttattttttattcatggaaagtaaaatagttccttgagaggaagaggaactacaggatagggactgggaaaaaaggatatgcaaaaaaacgcagattagttgcattttaggttattgcttggtttttaggtattaataacaattgggtggtcagaatggtaataaaacatgaataataaacggttgagttttctcatcccaagtactcaacagagctctctcaagggacgaactgttatggtctccaatgaagtattttacatcaaaattcaatcttcttatgaactagcccaagaaatgtctgtgaagattaaatgcttagatatttatgtaaagatttagttttgctacgtgagtcttggtgagacatctgaatattttaaatttttaattgacagttgtttatggggtacaatatagtgttttgatacatatatccaatgtggaatgattgaatcaggctaattagcatattcacctcaaatatttatcatttcctggtagtgaaaacattttaaatcctcttttttagctgttttgaagtatacgttattattaactgtagtcactatgctgtgcaatagatcaccagaatgtattcctcttattaaactgaaactttgtactctttgaccaacatctcatctttccccatccaccaccaccgccctccccaacctctggtaaccgcttttactctctgcttctgtgagtttgactttttagatttctacgtataagtgagatagtattgtgtctctctgtacctggcttatttcatttagcataatgtcctttagcttcattcatgtcacaaatgacagaatttcctgagttttttaaggctgaatagtattcatatatatatacaccatattttaaaaatccattcatcccttgataagtactttgtttttttctatatcttggctattgtaaataatgctgcagtgatcctgggattgcaggcatctcttcagagtgcttagtgtttaaatcttaagagaatctttttgtaatcagtttcatagatttagcaaagacttctgagaaattagtgccttataagaactgaaatcaatacgaagcatcctgtagggctaaaaatggtgtcagttatctagtaatgtcaatgagcttccatgtaaagtgtttaaaatcttgcacacctcccacattaataatttcgtaaaaacactttggaagtaagcaagcacttaaatgcaaacataaggatatttcctgatatgaactgttactcattaaaatgctggtttgcttccaaaaagctttaaaagctgaacttacagcttttaagaacatttgtaaacagtagaaacaaaaccttaaaaatatcaaaaacaaagactgctaagctttaatgatgtttccataaaccaatatggctatgatgaacacacattagtgtatgtgtataatttgttacactaaaggccaaactgatgacttttcaggaatctagaggtaaatcaattatttaattgaatacaaatccctcttacttttattcccagttcttaattctctggagcactgattgctattacttcttgttggataatctgtgaggagaactgctgtagcttcctaaataaggcttttgaaagagccagtggtttgtcagaaaaacatgtgactaaaatccctctttattggcaacaggaccttgggcaagtcacttcaactcatttaacttttgcttccttctacttaaaaaaattctgcacctgtctgcctttcccataggctgtggcaaagtcaaatgagacagttcccatggaaggacttggaagcagcaaaggcttatatgaatgtcagatgttaaaagtagcacagagcatgttgctatcatcgagccctatcattcctgaaatatagttaccaaaagtgaaatcttaaaaggaagacttttcttgataattttacaaatactatcttggttttcctaagatttctaaataatcaaggaaaggagaataaggaaacctctgaagacctagatcttttggtaagtatccagctgcttttacgtctgcaaattccatttagtattggtttggactggaagtccagctgtccctctccctccacccccaaccttaaagtgactatgactgaaccttaacagcattataataccttttttatagtgaaatatttacatgattttaatcttctaactttggaaatcaattgttcccagatagaagcttgcttattttgccatgccatgtaaaaatgaaaagtcattcaaaagcaatgagttttaaaactttttttcttgtaaagatatgctaaggtgtaaacattcatgggttttgtttgtttgtttgttttttctgacaagtttggcagaataaaccatgcaggaagcaggcagtcaacatttaatgtatatttattagttcctactatatctgaggcactgttcttcaagggttaaacacaagatttttctaccctcacagagcttatatttgagtgagggaaacaatgaagaaacaagataatttcaaatagaggtcctataaaaatataataatatgagagaaaatgatggtgattcacattacatgacctaaggtgggaagatggaatttgagctgagatctgaatgaaagccaccatttggaatgtgcagagagaggatgtggaaatcttaaggggcaaataaaaggaagaaatgaaaaaaagtacaaaagtatggagaagaatattgtggaaggcaggaccaaggtaggcagattcaggtaagagtgggaggtaagctgtggcctggtgtgaggtgaggttggagaggcaggcagagcccgtgggaaaggtaggatgttgtacatcaccataagcagtctggcgaattctacgtgaaatgtcaggaaccagtgaagggtgttaagcatagaatgacaatctaattttttttaacagccttattgagatagaatttacatatcacaaatttacccatttgaagtgtgcagttcaatggtttttagtgtatttagagagctgtacaaccatcactgtaagctaattttagaacctgatttatttttaaaaggatcattccggttcttgtgtgagaatgggttatcgaagggcaaaagtagaaaggacaagactcattaggagatgagagatgttcaatgtgaccaggagaaggtatgcatttcttcactcccttgtagcatcatcttccagctacctattgagcccctgtgctataccaggccacgtgtgaggtgccacatcttccatggtaaagaagacagatatgacccctgccctatgggagcatgcagctgcaagactgtgtgcaccacaaacttagcccttccagctttaccactgggtaagtgatgtgatttgaagaatagagaactcaatatatcaaagtcagcatatgacaaatatttctcacccacctatgcccacagtgaaaaagccccctgtgattccacccaacccttctgcccagaggctagacccaggattaagtgtccagcttgggcatgcatggcctatgccagcaggggcacagcagaggtctgcacacataggaagatagatcaaaggcccccttccatttctcctctccagagtgttccagtaagaacatccccttctagctatttcacacatggacaaccaagaaatagtcatttacagagcattttgcatttgtacaatttcactcgttatttctcccccagtacctaatgggggctgcagcgtgtactctgttcgtggttaaattctgctgccagaagtttcctccagctcctgatgccccgaacccctccctccagcattcctgtggctcatcttgcaaactgattcaaaggtgctttgttgcaatctgatctttcaggacacatactgctataaagcttttgaaattttagtcagagcaaaaaacaaaagcaaaaatataagcctaaacatcccctgaggggaaaataatgaaggagctcttaagcactattgcagataatgcttaattttaagaagacatgttttttttaaaagaatgtggactacttcctggtttagacttggaagggtgtacgtgtccagaaatttatctatttcttctagattttctagtttatttacatagaggtgtttctagtattctctgatggtagtctgtatatctgttttggtaccagtaccatgctgttttggttactgtagccttgtagtatagtttgaagtcaggtagcgtgatgcatccagttttgttctttttgcttaggattgtcttggctatgcaggctcttttttgatttcatatgaaatttaaagtagttttttctaattctgtgaagaaagtcaatcgtagcttgatgggggtagcattgaatctataaattactttgggcagtatggccattttcatgagactgattcttcctatccatgagcatggaatgtttttccatttgtttgtgtcctctcttatttccttgagcagtggtttgtagttctccttgaagaggtccttcacatcccttgtaagttgtattcctaggtattttattctctttgtagcaattgtgaatgggagttcactcatgatttggctctctgtttgactattattggtgtataggaatgcttgtgatttttgcacattgattttgtatcctgagactttgctgaagttgcttatcagcttaaggagattttggactgagaagatggggttttctaaatagacagtcatattatctgaaaacagaaacaatttgacttcctctcttcctatttgaataccctctatttctttctcttgcctgattkcccgggccagaacttccaatactatgttgaataggagtggtgagagagggcatccttgtcttgtgccagatttcaaatggaatgcctccagttttttcccattcagtatgatatg

SEQ ID NO: 96213 - DNA, 20595 bp, Homo sapiens
acttggagccacaggcagtttgggaatggtccctgggaattcccctaggtggcactgggtgccagctgagacccgggtctctgccctcaggacccagctgtgatccagcaccgacccagccggcagtatgccacgcttgacgtctacaacccttttgagacccgggaggtgagctactggagagcataggagttcaaggaagggaagggtttgccagtgagacaagttagcttgggtacaggggacttttctgcatgcacaggaaggaagaggcactgtgatcttagttccctgagagaggctagtcagccatgggatgcctcatccttctagggccaccagggccaccaacccaaatggtttgagctctaaaagtcagtcctgggaagatctggaggctggcaaggccttaaccaatgttctgtatgggaaggctttcttgaagaaaataaaggttggggctggttggagtttaggttaggtgtgcagtttgaaagcaaggaatgaggaggactacacctgtttgtcccactggattagaagatggtgagttgtaagaatttaaggggttttcatggtacttaaaacttaaaaaaaaaagccaagcatggtgtgcatgcctgtaatcccacttgggaggctgaggtgggaggattgcttgagcccaggaatttgatggagaccatcctgggcaacagcgagacccccatctcttgaaacgttttaaaaattggctaggtgtagtggcacatgcctgtagtccttgctacttgggaggctgggatggaaagactgcttgggcccaggagtttgaggcttcgatgagtgatgattgcaccactgcactccagcctgggtggcagagagacaaccccacactccatccccagaagaaaagaaaaaaaaaaaacacagttaagtggggagatatggtaaatgagtgatttgagtcctcactaaggaattggatatgagggatgataaggctgctacaggtcatcatagagttctctgacagaaattcaacagaagaactagcttcctaacaaatgggggaaaggctgcttccttacatcatgagttctgggtctaaaggtattcaagcagactctagattcctgtgttatgagggactagatgatcactaaggtcttttcctcaacagccaccaccagcctatgagcctccagcccctgccccattgcctccaccctcagctccctccttgcagccctcgagaaagctcagccccacagaacctaagaactatggctcatacagcactcaggtacaggaggtgtgcaggtgagggctggggagaagggccagtcctggggcccagggctcacatctccgtctgctcacactgggcaggcctcagctgcagcagccacagctgagctgctgaagaaacaggaggagctcaaccggaaggcagaggagttggaccgaagggagcgagagctgcagcatgctgccctgggaggcacagctagtaagtaatagagtggggaagagcatctgagagtttgggaggagcaaaaacaggtcttaagggcctgggctcggctgggtgcggtggctcacacctataatcccagcactttgggaggctgaggtgggcggatcacgaggtcaagagatcgagaccatcctagccaacatggtgaaaccctgtatctactaaaaatacacacacaaaaaaattagctgggcatggtggcgcgcacctgtagtcccagctactcgggaggctgaggcaggagaatcgcttgaacccgggaggtggaggttgcagtgagccgagatagcgccactgcactccagcctggtgacagagtgagactccatctcaaaaaaaaaaaaaaacacaaacctgggctctggagtcagactgctgagtttgaattttagagatactgcttactaaccatgagcttttagggaagttacttaatcttgaatgcctcagtttccctatttataaaatgaaaaccacgtttgcatccgtttgacagggttgttgtgaaggttaaacaaaatatatgtgaagtacttggtacagtgcttagatgttttaaataataataaacagtattaatttttccactctcacttgtctccttggaccccaaattggagataaaagagaggatccagggctgggtatggtgcctcacgcctgtaattccaacactttgggaggccgaggcaggcaggttgcttgagctcaggagttagagaccaacctggacaacatagtgagatcctgcctccaaaacattaatgaaaaaaattagcagggcatgatggtacctgtctgtagtcctagctcctcaagaagctgaggtggacggccaggcgccggggctcatgcctgtaatcccagcactctgggaggccaaggcgggtggatcacctgaggtcaggagttcaggaccagccaacatggtgaaaccctgtctctactaaaaatacaaaaattagctgggcgtggtggcatgtgcccataatcccagctactcaggagactgaggcaggagaattacttgaacccgggaggcggagattgcactgagccaagatcacaccactgcactccaacctgggcaacaagagcgaaactctatctcaggagaaaaaaaaaaaaaaaaaaaagctgaggtgggagggttgcttgagcccaggaggttgaggctacagtgaaccatgatcataccactaccttccagcctgaacaacagagaccctatctcaaaaaaaaaaaaaaaaaaaaaagagaggatccagggatggagagaagggggagtgattcctttgttggtctctgttttacttctggggtccacctgtttttttgtgccttacagctcgacagaacaattggccccctctaccttctttttgtccagttcagccctgctttttccaggacatctccatggagatcccccaagaatttcagaagactgtatccaccatgtactacctctggatgtgtgagtagtgagaagccttttggaggaagttacaggtagatctcttaactgccctggggtccgctcaccaagaaccaaacacttcacctctatttagaactcaccagcctgctagcaaatgttcttgccctctccccactttttattgtccatatgcaggaatatattttgaattctttagatgtctttgggctgggtgcagtggtatacgcctgtaatcccagcactttgggaagctgaggtgggtggataacctgaggtcagaagtttgagactagcctgatcaacatggagaaaccccatctctactaaaaatacaaaattacctgggcgtggtggcacatgcctgtaatcctagctactcaggaggctgaagcaggagaatcacttgaacccgggaagtggaggttgcaatgagccaagatcatgccattgcactccagcctgggcaacaagagcaaaactccatctcaaaaaaaaaaaaggccgggcacggtggctcacacctgtaatcccagcactttgggaggcccaggtgggcagaacacgaggttaggagatcaagaccatcctggctaacacggtgaaaccccgtctctactacaaatacaaaaaattagccgggcgtggtggcgggtgcctgtagtcccagctacttaggaggctgaggtaggagaatgggcgtgaacccaggaggcagagcttgcagtgagccgagatcctgccactgcactccagcctgggcgacagagcgagattccatctcaaaaaaaaaaaaagaaaaaaaaaaattagctgggcgtggtggcgggcgcctgtagtcccagctactctggaggctgaggcaggagaatggcgtgaaccggggaggcggagcttgcagtaagctgagattgcgccactgcactccagcctgcgcgacagagccagactccgtctcaaaaaaaaaatgtctttgcaaggggatcacacattattgacatttgctttctccatctcccctgttgaggattccatgaaggcagcagctgccttcatttccttactctgccatgtttggtgaatattataggatgagcatagatgggaaggagccttcattgcagtccagaagggctcctcatcctgtccctctgccccttaggcagcacgctggctcttctcctgaacttcctcgcctgcctggccagcttctgtgtggaaaccaacaatggcgcaggctttgggctttctatcctctgggtcctccttttcactccctgctcctttgtctgctggtaccgccccatgtataaggctttccggtaagtgtgttagtggtgggagagtgatggagacctgggatgggccccacgtctgcccatccttcagctctaattcttctcccaccctccccatttttttcctctttgtaggagtgacagttcattcaatttcttcgttttcttcttcattttcttcgtccaggatgtgctctttgtcctccaggccattggtatcccaggttggggattcaggtttgtgaggctgttatccaccctcacctttccctctagatccagccagcactgggtgctgggataggagttgttcagaaaaaggaaatgtggttttaatccttgggaggtactagtttaatgagatacaagacatacttccaggatagagcgcagacagcactcttgacacatatagattgaagggaagaatgctgcatttggccaatctaaggtggcttcctggaggaggcatagaaccatggttgaaaggaggaagaagaatccccagatgagtgcctggaagagcttggagagctcagggctaatggttcagaaactggaattaaactatgaagagattagatacagtttgggattgtggtgcttggaatgctgctcgattgacagggagccactgctgatgggaagggtaggaacaggggatgctggtgacataaccagtggagaagctgaggagcccctcttcactggtacatccttccctttacagtggctggatctctgctctggtggtgccgaagggcaacacagcagtatccgtgctcatgctgctggtcgccctgctcttcactggcattgctgtgctaggaattgtcatgctgaaacgggtgagggctgtgtcgaaggtggggccgggatggtgagatcatgggtccccaggggcgtgggtggaacattcaggagcaactggcacaggtcaggctgctgggttgttctcagctaatggacctctggggtgtgtgtttctgtgtgtgagtgtgtgtgctgggcagcaggctgctgagtggtagtgatgctgttaggctggggtggggaaccagtggctggaatgggcggtaatgtctttgtcctctacttgcagatccactccttataccgccgcacaggtgccagctttcagaaggcccagcaagaatttgctgctggtgtcttctccaaccctgcggtgcgaaccgcagctgccaatgcagccgctggggctgctgaaaatgccttccgggccccgtgacccctgactgggatgccctggccctgctacttgagggagctgacttagctcccgtccctaaggtctctgggacttggagagacatcactaactgatggctcctccgtagtgctcccaatcctatggccatgactgctgaacctgacaggcgtgtggggagttcactgtgacctagtccccccatcaggccacactgctgccacctctcacacgccccaacccagcttccctctgctgtgccacggctgttgcttcggttatttaaataaaaagaaagtggaactggaactgacatccccgtttcctgaatcttcattgggaattaggccttatgaaagagaaaggagagtgtggagtgaggtgggaaggtcggacccggctttagtgtaaactgggagatatgaggggcggggcggtggagcccgagtggctggcgcaggaaggaggtgggaagtccacggaaacgcgaaacccggagacgccagggagccctgctccccacccctctccattaatgacggggaagagccaccgcctctgccgggaacgccaaggaatacgcgggcctggagcctgaaaagctggatggggctcaagtggaggcccaaaggatcactagcagcctagccagggtccagagcgaggcagggactggaggagcgcttatccgactgcctcgccctgccgcgggatcccccaaccccgacagggtctcagtcccgaactacaactcccggggtgcaccgcgccggccctcgccgccatgcccctccttcccgcaccatccccattcccatcccccttctctagtccccgacctgcggcagccggagctcggggagcggagcgtggtggggaggggagcgggacaggcgacacaggagacagcggcgccgcggcctctccccaccaggcggccccggatcctactggacgccctgagggcacaccgaccgcgcctctagagtcaccccacgccgacccctcccctcttctctagacttatttccatccttcccgcttttaccctccccacccstccctgggctccaggccgccgccccctcctcactcctggrccggcccttctcggtgcccctcttccctagggagatgcgatgagccggtgcccccgcgtcctcatcgtcgccccgggcacggtgcccgtccagtgcccgtggtggggagggagcactccgcggtccctccgtgacgcccctcgcttggccccccccacagctggcgtccctcggccatgccccaggggacccagccagggggtgggctctagagcgagtggggtggagaggagaaaggacggggccttgggcgcctctgagatgctcccaagtgccagggagggccgagcgaggcgcaggcaaccgggcagcaggcatgatgccctcgcctagtgactccagccgctcgctgaccagccggcccagcaccaggggccttacccacctccgcctccaccgaccctggctgcaggccctgcttacgctggggctggtccaagtgctcctgggcatcctggtggtcaccttcagcatggtggcctcttccgtcaccaccaccgagagcatcaagaggtcctgcccgtcttgggctgggttctcggtgagttgggtgcacagttgttgggtgggggaggctcctcgggccccaccctccacaccagctgcaagtccacatgcttgcctctcctccctctcctggtcctctgcctccttacagggctgggtgcatcctgtggtgagggkctcactcaggagcctcccctgccaggctgagcctgtgcccactctgtccccagctggcgttctccggggtggttggcattgtgtcctggaagcggccattcactctagtggtaggtgccagggtccagtgcccactgggaggcaggtgcccagcacgcaaggggaagcccatttatgwcctcaagaagggaactggctccccagttggtkccagccgggtgggcacgaagtgtctgtgaaggagggggactctgtccgtggcagaggagtactcatgagggtcccagccctgagtctgcaccctgttttccccagatctccttcttctccttgctttcggtgctctgtgtcatgcttagcatggctggctctgttctctcctgtaagaatgctcaactggcccgagacttccaacagtgctctctggtgagatttgaggagggagagctggaaagaactggctgggggaggtgtgcaggacacctcagtttgtsctgactcaggctgcctcaccctccctgctccactcaggaaggaaaggtctgtgtgtgctgtccctctgttcccctcctccggccctgtccagagtcggggcaggaactgaaagttgcccctaactccacctgtgatgaagcccgaggggccctcaaggtgagcttgcaccctgcaaacatcctcctggttctcactcttgcctcccctgctggggwwctcacaggcccataatgtgtggaacttagccgtctcctgactcctctcctcctttcccttccccagaacctgctcttcagcgtctgtgggctcaccatttgtgccgctataatctgtacactctctgctattgtctgctgcatccaaatcttctccctggacctcgtgcatacggtgagaagggagcaggggccagggcacgcaggtatggtgggggcaggggtgtgtgtgctgagacttgcctgagggaacaatggctacagatctggcttttgagcaccaggggctatgggttatctattatcctcatctattggaggaatggatgtttagtggggaggatgagaaggggagatggcagggagtgagttaagtatgtgatgctggtctgggaccaggagagggtgctttagagaatgggactggatggtggggtagagtcaagaaggtcctatgctgggcacggtggctcattcctgtaatcccagcactttgagaggcccaggcaggcggatcacctgaggccaggagttcaagacccacctggccaacatggcgaaaccctgtctctattaaaaatacwaaaatcgggccgggcgcagtggctcgtgcctataatcccagcactttgggaggctgaggagggcagatcacctgagatcaggagatcgagactatcctggctaacatggtgaaaccccatctctactaaacatacaaaaaattagccaggcgtggtggcgggcgcctgtggtcccagctactcgggaggctgaggcaggagaatggcatgaacctgggaggcagagcttgcagtgagctgagatagtgccactgcactccagcctgggcgacagagcaagactccatctcaaaaaacaaacaaacgaaatacaaaaattagccaagtgtggtggcgggtgcctgtaatcccagctacttgggagtttgaggcaggaaaattgcttgaaccggggagacagaggctgcagtgagctgagatggtgccactgcattccagcctgggcgacaagagcaagactccgtctcaaaaaaaaaaaaaaaaaaaaaaaatatatatatatatatatatatatatatatatayacacacaaaawtacaaaaattaggctgggctccgtggctcatgcctgtaatcccagcactttgggaggccaaggcaggaggatcaccagatatcaggagtttgacaccagcctggccaacatggcgaaaccctatctctactaaaaatacaaaaattatccgggtgtggtggcgggtgcctgtaatcccagctactcggaagactgaggctggagaatcgcttgaacctgggaggcagaggttgcagtgagctgagatgtagccattgtactccagcctgggcgacaagagtgaaacttcgtctcaaaataataataataataataattagctgggcatggttgcacacccttataattccagctactcaggaggatgaggcatgggaattgcttgatcttgggaggtgggggttgcagtgagctgagatcgcgccactgcactccagcaacagagtcagactctgtctcaaaaaaaaaagaaggtcctagatggaggtgaggctaaagggtggacattcctgtgaagacacagaatgtgtggagcttctggatggaggtggggccataaagaggaatttgtgggtgggcagggccagagctagaggtacagggtgassgtggggttaaggagagctsattttgkgtgagggaggggccagaayaagagcttctctcaggggatagggccagaaaaaataatgtagatgagagaggagtttgggggcccaggaggagctgtattcccagaatccagacttgctgacctgctcgcttccccagcagctggcccctgagcggtcagtctcaggcccactgggacctctgggctgcacgtccccgcccccagcccctctcctacacaccatgctggacctggaggaatttgtcccgcctgtgcccccaccgccctactatcccccagagtatacctgcagctcagaaacagatgcacagaggtaaggcctggtggggtcttgctgggggagctaaggaaggggactggggctgggcctggattgctggagagagggatctttgtggagggggaattatttctcctacattgaccctcttcctcatctgccagcatcacgtacaatggctccatggacagcccagtgcccttgtaccctaccgattgccccccttcttatgaggcagtcatgggactacgaggagacagccaggtgagagcacagcacggcttggggcgggctggggagccgggttgtagcctggaaagctgaacaggctgtagcctctggataaagatagtaacagtggtcaaggtctttacagcaccagcatgcccactgttgcctttgatcttccctagagcctggtgaggtgagtgggttggaagctatcatttctgccatacagacgtggaagctgaggctgcacaattaagtgacttgtacaaagggacaaggctggtctggaatctaagtctccagagctctgtctagcacatgggggtgttcagtgtgtagggctgaacccttgaccctgtgtcttctgcaggccactctctttgaccctcagcttcacgatggctcgtgcatctgtgaacgagtggcctccattgtagacggtgagcagggcgtaatgaggggtggacaagggcggggctgccagggatagctggggtgggtagagacaatagaaggggaaaacaaggcggagttggtggtttggggacataggagggctgyggcaacttggaaccctggacttatttttctcctctgagataaagctggaggcacagtggcccctagaggctgggcttgggagaagaggaactgcctgggcagggctaggccaggccaggctggtgctacacagcgccccctgccgcccacagtgtccatggacagcgggtctctggtgctgtcagccattggtgacctccctgggggctctagcccgtcggaggactcgtgcctgctggagctgcagggctccgtgcgctccgtggactacgttctctttcgctccatccagcgcagccgtgccggctactgcctcagcctggactgtggcctgcggggccccttcgaggaaagccccctgccacggcgccccccacgggctgcccgctcctattcctgctctgcccctgaagctccacccccactgggtgcccccacagctgcccgcagctgccaccggttggagggctggccgccctgggtgggaccctgcttccccgagctgaggcggcgggtcccccggggagggggccgcccagccgcagccccgcccacccgagccccgactcgtcgcttcagcgatagctcaggttccctcaccccaccggggcaccggcctcctcatccggcatccccaccaccgctgctgctgccacggtcccacagcgacccaggcatcacgacctccagtgacactggtgagccccctccccgactgcccaggctcaggagagggtaggcactgggagttaggtggccagtgatgcccaccaggattggggcacagttgaggtccctgaggaggaagaaagggtgagttcactcctctggtagacacttctcaggtactcacctcctagggacagaacatccatagcttagcagctaaaaaaggakaatttttttttttttttgagacggagtctctggctctgtcgcccaggctggagtgcagtggcatgatcttggctcactgcaacccgtttcccgggttcaagtgactctctcctgcttcagcctgccgagtagctgggactacaggtgtgcgccaccatgaccggctaatatttttttttttttttttttttgagacggtgtctcgctctgtcacccaggctggagtgcagccgcgcgatctgkgctcactgcaagctccgcctcccgggttcacgccattctccttcctcagcctcccgagtagtgagtagctgggactacagatgcctgccaccacgcccggctatttttttgtatttttagtagagatggggtttcaccgtgttatccaggatggtctcaatctcctgacctcrtgatctgcccgcctcggcctcccaaagtgctgggattacaggcatgagtcaccgtgcccgggcaatttttgtattttttagtagagacagggtttcacccttttggccaggctggtcttgaactcctgacctcaagtgatccacccgcctcggcctcccaaaaggatttattttttgaaaccagttccacagctctcagcttggtccacttatctgtcctccccaagcttcagctgtcacttgtwaaacatgtataataatagtacttcaggccgggcacggtggcttgcacctgtaatcccagcactgtgggaagctgaggtgggtggatcacctgaggtcgggagttcgagaccagcctggctaacatggtgaaaccctatctctactaaaaatacaaaaattagccaggtgtggtggagcgcgcctgtaattccagctactaacagagaggctaaggcaggagaatcgcttgaacctggaaagcaggggttgccgtgagccaagatcatgccactgcactccagcctgggtgacagagacacactccatctcaaaaacacaaacaaacaaacaaaaaacatgtataataacagtacttcagccataggcattgtactcgaagatgctgagaaaggagacagtggccgggcaaggctgttcacacctataatcccagcactttgggaggccaaggcaggtggatcacctgaggtcaggagttcaagaccagcctagccaacatggtgaaacccccatctctactaaaaattsaaaaattagctgggcctggtggtggacgcctgtaatcccagctactagggaggctgaggcaggagaatcgcttgaacctgggaggcggaggttgcagtgagctgagatcgtaccactgcactccggcctgggcaacacagtgagactccatctcaaaaaaataagaaaggagatagtactggggaacgctcagcactgtgcgccaggtgctgaacaacaccactgcagtccytgttgtggtggattgtaccatctagttgctggctaatatggacagagatgctggccctttgattggggatggagcgtgggrgctgtgaaagctcctctgggcttgagttcccacaggagggtgggcgtgtccacagaacacttccactcactccctgtctccctttctctcttctccccagctgacttcagggacctttataccaaagtgcttgaggaagaagctgcttctgtttcctctgcagatacaggtcaggcatgtggtttgcgccccagggrtggggattgggcatggctgcccagccccctctccaccctacaataccattctcttatctctgtctctctgcagggctctgctctgaagcctgcytcttccgcctagcccgctgcccttcccccaagttgctacgtgcccggtcagccgagaaacggcgccctgtgcccaccttccaaaaagttcccctgccctcgggccctgcacctgcccactccctgggggacctaaagggcagctggccaggtcggggcctggtcactcgtttcctccagatatccaggaaagccccagaccccagtgggactggagctcatggacataagcaggtaggaattcggggagccaggaaagatgtttgggaaagcgtggagcttcagattgagccttattgatgatgccctttcttgtgtccctgtccaggtgccccggagcctgtggggccggcctggccgagagagcctccaccttcgcagctgcggagatctgagctctagctcttccctgcggcgtctcctgtctggccrcaggctggagcgtggtacccgcccccacagcctcagcctcaacgggggcagccgggagactgggctctgacctaggcttcttgtcacactgaacacatccagccacaggcaccagctggttgggaccagcagcccccagcatcctcttgcactggctggcacaaaaagaaacctgctgtataccccccaaagtgtccctttcccmcctacctctggggtctcttgctgcttgcctctgctgctctggwctgggagagcttctgtcctgtgctgcatgggtatttagactgtgggggagatgccccttcttatagcactggaggaggaaaacaaattcttgtccccctcagaatgagagtggctctttctgatttgcaagggcactatggtcagggcaaaggcatggcccaggtgtttaagtacagggtgacgtgtgcctatgcaatggggtggtaaggcaggcacgaagagtccaaaaaatctaggtggcctctcagctctgccacctctagctgcatgaccttgggcaagctatgtaaccccaattgcctgctccattaaagactgtgaaggtagaatgtttgtaaagctcttaacagtatgtaagccttcaataaatttcagttttccccttgttttcttgatcattctctgtcaccagtgaaatttgttctagtgtctctcatatttaagaaaactctttcaggactgggtatggtggctcacacctataatcctagcactttgggaggccgaagcaagaggatcgcctgagcctaggaattcaagaccagcctgggcaacatagtgagaccctgtctctacaaaaaacaaaaaattagccaggcatggtgggacacgcctgtagtcccaactactcaggtggctaaggtgagaggatcacttgagcttgggaagtccaggctgcagtaagctgtgattgagccactgcactacagcctgggcaacagagcaagaccatgtctcaaaaaaaaaaaaaaaagaaaaaagaaactttcaagacactctttccaaccactaattgtaactctgctcctccttttcacagcaataggttttctttttcttccctccactgttaaacatccattctctcctcacccacccccatcagactccttcccctatctttccacagccactgctctgaccaaactttccagtgaccacagtggtgtcagacccagtgaccatttctctgcctgcatctcacttgacctcgaggcagcaattaatacccataatcagcatcttcttgaatttgtccctttgaaaagggaaatattggctcttctactttgtcctgctgaactgcttaacattggagggccccagggccctcacctaagccctctttcctacctccactctttctataggtggccctactactaaagtccatggctttaaataccatctttctatgtgttaatccataactccagccttgacctcccatgagcgccatccaactcagcatgtctgcttggatgtctaatgggcatttcagattcaacatggccacaactgaactcttgattcccaccccagcaccggttatttttccactgttcccatctcaatggcacctccattacccatttgcacattccaaaagctcaggaaccatggtgacttcttttcccatatccaacacaaccaatcctatcctgaattcatccacatcccaccacctccccagctacctagctccagccatcctctctccacaacctctgaatcagtctttcacttttcccagcaatccattctccactcagcaaaatgatgataaagcacgtcacatcaaggctctgcctcaatttaatggcttcccattgtatttagaatcatctccaaactcccagagactatggtcagctacaatctggcccaccttctgttccagccaaatttcctcacagcacaaggacgtttgcacctgctgttttccaagcatgaaacccttggcccctatatctggtgctatcacctaatatcaggttttagctccattctcaccatttcagtgagcacccaatccccatcgcagtcattctatcacatagccatgtttttttttgtttgtttgtttcattttgtctttttttgagacagggtcttgctttgttacccaggctggagtgcagtggtgtgatttgggctcactgcaaccttccacctcctgggttcaagcaattctcctgcctcagcctcccgagtagctgggattacaggcgcccgtccccatgcccgcccagctaaattttgtatttttagaagagatagggtttcaccatgttggccaggcgggtctcaaactcctgacctcaagtaatccgcctgcctcggtctcccaaagtgctgggattacaggtgtgactcaccgcgcctggccacatacccatggtttcagcatgtatcactatctaaaattattatttttgtttatatatctgtgtcgtcccatagaatgttaaggtcccaagatcagaaacttgctcattgcagtgggtctaacactcagtaggtcctcaacaaacattcgttaagatactaaagtggcagggtggggccctgtaaacagcttcaggaccctgtgcttgtaggggcaacgtggtgccctccaaggaagacagggaggtgggaggagcactgcccagagatggcgtcaggctgcaagacttcttgaataattcagcatcataacaacccagcctcaggaagggatagggcacggccaggacgaaacattaggaggcgatggacaatgggattcccacggggcagcttctgcgcactggacgttccctaacctgaggctctctaaagaggaaggttaggaatcctctgagcttcggtgggctggactcactgtgggaattcaatcgcccccatccaccaacagtgtgctggcgggaaaacgccgacacgcatgcgtagttctcgcgccggctcctctctctctctctctctctctcgctcgctctctcgctctctcgctctctctcgctcgctctctcgctctcgctctctctctctctccggctcgccagcgacacttgttcgttcaacttgaccaatgagacttgaggaagggctctgagtcccgcctctgcatgagtgaccgtctcttttccaatccaggccccgccccgactccccagggctgcttttctcgcggctgcgggtggtcgggctgcatcctgccttcagagtcttactgcgcggggccccagtctccagtcccgcccaggcgcctttgcaggctgcggtgggatttcgttttgcctccggttggggctgctgtttctcttcgccgacggtaggcgtaatgaatatttcgacctttggatcttagctgtcccctccctgcgttcgcacttaacctttttcaccattattattattattgttattattattattttttgagggagtctcgccctgtcgcccaggctggagtgtaatggcgccttcttggctcactgcaacctccgcctcccgggttcaggcgattctccgacctcagcctcccaagtacgtgggattacaagcacccgccaccacgcacggctaattttttgtatcttttagtagagacggggtttcaccatgttggtcaggctggtctccaattcctgacctcgtgatccgcccgcctcggcctgccaaacagctgtgattataggcgtgagccaccgcgcccggccaaccatcattattatttttaacggtaaggatggtcagattttactaatgaagaagagattataaaatcttcaagtctttatatccacttgctttttgaggggtggagtgggaagaaggttatgtaattcatacgttcttcagacatgtgacaaacattcacggagcccggcgacgagcgtcggggttgggattcgcactggagctgcagatgggtgccaggatggactggtccctaccctccgcttgaacctaggaggcggaggttgcagtgaaccgagatcgtgccactgcactccagcctgggtgacagagatactccgtctcaaaaaaaaaaacaaaacaaaaaacaagcggactgggcgcagtgcctcaccctgtaatcccagcactttgcaaagccaaggcgggaggatcctttgagtttaggagtttgagaccaacctgcgcaacacagtaagaccccgtctctacaaaaaatacagaaattagccaggtgtggtggtgtgcgcctatagtcccagctattctggaggctgaggtgggaggattgcttattctggaggcagaggttgcactgagccgaaatcaagctactacactccatccagggcaacatacggagaccctgtctcaaacaaacaaacaaaaaattgctcagtacctggccaaaaaagaagaggctcactatgcagaggggaagtggaaggagatgtttggacttctaaactcaatagagcaggagaggcaaatgtagaatgtgctcaggaaatatctgtgagatgaatgaacttgagggaagtaaggtactagatattacctgccctacccagaacaaatcctgtgcaatgtttccttgaaaagtgagaagtctggaaggggtggctactgacatagtgaagcaactagttcaattctacaacttgacagctacccctgtgccaggctatctacgaggatacttagaatgcataagacattccttcaaggaactccaggaacagaggcctgacatgttgcaatgtttagtgtcaagcagtgtactagagacacattatcacactcaaacctcacaacaattctgtgaggtaggagttatcactccccttttatagatgaaacagaggcttagagtgattgatttattgaaagtcaaacagccagtaaatggtgtagccaggattccaaacttgctgtctcactgagactgtacttaattactggagggaccgggtgtggtggctcattgctataatcccaacaccttgggaggctgaggctggtggatcacctgaggtcaggggttcgagaccagcctggccaacatggtgaaaccccatctctactaaaaatacaaaaattagctgggcatggtggtgggctcctgtaatcccagctactcaggaggctgaggcagggcaattgcttgagccgagatcacactgcactccagcctgggcaacagggcaagactctgtctcaaaaccaaaaaaaaaaaaaattactggaggaacctagaagaagaaatgatcaattttgcttggagtgtatctagaaagacttcactgagatcatttaaagaacaaaaaggatggctggggtccagcgcagtggctcatgcctgtaatcccagcactttcggataccaaggcagcagatcacctgaggtccagagtttcagaccagcctggccaacatagtgaaaccccatctctactaaaaataaaaaaattagctgagcatgttggagggcacctgtaatcccagctacttgggaggctgaggcaggagaatcactcgaacccaggaggtggaggttgcagtgagccaagatcacgccactgcactccagcctgggcaacagagtgagactctgtctcaaaaaacaacaacaacaaaaaatacaaacaagagacaagtagttcccaggtgcctaccaagtggtcaggcactgcacttacctcactgactgcagtaaccaccctttgaggttgtggcattgcctccattttccaggcaaggaaatgggctgagagctgggattagtcaggtcatgactgtgtgtgccactcccgctaaatctcatttgatgtggttcatgaggccacaccatggacagcttcctccttgtgtccactgaggatatggctttgtacaacactttggtttttgaacgactttacaaacctccctgtcttgtgaggaaggaagaacagttattaccatctgcatctgatgatgaaacaagggacgctgcagaggagccgcactgaccactccctccctccagtcctgtcatcccactgccagtgtcccaccctcttgtgccctgcacttcactggctaataacccccctcactttttcctctgtgaagccatcctggataattccccacccacgaatggtccctcctcatctcagagagctctccatgcacacctgttaccgtttctgtctttatctgtaaatatctgtgtgtctgacttccatgcctcacacacctctatagggcaaagactgtcttaaacatcttggtagtgtcagtattttgcacagtgaagtttttttttttaaattatatcagctttatttgtacctttttgacatttctatcaaaaaagaagtgtgcctgctgtggttcccatcctctgggatttaggagcctctaccccattctccatgcaaatctgtgttctaggctcttcctaaagttgtcacccatacatgccctccagagttttatagggcatataatctgtaacagatgagaggaagccaattgccctttagaaatatggctgtgattgcctcacttcctgtgtcatgtgacgctcctagtcatcacatgacccatccacatcgggaagccggaattacttgcagggctaacctagtgcctatagctaaggcagg

SEQ ID NO: 96214 - DNA, 18438 bp, Homo sapiens
ccttctctccctccctctccccgaccctgctctctttcatttcagatgaaatcgttagcaccttaggagaggggaccttcggccgagttgtacaatgtgttgaccatcgcaggtaactgtcagtccctccctactatgtggggctaaagagatggttggggttatatggggcttttttgctaattaacctgaggtagaatttcttagtccccctacagccctgttcattttgagacattcttgagaacccagcaaaagcctctcctgccaacttacaggggtggggctcgagttgccctgaagatcattaagaatgtggagaagtacaaggaagcagctcgacttgagatcaacgtgctagagaaaatcaatgagaaagaccctgacaacaagaagtaagcaagcaaggaagtatgtagggaggctgagagccccaacccctacacgggagagacttctagacctggtttaggcagacaggggagtcctagaccttctcatccattcatcttttgttcatcatcttagagtagtagaacatcagggtaggaaagggggggggcccatgacattccttaatccactccccttgttttcagggaagttagattgctctgtcgtttgaccccagcctagaatggcttctgtagagatataccctggacatagccctaggactgagcatcaacctcatcgaacaatgaattaagcttttataagtagaactatgctgataaggccacagacatttatgcagtaatattttgttcacatacattcacagtccaaaaatagaataaggactttaagccaagatatgaggccagtaggtataaataggagcccagtggtagctagtggtgaatgaatatcaggagttgggctggggttgggatttaggatggacagtttgatgattcaggatctatactgtttggagcttggcactccacagctcttcagcaaatagtttttgaactatttaaaatgacgcaggaagatattttgaaacttgggctgggcatggtggctcacgcctgtaatcccagcactttggaggccgaggcgggtggatcacaatgtcaggagttcgagaccagcctggccaatatggtgaaaccccgtctgtactaaaaataaaaaaattagccgggcatggtggtggacaactgtagtcccagctacttggaaggctgaggcaggagaatcgcttgaacaggaggcagaggttgcagtgagccaagatcgcgccactgcactccagcctgggtgacagagtgagacgccatctcaaaaacaaaaaagaaaaaaacctggcagatagtaccattcttcttgggtctggtagaggctactccttagctgaactgaattttggtgttagtactagctggcatggttttacacaagtatgtggaatcaacagctatgaagtacctccttgttggatggctgatgggcagatgggagctcatcagacaaccccccttcccccatctctcttctcagcctctgtgtccagatgtttgactggtttgactaccatggccacatgtgtatctcctttgagcttctgggccttagcaccttcgatttcctcaaagacaacaactacctgccctaccccatccaccaagtgcgccacatggccttccagctgtgccaggctgtcaagtgtgagtggggtgggccgaagtggactctggggcagtccctcccttcattggatctctctgtcggttgtgcactggtgaagcccctaaacagtcagctgtctgttatctgcagttctttgatttactgtcatcttgaaacgtcttctgacttaactccttgactgatgtctttatcgtcactgattgctcttactctacacctagcctagcagcagctagaagagaaagcctttggaatcaaagcacttaattaccctccccttttcctttctccctttcttgggaaagcatcagtcagacagcaaacataaagagacaaaaatacactccttagggtaaaggcttacatttgtctgggatgagatgttcattcacagcaaaggagatgggaacacagagtatgtagttcagctaaggggcaaggtggggaattcaaagaaatatatcattcctctggagtcatcaaaataatacagtttcacagaattgagttaacataatgccagctagacacatgtcaaagtgtgtacacactacaactcaaagcaaactttttttttttttacatcagttgagctacatatgtatcttacattagaaagagcagagcttcttagaccaggcattccatttagacgtagagcagaaagcagccctagtgattctggacctgtctcctcactggctttgccctaggtaaccaggcctggggtcagctgataccagttagctctggccacctgcaccaagcctgacctggccttctcccctacagtcctccatgataacaagctgacacatacagacctcaagcctgaaaatattctgtttgtgaattcagactatgagctcacctacaacctagagaaggtaagatggatagggtctgcccttggttactgggggcaggcagctgcaccactttgccttctgccgagccctttgttttctcccttttatttcgtcctcccacattttctccctgtctggctccaactgggtaaaactaaataggttgaaagggagagatctcttaagaagacttaaattgggagataacttgtacaggggacttcagataactttccagtagagtgaaagtttttaaggttcttggtttggactttatttatttatatatttatttatttatttatttatttatttatttatttatttatttatttgagacagagtctcactctgttgcccagactgatgtgcagtggcataatctcggctcactgcaacctctacctcccaggtttaagtgattctcctgcctcagcctctggagtagctgggattacaggcacccgccaccacgcctggctagtttttgtgtttttagtagagatggggttttgccatgttggccaggctggtctcgaacccctaacctcaggtgatctgcctgtctcgggctcccagaatgctgggattacgggtgtgagccacagtgcctggcccggacttcttttttgagatgtgtatttctgtgaggtaggaaagctcggctcctttgactaactggagataatggagatctcagacctaaagaagctctccctcctttgacccctttgctacatgttacatatttttagagaaactcctttgctacatgttacattttttcagaaaaacccatttgctacatgttacattttttcagaaaaacccatttgctacatgttacatgttttcagaataactatatatctggcacttgagtgtagtcttcagatgcttacagatgtgcacgctgttctataatcatttcttaatccttttgctcccctacttctaaaagtattatgctggatgtggtggaagctgtaaaacaggaatttcccagggcttgtaaggccaggcaggagatcacagtaccttttttaaggctcagaagcaatgtagagaatactggtggaatctcagtctgggtgcagaggttcatcctctttctcctctgctcctagaagcgagatgagcgcagtgtgaagagcacagctgtgcgggtggtagactttggcagtgccacctttgaccatgagcaccatagcaccattgtctccactcgccattaccgagcaccagaagtcatccttggtaagggagggcaaggctgtccaagtgtgtgagatgatgtgagggtggggccacctaagcctcataacaccttttccctcccattctcacccagagttgggctggtcacagccttgtgatgtgtggagtataggctgcatcatctttgaatactatgtgggattcaccctcttccaggtaagtgatgggatgtcttacttgactgcctggcattcttctacctggttcctttgttttctgctgaggacctgcctactcagttctccacattgcctgccttcctggcagctgatccttagcatgcccttttcagtcccatgctcagttctgtttttgtttcccagacccatgacaacagagagcatctagccatgatggaaaggatcttgggtcctatcccttcccggatgatccgaaagacaaggtgaaccttgagggggcactagttaactcttttccttttctctccacagaattggtctatttcacatcattttcttttttctttgatacctcctctccccccagttactttcagatggggaaataagggaattgtaacaagggtgaccttctgattcctcaacctccccttcccctctagaaagcagaaatatttttaccggggtcgcctggattgggatgagaacacatcagctgggcgctatgttcgtgagaactgcaaaccgctgcgggtgagctgggctcgggataaatagtgcccaccgtccagaagtcacttccttcttagggtggtttgccccctggaatgctcttcacaagcagagggttaggaaaggaggggaggaaagctgaaagaagacatctttggtcaacagaggaaacataagagggagtggttttgtggagggaaggaggttagacagcctaaccttgagacaaccagagatcaaagcaatgtcctggattctttaggtcagacagaaaagaataaactacctttgaagagcttacattttaatgaggaactaaagaagattcatgaagttgacaaggatatacaagtagaaagaactttcaaagattatggagtaattgtgctagtgggaaggtaggttgagctataatatcagaaacgttggtcctggtgtggtcgtggttaggtagccttcaaattggttgcaagcagagccttggttctccaagaatgaaaggtagggtcttgaagaaggcagggtttgtaaggcatcctgcctcacctttttcctgccctcctccaccagcggtatctgacctcagaggcagaggaacaccaccagctcttcgatctgattgaaagcatgctagagtatgaaccagctaagcggctgaccttgggtgaagcccttcagcatcctttcttcgcccgccttcgggctgagccgcccaacaagttgtgggactccagtcgggatatcagtcggtgacgatcaggccctgggcccccctgcatcttttatagcagtgggtgtccagtccaggacactggtgcttttttatacaagagaacgagccagagttcactccttcctcctggctctctatatacctgtgaatatgtgaaatagtgtaaatatgaaagaacttgtacctatcacttcaacccctgccttgtacataatactattccatccacacagtttccaccctcacctgccccctcatacggagttggatgggggccgagtgaggtaaccaggtggcatctaccccatgttttataaggaattttgtacagtctttgtgaaataaaataacgtgcttcatttgacccccatccctggagttggaggtttgggaatgctggggtggagggatgaaactattggcaaactttctgagtttgggtatgaagggagtcctccttaccctccaaaatgaagcacagccaggctaccagtttatttcccctgtccaccttatcatatgggagggtagtgatgggtggggcagcatttctttcagattaaaacagagaagtgttatgaggtggcacttctcggatgtggaattatgagagttgggaaagatctgactcctagagtcattaggccgcggcccagtatagagccagaaactcaggttgaaaacgtgctcaacctggctcctaggggggattgccacgaccggtcagaaggctcccgtcgtccatctcgggagactaggaaggccggattcctacgcgaggcctgctgggaagtgtagttcgttagtggaaggaagtcacatggaagaggggcggtagttggttgtgggcactgggttagaggtatcacgtgggggcactttcgtcttagcttttggacaagacgcaggcgcaacccacggctgctgcggggatccttgtggcccttccggtcgrrggaaccaatccgtgcacagagaagcggggcgaactgaggcgagtgaagtggactctgagggctaccgctaccgccactgctgcggcaggggcgtggagggcagagggccgcggaggccgcagttgcaaacatggctcagagcagagacggcggaaacccgttcgccgagcccagcgagcttgacaacccctttcaggtgacttgcgccagtcggcctcttttgggcggtcaggttgattcttcccggttctgtagggtcgggctaacttgtatccccatttgtgacatttgatcctgggaagagccgccacgtggggtgacagtgactccagaccagtgagcactctggggggcgggccctgccccttaatgggctggtgctggcagtgttggatgatggatttgaggtaaatgttgtcccagtcctgggacaacggcgtggccccgaaggtgcagtacttggagccacaggcagtttgggaatggtccctgggaattcccctaggtggcactgggtgccagctgagmcccgggtctctgccctcaggacccagctgtgatccagcaccgacccagccggcagtatgccacgcktgacgtctacaacccttttgagacccgggaggtgagctactggagagcataggagttcaaggaagggaagggtttgccagtgagacaagttagcttgggtacaggggacttttctgcatgcacaggaaggaagaggcactgtgatcttagttccctgagagaggctagtcagccatgggatgcctcatccttctagggccaccagggccaccaacccaaatggtttgagctctaaaagtcagtcctgggaagatctggaggctggcaaggccttaaccaatgttctgtatgggaaggctttcttgaagaaaataaaggttggggctggttggagtttaggttaggtgtgcagtttgaaagcaaggaatgaggaggactacacctgtttgtcccactggattagaagatggtgagttgtaagaatttaaggggttttcatggtacttaaaacttaaaaaaaaaagccaagcatggtgtgcatgcctgtaatcccacttgggaggctgaggtgggaggattgcttgagcccaggaatttgatggagaccatcctgggcaacagcgagacccccatctcttgaracgttttaaaaattggctaggtgtagtggcacatgcctgtagtccttgctacttgggaggctgggatggaaagactgcttgggcccaggagtttgaggcttcgatgagtgatgattgcaccactgcactccagcctgggtggcagagagacaaccccacactccatccccagaagaaaagaraaaaaaaaaacacagttaagtggggagatatggtaaatgagtgatttgagtcctcactaaggaattggatatgagggatgataaggctgctacaggtcatcatagagttctctgacagaaattcaacagaagaactagcttcctaacaaatgggggaaaggctgcttccttacatcatgagttctgggtctaaaggtattcaagcagactmtagattcctgtgttatgagggactagatgatcactaaggtcttttcctcarcagccaccaccagcctatgagcctccagcccctgccccattgcctccaccctcagctccctccttgcagccctcgagaaagctcagccccacagaacctaagaactatggctcatacagcactcaggtacaggaggtgtgcaggtragggctggggagaagggccagtcctggggcccagggctcacatctccgtctgctcacactgggcaggcctcagctgcagcagccacagctgagctgctgaagaaacaggaggagctcaaccggaaggcagaggagttggaccgaagggagcgagagctgcagcatgctgccctgggrggcacagctagtaagtaatagagtggggaagagcatctgagagtttgggaggagcaaaaacaggtcttaagggcctgggctcggctgggtgcggtggctcacacctataatcccagcactttgggaggctgaggtgggcggatcacgaggtcaagagatcgagaccatcctagccaacatggtgaaaccctgtrtctactaaaaatacacacacamaaaaattagctgggcatggtggcgcgcacctgtagtcccagctactcgggaggctgaggcaggagaatcgcttgaacccgggaggtggaggttgcagtgagccgagatagcgccactgcactccagcctggtgacagagtgagactccrtctcaaaaaaaaaaaaaaacacaaacctgggctctggagtcagactgctgagtttgaattttagagatactgcttactaaccatgagcttttagggaagttacttaatcttgaatgcctcagtttccctatttataaaatgaaaaccacgtttgcatccgtttgacagggttgttgtgaaggttaaacaaaatatatgtgaagtacttggtacagtgcttagatgttttaaataataataaacagtattaatttttccactctcacttgtctccttggaccccaaattggagataaaagagaggatccagggctgggtatggtgcctcacgcctgtaattccaacactttgggaggccgaggcaggcaggttgcttgagytcaggagttagagaccaacctggacaacatagtgagatcctgcctccaaaacattaatgaaaaaaattagcagggcatgatggtacctgtctgtagtcctagctcctcaagaagctgaggtggacggccaggcgccggggctcatgcctgtaatcccagcactytgggaggccaaggcgggtggatcacctgaggtcaggagttcaggaccagccaacatggtgaaaccctgtctctactaaaaatacaaaaattagctgggcgtggtggcatgtgcccataatcccagctactcaggagactgaggcaggagaattacttgaacccgggaggcggagattgcactgagccaagatcacaccactgcactccaacctgggcaacaagagcgaaactctatctcaggagaaaaaaaaaaaaaaaaaaaagctgaggtgggagggttgcttgagcccaggaggttgaggctacagtgaaccatgatcataccactaccttccagcctgaacaacagagaccctatctcaaaaaaaaaaaaaaaaaaaaaagagaggatccagggatggagagaagggggagtgattcctttgttggtctctgttttacttctggggtccacctgttttttkgygccttacagctcgacagaacaattggccccctctaccttctttttgtccagttcagccctgctttttccaggacatctccatggagatcccccaagaatttcagaagactgtatccaccatgtactacctctggatgtgtgagtagtgagaagccttttggaggaagttacaggtagatctcttaactgccctggggtccgctcaccaagaaccaaacacttcacctctatttagaactcaccagcctgctagcaaatgttcttgccctctccccactttttattgtccatatgcaggaatatattttgaattctttagatgtctttgggctgggtgcagtggtatacgcctgtaatcccagcactttgggaagctgaggtgggtggataacctgaggtcagaagtttgagactagcctgatcaacatggagaaaccccatctctactaaaaatacaaaattacctgggcgtggtggcacatgcctgtaatcctagctactcaggaggctgaagcaggagaatcacttgaacccgggaagtggaggttgcaatgagccaagatcatgccattgcactccagcctgggcaacaagagcaaaactccatctcaaaaaaaaaaaaggccgggcacggtggctcacacctgtaatcccagcactttgggaggcccaggtgggcagaacacgaggttaggagatcaagaccatcctggctaacacggtgaaaccccgtctctactacaaatacaaaaaattagccgggcgtggtggcgggtgcctgtagtcccagctacttaggaggctgaggtaggagaatgggcgtgaacccaggaggcagagcttgcagtgagccgagatcctgccactgcactccagcctgggcgacagagcgagattccatctcaaaaaaaaaaaaagaaaaaaaaaaattagctgggcgtggtggcgggcgcctgtagtcccagctactctggaggctgaggcaggagaatggcgtgaaccggggaggcggagcttgcagtaagctgagattgcgccactgcactccagcctgcgcgacagagccagactccgtctcaaaaaaaaaatgtctttgcaaggggatcacacattattgacatttgctttctccatctcccctgttgaggattccatgaaggcagcagctgccttcatttccttactctgccatgtttggtgaatattataggatgagcatagatgggaaggagccttcattgcagtccagaagggctcctcatcctgtccctctgccccttaggcagcacgctggctcttctcctgaacttcctcgcctgcctggccagcttctgtgtggaaaccaacaatggcgcaggctttgggctttctatcctctgggtcctccttttcactccctgctcctttgtctgctggtaccgccccatgtataaggctttccggtaagtgtgttagtggtgggagagtgatggagacctgggatgggccccacgtctgcccatccttcagctctaattcttctcccaccctccccatttttttcctctttgtaggagtgacagttcattcaatttcttcgytttcttcttcawtttcttcgwccaggatgtgctctttgtcctccaggccattggtatcccaggttggggattcaggtttgtgaggctgttatccaccctcacctttccctctagatccagccagcactgggtgctgggataggagttgttcagaaaaaggaaatgtggttttaatccttgggaggtactagtttaatgagatacaagacatacttccaggatagagcgcagacagcactcttgacacatatagattgaagggaagaatgctgcatttggccaatctaaggtggcttcctggaggaggcatagaaccatggttgaaaggaggaagaagaatccccagatgagtgcctggaagagcttggagagctcagggctaatggttcagaaactggaattaaactatgaagagattagatacagtttgggattgtggtgcttggaatgctgctcgattgacagggagccactgctgatgggaagggtaggaacaggggatgctggtgacataaccagtggagaagctgaggagcccctcttcactggtacatccttccctttacagtggctggatctctgctctggtggtgccgaagggcaacacagcagtatccgtgctcatgctgctggtcgccctgctcttcactggcattgctgtgctaggaattgtcatgctgaaacgggtgagggctgtgtcgaaggtggggccgggatggtgagatcatgggtccccaggggcrtgggtggaacattcaggagcaactggcacaggtcaggctgctgggttgttctcagctaatggacctctggggtgtgtgtttctgtgtgtgagtgtgtgtgctgggcagcaggctgctgagtggtagtgatgctgttaggctggggtggggaaccagtggctggaatgggcggtartgtctttgtcctctactygcagatccactccttataccgccgcacaggtgccagctttcagaaggcccagcaagaatttgctgctggtgtcttctccaaccctgcggtgcgaaccssagctgccaatgcagccgctggggctgctgaaaatgccttccgggccccgtgacccctgactgggatgccctggccctgctacttgagggagctgacttagctcccgtccctaaggtctctgggacttggagagacatcactaactgatggctcctcmgtagtgctcccaatcctatggccatgactgctgaacctgacaggcgtgtggggagttcactgtgacctagtccccccatcaggccacactgctgccacctctcacacgccccaacccagcttccctctgctgtgccmcggctgttgcttcggttatttaaataaaaagaaagwggaactggaactgacatccccgtttcctgaatcttcattgggaattaggccttatgaaagagaaaggagagtgtggagtgaggtgggaaggtcggacccggctttagtgtaaactgggagatatgaggggcggggcggtggagcccgagtggctggcgcaggaaggaggtgggaagtccacggaaacgcgaaacccggagacgccagggagccctgctccccacccctctccattaatgacggggaagagccaccgcctctgccgggaacgccaaggaatacgcgggcctggagcctgaaaagctggatggggctcaagtggaggcccaaaggatcactagcagcctagccagggtccagagcgaggcagggactggaggagcgcttatccgactgcctcgccctgccgcgggatcccccaaccccgacagggtctcagtcccgaactacaactcccggggtgcaccgcgccggccctcgccgccatgcccctccttcccgcaccatccccattcccatcccccttctctagtccccgacctgcggcagccggagctcggggagcggagcgtggtggggaggggagcgggacaggcgacacaggagacagcggcgccgcggcctctccccaccaggcggccccggatcctactggacgccctgagggcacaccgaccgcgcctctagagtcaccccacgccgacccctcccctcttctctagacttatttccatccttcccgcttttaccctccccacccctccctgggctccaggccgccgccccctcctcactcctggaccggcccttctcggtgcccctcttccctagggagatgcgatgagccggtgcccccgcgtcctcatcgtcgccccgggcacggtgcccgtccagtgcccgtggtggggagggagcactccgcggtccctccgtgacgcccctcgcttggccccccccacagctggcgtccctcggccatgccccaggggacccagccagggggtgggctctagagcgagtggggtggagaggagaaaggacggggccttgggcgcctctgagatgctcccaagtgccagggagggccgagcgaggcgcaggcaaccgggcagcaggcatgatgccctcgcctagtgactccagccgctcgctgaccagccggcccagcaccaggggccttacccacctccgcctccaccgaccctggctgcaggccctgcttacgctggggctggtccaagtgctcctgggcatcctggtggtcaccttcagcatggtggcctcttccgtcaccaccaccgagagcatcaagaggtcctgcccgtcttgggctgggttctcggtgagttgggtgcacagttgttgggtgggggaggctcctcgggccccaccctccacaccagctgcaagtccacatgcttgcctctcctccctctcctggtcctctgcctccttacagggctgggtgcatcctgtggtgaggggctcactcaggagcctcccctgccaggctgagcctgtgcccactctgtccccagctggcgttctccggggtggttggcattgtgtcctggaagcggccattcactctagtggtaggtgccagggtccagtgcccactgggaggcaggtgcccagcacgcaaggggaagcccatttatgtcctcaagaagggaactggctccccagttggtgccagccgggtgggcacgaagtgtctgtgaaggagggggactctgtccgtggcagaggagtactcatgagggtcccagccctgagtctgcaccctgttttccccagatctccttcttctccttgctttcggtgctctgtgtcatgcttagcatggctggctctgttctctcctgtaagaatgctcaactggcccgagacttccaacagtgctctctggtgagatttgaggagggagagctggaaagaactggctgggggaggtgtgcaggacacctcagtttgtcctgactcaggctgcctcaccctccctgctccactcaggaaggaaaggtctgtgtgtgctgtccctctgttcccctcctccggccctgtccagagtcggggcaggaactgaaagttgcccctaactccacctgtgatgaagcccgaggggccctcaaggtgagcttgcaccctgcaaacatcctcctggttctcactcttgcctcccctgctggggtactcacaggcccataatgtgtggaacttagccgtctcctgactcctctcctcctttcccttccccagaacctgctcttcagcgtctgtgggctcaccatttgtgccgctataatctgtacactctctgctattgtctgctgcatccaaatcttctccctggacctcgtgcatacggtgagaagggagcaggggccagggcacgcaggtatggtgggggcaggggtgtgtgtgctgagacttgcctgagggaacaatggctacagatctggcttttgagcaccaggggctatgggttatctattatcctcatctattggaggaatggatgtttagtggggaggatgagaaggggagatggcagggagtgagttaagtatgtgatgctggtctgggaccaggagagggtgctttagagaatgggactggatggtggggtagagtcaagaaggtcctatgctgggcacggtggctcattcctgtaatcccagcactttgagaggcccaggcaggcggatcacctgaggccaggagttcaagacccacctggccaacatggcgaaaccctgtctctattaaaaatacaaaaatcgggccgggcgcagtggctcgtgcctataatcccagcactttgggaggctgaggagggcagatcacctgagatcaggagatcgagactatcctggctaacatggtgaaaccccatctctactaaacatacaaaaaattagccaggcgtggtggcgggcgcctgtggtcccagctactcgggaggctgaggcaggagaatggcatgaacctgggaggcagagcttgcagtgagctgagatagtgccactgcactccagcctgggcgacagagcaagactccatctcaaaaaacaaacaaacgaaatacaaaaattagccaagtgtggtggcgggtgcctgtaatcccagctacttgggagtttgaggcaggaaaattgcttgaaccggggagacagaggctgcagtgagctgagatggtgccactgcattccagcctgggcgacaagagcaagactccgtctcaaaaaaaaaaaaaaaaaaaaaaaatatatatatatatatatatatatatatatatatacacacaaaattacaaaaattaggctgggctccgtggctcatgcctgtaatcccagcactttgggaggccaaggcaggaggatcaccagatatcaggagtttgacaccagcctggccaacatggcgaaaccctatctctactaaaaatacaaaaattatccgggtgtggtggcgggtgcctgtaatcccagctactcggaagactgaggctggagaatcgcttgaacctgggaggcagaggttgcagtgagctgagatgtagccattgtactccagcctgggcgacaagagtgaaacttcgtctcaaaataataataataataataattagctgggcatggttgcacacccttataattccagctactcaggaggatgaggcatgggaattgcttgatcttgggaggtgggggttgcagtgagctgagatcgcgccactgcactccagcaacagagtcagactctgtctcaaaaaaaaaagaaggtcctagatggaggtgaggctaaagggtggacattcctgtgaagacacagaatgtgtggagcttctggatggaggtggggccataaagaggaatttgtgggtgggcagggccagagctagaggtacagggtgagcgtggggttaaggagagctgattttgggtgagggaggggccagaacaagagcttctctcaggggatagggccagaaaaaataatgtagatgagagaggagtttgggggcccaggaggagctgtattcccagaatccagacttgctgacctgctcgcttccccagcagctggcccctgagcggtcagtctcaggcccactgggacctctgggctgcacgtccccgcccccagcccctctcctacacaccatgctggacctggaggaatttgtcccgcctgtgcccccaccgccctactatcccccagagtatacctgcagctcagaaacagatgcacagaggtaaggcctggtggggtcttgctgggggagctaaggaaggggactggggctgggcctggattgctggagagagggatctttgtggagggggaattatttctcctacattgaccctcttcctcatctgccagcatcacgtacaatggctccatggacagcccagtgcccttgtaccctaccgattgccccccttcttatgaggcagtcatgggactacgaggagacagccaggtgagagcacagcacggcttggggcgggctggggagccgggttgtagcctggaaagctgaacaggctgtagcctctggataaagatagtaacagtggtcaaggtctttacagcaccagcatgcccactgttgcctttgatcttccctagagcctggtgaggtgagtgggttggaagctatcatttctgccatacagacgtggaagctgaggctgcacaattaagtgacttgtacaaagggacaaggctggtctggaatctaagtctccagagctctgtctagcacatgggggtgttcagtgtgtagggctgaacccttgaccctgtgtcttctgcaggccactctctttgaccctcagcttcacgatggctcgtgcatctgtgaacgagtggcctccattgtagacggtgagcagggcgtaatgaggggtggacaagggcggggctgccagggatagctggggtgggtagagacaatagaaggggaaaacaaggcggagttggtggtttggggacataggagggctgtggcaacttggaaccctggacttatttttctcctctgagataaagctggaggcacagtggcccctagaggctgggcttgggagaagaggaactgcctgggcagggctaggccaggccaggctggtgctacacagcgccccctgccgcccacagtgtccatggacagcgggtctctggtgctgtcagccattggtgacctccctgggggctctagcccgtcggaggactcgtgcctgctggagctgcagggctccgtgcgctccgtggactacgttctctttcgctccatccagcgcagccgtgccggctactgcctcagcctggactgtggcctgcggggccccttcgaggaaagccccctgccacggcgccccccacgggctgcccgctcctattcctgctctgcccctgaagctccacccccactgggtgcccccacagctgcccgcagctgccaccggttggagggctggccgccctgggtgggaccctgcttccccgagctgaggcggcgggtcccccggggagggggccgcccagccgcagccccgcccacccgagccccgactcgtcgcttcagcgatagctcaggttccctcaccccaccggggcaccggcctcctcatccggcatccccaccaccgctgctgctgccacggtcccacagcgacccaggcatcacgacctccagtgacactggtgagccccctccccgactgcccaggctcaggagagggtaggcactgggagttaggtggccagtgatgcccaccaggattggggcacagttgaggtccctgaggaggaagaaagggtgagttcactcctctggtagacacttctcaggtactcacctcctagggacagaacatccatagcttagcagctaaaaaaggagaatttttttttttttttgagacggagtctctggctctgtcgcccaggctggagtgcagtggcatgatcttggctcactgcaacccgtttcccgggttcaagtgactctct

SEQ ID NO: 96215 - DNA, 24316 bp, Homo sapiens
  misc_feature (1)...(24316): n = A,T,C or G
cccaggcacccagatgattcctatggcaccagccaggaaaaatggcagctcttaaaggagaaaatgtttgagcccagtcagtgtgagtggctttattctgggtggcagcaccccgtgtccggctgtaccaacaacgaggaggcacgggggcctctggaatgcatgagagtagaaaaaccagtcttgggagcgtgaggacaaatcattcctcttcatcctcctcagccatgcccagggtccgggtgcctggggcccgagcaggcgttgcccgctggatggagacaatgccgctgagcaaggcgtagcccaccatggctgccagtcctgccagcacagataggatctggttccggcgccggtatggctcctcctcagtctctgggcctgctggtgtctggcgttgcggtggtacctcagctgagggtcaaggaaggaaggtgtgttaggagaactagttcttggatccctgcccactctccccagggctgcccctcccatctgccccttacctccatcccaggggaagtagagactgagaatgtgggtacaataggcacagaggttgtgcagcccacgcaggtggacctgcagcttcccactgggcagctttgcctgcagcagcagggccaagtagctgaagacgaaggcgtccaaggaggcagggctggagcagagagagaagggtgggatggaggagaaccactggggtagaaggggtaaagatggagctggaggaagagtcagccttgggaggtgggctctgggcagcaggcggccaccagggaaggacaggacacacagttctagacctggtatggggagagatccccaggtggcgccagcctggccctgaatagggctctatcccagggctgcataaagggcacattcagtgccccacagctcttcaggcccctcctgtgcctggctgccctcccaccctacccttttgtacctctgagaaggctctggccccacgcacagccccactgtcaccagggccagtatctgtctcagggacctcctatccagagcctgagccagccccagccccagccccagctccagctgctccatctgaacctgtatcttcttccaagccacccattaccctcttggagtcagactcacgcatctccaaagaagaacttttgagagcccaggcgctgagagagcagggtcagacactcccgagcctctcggtacagctgtaggggcgacacaggtaggcttgcagctgtgggaacagtgccacctccccacctaagcactcccattcctggccagcatccttggggctcatctcatacaatagcccccggtctcagagctacctccttctccagctcttcctcgtcctcaggcctgtgctccccagtcagcagctgtagccgttccatgtactgccgctgcatgcggccaggcaggaagaagttgaggggaaagggcatagcctctgcataccacttccgggtcacttccacgtagttcttggtgtctatccaaaaagtatgtacctggattgggtaggcaggaagaaacaggtaggtctgagccagtgcacctgtctgattcaaggtgggcttctgacccccatgctttcctgagcctgtgtgtgggtctgtgtgttcccgaaccctccccggctggccatggatgctgggaggtctgggcacactcaccagcaccgggagcaacttctcctccaggagagacatgaaggccagggtgtctgccccttgccgagctgacagatcataatcagcattgtacttctgtggaggaaatatccatggcgtggacactagggagctgcaagggcacttcaccagggaggaaggagtcctgtatggtacccccctcactggcctctgagtgcagtggaggtacagcaaggaacttttcctgccaaggcccccttgcctgggcccagccagtagcctgttgctgttggcgaaaagcctgggccttggagcctcctggccgtgaaggtccagcgcccaatgcagggaaggaaggaaggctccgccgcaaactaggagcagctcccagaatttccatggaaagctggaacaacgcccgctgacggcaactttctaacagtaacttccccgacccagacaccacaaagctagcacaacggagctcagatgcaggctaggactcggtccatgcctcaggaaccagagaaagccatcctcacactccctggatccagggaacccacgcccagggccccccagcttgttccctcagtgcccagctcttggctatttctttcacttcattccatcgctcagacaccattaccacatacacattccacccatacccccaggtctcagcctgccctaccttcccaggctccagtccctgttcctcagcatccccctccacatcctgagtaagctttgtccccagataacctcttcagcatgatccttaaatctccctaagcctcagtttctcccctgtggaatgggggtaagaatctctttctctgaatgcccctgtgttaggaaataatttagaatactttggaaactggaaaagctctgttcacacctaagcaatcagggcagtggcctcggctctgccaggaactttggcttttatctggatcctctctttccaggcctctcaattaattccccaggtcctcaacctttgggaagttagaaatgaggaagagtgtcctacttctgacactgttccctcttggaacctgaccgtcaatgctagaagaacccttggaaaacatgctggcccagccctctagttttacaaataagggagtgcacagccctgagaggttacatggcctgcccgagatcacatagtcaatggcagagtaaagagcatagcctaggcctccccactcctctagtaatgctctttcatcttctccaacctggctctaagccttgtccatcctgagccccatatctagcccaacctagtccctgaaaacaggaagtggcccttagaaatctctctccagtcccaccatcagaggccaactgctgtcttccactctccttcagcctgtgctcctctccctccctgcctcacagtgccctaagtttcatctcttgccgactgctttaatacatcacagtgacattgtgtgtgtctctgccacaagactgttgctccttgatgctctgggtcacctgcatctagcatggcatatatctggtgctcaataaatgtgtattgtatagaattgactgaacttctctcactggcagccccctctatccaagtcacctacctcttttcgaaggtgggtgatgatcttgtgtggaactgagatgacctctccatgactggtccgaagggcaggcagagttcctgatattgagagggaagtataccaaccagacccttagctgcctagtcatacatagttgcaacacattcctgcctatttcttgcttctccccttgtacacacccttccttacccccaagggatactgggtacctgaagggctctgccaggggttgctgatcttgtgtaccttcagtggagcaccagtaaatctggcataggtctgcagggaaggaagcagaagtcagagaggcagagccatgtcccccacagtggtatcaagaagagaaataacatttattgaataccttatgtgccattccctatacttagtatcttagtctcgaaaaaaaagggggagtcactaccatttctattttacaaatggacaacacagggctcagagagattccggacatgtctgtgattacaggacagccaggaaaatcctttcctctatctcctctcttgccatctacctggtgaacatctatcctcagaagcttttcctaaccagtatccctcttcttggaagcactgataatgcccttctctttggcagtatctgtggtctgttcctactttaacttatatgtgaatattttattatatttatttgcttacctatctgcctttctgtaaactcgaagggaggaaccaaattttattcatctttgcctggcaatgtttaatatttggaagaaatctaatagatcctctttaaagcaaggagtcaatgaataaatgaagcaaaggaagtctgattgctaagctctttatacaaagcctggctgtgagtcgtttggtctaacaaacaatagcctcagtaaatgctgttaagtgaggaggaagaggagaagggggctgaggagaaggcaggaattccaagctagagtaggtccctgagacagtccagcctagtaaacctccgaatggagaaaaaaaatgcccaaagagaaaggatctccgcaaggtcacacagccagtgaatggatgagcaaggactagaacccatcacctgaactcccaaccaggcgtcttttcattgctgcattaagcctagaaaactacagcatagggcactgaggccatatcggccacgtacgctctttgactgcctcagtttcccccactgcgcccgtgctgagtagccctggcaaggtttggatgcttggctagttcggccccctccccagtcatcagggcacagcagagggcgccggcgccacccctcaccagcacggccaggctgtccaggtccactgacggcagcccccagccccctgaccagcagaacagctccatgggcgccgccatcttgcccaccctctgtcccggaaacacttccttgtgtgcttctgccctcccctgcctgggcccgccccccgccaccgcccctccgatcgttgcggtcagggggcctggggagatccccggggaggcgaggcttcttctggcccgactggcagctgaactgcgggggactgggccgcgggcctcgggggagggcggccgccggcccatccagaggtggcccacgtagcgggacagcgctgtcggcccggcgcgcctcggagagtcacggcgcctcgtccaagtggagccccgaacccctgaaggcgcggcaggctctggagagcggggtcttgtgcgcctgggccaggtctgggggctcttgccaaactgcacgtggcctgtactgctccagggccccttggggctcgtccccgagcggggactgcgggggggtcccccgagcagcatgttttccacagcgcgttatgtttggagcgggccctgcgccgcctgtcgccatggaaacaaaacaggggcggtggcggcggccggagcggaggccgggctggggcttgggtgggggaggggaagagaggctcgcaggctgtcgcttaggtgacgggaactcaggcgcccctctgcttcatccgggtcacggcccgtccgctagtacccacagtgttccacagtctggtccttggctcctcgcctgtacccctggtcttctgcgcctgtccctggtgtccctttcctcttttttggtttcttcactctgacctcactgaccactgctttagattctcccttcagttcccgtcagacgcttccagactcccaagctttcctacgaatgagggaaaatggagaaacaggcacttgtcaggggaccccccaccctaataaagagcacttgctccgccagaacagcaaaattcatgccatgtgggcatccctgggcactatagcaagctagttgcggccactcccttggcatcctttcctgccagctgtggaataatgcccactgtctagcactgcccctgccaggggttcttgccttccacaatcgtggcttccagaaaacagtggcattcggtagcgctgtgtgccgagacccccaacaatgatgactgcggagagggaggcacctgggggaggatcattagggagaggtagaaagcagggaggcctccaggattctttcccagtgcccctggttcccagagctgatgatgcctccagggtgattggcagctctttgtttcagccccccctcacccgcctgctggccccccctccaattctgtccctccgccccccggctcctgctctctccgcctagccttttcccctcccagctgcctgcctgccaggggtagtgagccggctgagaggcatggagacgcaggaacttcggggggccctggctcttctcctcctttgctttttcacatctgccagtcaggatctgcagggtaagcctgtctccatcctcttagaccgctctctgcttcttccccatttgccctcagcccaagtagcagagaacatgtgggcaaggggagaggggaagagtccagaaattgagccagaggaaaacttaagactgcctagagttggtgaaattatggcctggtggagaggagtgggcaccggagagtagtgggggagctggaacaggacagggtcaggcatgaggccagggcagaggactcaggaactggatgctcaggctgcctggctggggtggttcctgagcatctgtaggcaccctagggtctgggagagcagcctgaaggtgggcgtactgtaggtccctgggcttcgtccccctgggctcctggctgcccaaggacagggcgggggtggggaccaagaagcctgggctctcccggaggtctggtggtgggatgggccgatggatgtgggagaggtagctggagcagatgacacaggcatagattctttactggctggagggaaaaccacagattggccaggacacaggargcagaggagctgggtcctacattcccgtgggagatagcccagatggtgggagggttagagtcctcagtgggcagctgttcttatccagagcgagtgtgctgcgcccctaggatgggaggaggggaactagggtgtggaacgagccaaacccaggagtggaaagagaagctgccttccatttctacgttgtggacaccaggtgccactcctgtgggggatcagcacagcatctcctttgcgccacctggtgggggcatctcaaatttgtggggtgctgtttctgtgtttccaagtgagtctcaaacctgcaggttcctggaaggtagtaataggcaataatggggaaaggaaggcacagtgcctctgtcctctgagagcaacaagggttgaggtttttttttgttttcgttttgtctttttgagatggagtttcactcttgttgcccaggctggagtgcaatggcgcgatctcggctcactgcaacctccacctctcaggttcaagcgagtctcctgcctcagcctcctgagtagctgggattacaggtgcccgccaccacgcccggctaggtggtttttttttcttttttgttgttgtttttgtatttttagtagacacggggtttcaccgtgttggccaggctggtctcgaactcctgaccttaggcgatccacctgcctcaacctcccaaggtgttgggattacaggtgcgagccaccatgcccagccaagggttgaattttgaggtgactaacgctgcctggtggtgggggtagggggtgatgtgggctcgggggagggcataccttagcatttgatcccattctctaaccttgataacccctgcctgaccagtaattgacctgctgactgtgggcgagtctcggcagatggtagctgtggcagagaagatccggacagccttgctcactgctggggacatctacctcttatccaccttccgcctgccccccaagcagggtggtgtcctctttggcctctattctcgccaagacaacactcgatggctggaggcctctgttgtaggcaagatcaacaaaggtgactggtgggcatctcctttcttgcaatggtgacctccttaagcactctccctcatccctacttcccaagtgcttcctcattctccttggcctccaytagggaccaaggtcccatcaggctgtgcccagacatcaggggcacctggtatggggtgcttataaggtgctttaggagcccatgtaccaaacaatagggtgaggcttgagtcctgatatttatagggatgggaggttgtacttggggatgcctggaaggagggtgaggcatgtctctgtgcctcagcggtgatacagaaaggtctttcagatccctggaacaggtcagtggccacaaaaccagctgtcaccctaggagaggatacagtcatctgataccaatgaagactaagaaagtatttgtctctaaaccaattatttttttaaatggagtcttgctttgtcacctaggctggagtgcagtggtacaatctcagctcactgcaacctctgcctcctgggttcaagcaattctcctatctcagcctcctgagtagctgggactacaggtgcccaccaccatgcctggctaacttttgtatttttagtagaaacagggtttcgccatgttgaccaggctgttctcgaacttctgacctcaagtgatctgcccaccttggccttctaaagtgctgggattacaggtgtgagccaccgtgcctggcctctaaagcaatttcaaaaacatttattgtgtacctattaaatacaaggtgttgagagccacatagtagaattagggataggggccctagagatgtggtatctagcagagttgatccaaggctcagctgggaggcagggggtgggggatagcgcccatactgatctcccctcctgggcagtactggtgcgataccagcgggaggatggcaaagtccacgccgtgaacctacagcaagcgggcctggctgatgggcgcacacacacagttctcctgcgactccgaggtccctccagacccagccctgccctacatctctacgtggactgcaaactgggtgaccaacatgcaggccttccagcactggcccccattcctccagcggaggtcgatgggctggagattaggactggacagaaggcgtatttgaggatgcaggtgagccgggaggagcctctgagttctgtggaaatagagtttgcaccagctggggaaggggttggtagaccttcccaccttactctgctgctatccccccagggctttgtggaatctatgaaaattattctgggtgggtccatggcccgggtaggagccctgagtgagtgtccattccaaggggacgagtccatccacagtgcaggtaacacagagacttgtttgctgacattggaccacggatcctgtggcctttggtgactcctgtcttcttgatctccctctcccttaaaacccattcctttggctcacctgttcctagggtttctaaccctgttattccaaatctttcacctgactccacaatctccaatacacccatccgagaaaaaaagtgatctaagagaagaattggttaattgcttggccttggctgaccaagagatactggtctcgagtatttttttttttttttggtgatggagtcttgtcctgttgcccaggccggagtgcagtggtgcaatctgggtcactgcagtctccactgagttcaagtgattctcctgcctcagcctcccaagcagctgggattacaggcgccctccaccatgcctagctaatttttgcatttttagtagagatgggatttcaccacgttggccaggctggtctcaaacacctaatctcaagtgatgcacccacctcggcctctcaaagtgctgggattacaggcgtaagccaccgcrcccggcctggtctcgagtcttttatagttctcactggcagctgtcaccagcaatttctctgagtgttgcccatctgcctggtctctctgacagggatgttcagaagctctcacctaaataaaagacccacctttcccagatatttgagggagagctcttgaagaagggaatgggatggcgggtgtggtggctcacacctgtaatcccagcactttgggaggctgaggtgggctgatccctcaaggtccggagttcaagaccagcctggccaacactgtgaaacctcctctctactaaaaaatacaaaaaattagctgggcatggtggtgggcacctgtagtcccagctacttgggaggcggaggcaggagagttgcttgaacccaggaggtggaggttgtggtgagcagagatcacgccactgcattccagcctgggaaacagagcaagactccgactcaaaaaaaaaaaaaatggggatatactggggccctggccctgctttgggtccatcccttctgccactaccatgcctaggaaccaggaggatttgggttctaacttcctgtgaagcaactcccttagagggccttttgccccatagaaggagctggcactgcttgtctgccagctctgccctcccagcatccagcaccccatctttattctggggctccagccctgtccctgtcctcaccttccttcctccttctcaccaaccaggcctctcttcacttcacctcacccctctgactatgttttcttctcctctccagtgaccaatgcactgcactccattctaggtgagtaggccacactgaagcggaagcggggagcggggaggaggccccaggctctggcagctgcctgaaactaagtcctcttcagtcaggaatgtagtaggtttaaaggcaggggtgggcagccgtggcaggtactggcttattgcccatggagggcccaggactggtgctccagtactgaacccctcacaccctgggtcccgacaggggagcagaccaaggcgctggtcacccaactcaccctcttcaaccagatcctggtggagctgcgggatgatatacgagaccaggtttgggtgggctggcgaagggtggcactgattctggggtagggtggcagatgtcaagtgctgactcctccccatccttctccaggtgaaggaaatgtccctgatccgaaacaccattatggagtgtcaggtgtgcggtgagtgggagagcaggggaggctccacatgaccgtgccacgttccccacccawtggctttggctttcccttctggtggcttaaatagtgaccaccgggtagctctgactgtgtccacccctcaggcttccatgagcagcgttcccactgcrgccccaatccctgcttccgaggtgtggactgcatggaagtgtacgagtacccaggctaccgctgtgggccctgcccccctggcctgcagggcaacggcacccactgcagtgacatcaatgaggtgagggaggtcagagcccagaagggtacagaaaactggggtgaggatgtcaggaggcacccaagagggtgggataaatgctggtccggaggagaggaatctggagtttaggagaggtcagaggcaagagaaatgcaagatgggagagacagaaggcctggggcaaagactgaaggccatacagggaaggagctggggaaactgcaggggaggcttgagatggygaccagtggcatggggagggagagagggaaccccgagggaagtggggtggggaccaggagcacaaggcagttgtgtggggagagctgcacaaaggggagacctggagcaatggttcctggatcacaggcagggacctgagtttcccagagggcggcctgacctctgccttctcatctggtccccagtgtgctcacgctgacmcctgtttcccgggctccagctgcatcaacaccatgcccggcttccactgtgaggcctgtcctcgagggtacaagggcacacaggtgtctggtgtgggcattgactatgccygggccagcaaacaggtcagactgggtagtgtgtgtggacaagggatcttggccttgtagaggccaggggcttctgggttggacatgggacccttgtgatgaatgggacatggatggctttgcatcggctttgggtctgggcttaatgttgatgttcacagataaggccataccagtgtcctctgctgtatctgaggagacccaccataggtctggttccacccaaagtctgccccttcaggtctgcaatgacatcgatgaatgcaacgatggcaacaatggtggctgtgacccaaactccatctgcaccaacactgtggtgagctgaatatcctgagtgtattctggggtggtgggaatggtaaaaccccaacccccgccccttcttaccttcaaatttcctgctgcctttcctcctccccagggcactacacagattaggtgttcacatggacttggtttggaatactggtttgcctcttgctagctctttagcaggttatttaacttttctgagcctcagcttcctcatctgaaaactgaggctgttatccaccctgaaaggttgtcatgataacctaaaggagatactgatatgcctggcataactgagtgcccagcccacactccgcaggtggagcagtgctggtcctgggtgcctggtgggctcaccctccttcctaagatgctgcctctccactcttagggctctttcaagtgtggtccctgccgcctgggtttcctgggcaaccagagccagggctgcctcccagcccggacctgccacagcccagcccacagcccctgccacatccatgctcactgtctctttgaacgcaatggtgcagtgtcctgccaggtgagctaggcttcaggcgtggaaggaaaagggagggtctggggaaaggagtagggctatgtttagggcctgggttgggggtcttcataggagagaggtgggcctgggcccaggaactgtttggtggggagaataggacctgaagcagggaaaatatagggaggaggggagccagaccaaactgctagctcctaccctttgtgttgccctagtgtaacgtgggctgggctgggaatgggaacgtgtgtgggactgacacagacatcgatggctacccagaccaagcactgccctgcatggacaacaacaaacactgcaaacaggtgcagggagcaggcgggcaagggggcgtagtggggagcccaagctgggtcaggccagaactcatccatcctcttcccctgaactttaggacaactgccttttgacacccaactctgggcaggaagatgctgataatgatggtgtgggggaccagtgtgatgatgatgctgatggggatgggatcaagaatgttgaggtgactcccagactgccctgccccttgaagctcctctcccctcctcctgtcctctctgtgcctcacttacctcatctggcagctctctagtaagggccaaatactccaaatcagggaggcaaaaacctcgtgcccaggacaaggaggctgggtgggtgggactgtactgagcagtttgtccatcacaagggtgtgatcttagaaaaggatacagagacaaggtaggtgcaagatgacaagtgatttaggggagacctgacccttcccctcccacccctctgcccaggacaactgccggctgttccccaacaaagaccagcagaactcagatacagattcatttggtgatgcctgtgacaattgccccaacgttcccaacaatgaccagaaggacacagatggcaatggggaaggagatgcctgtgacaacgacgtggatggggatggtgcaggcctggggctgaaggggtggctgggggacctgtgagaatttggatcaggtggggatgaagcagggaagctaggaagtctctgtgaaatagggaggcaggcttgtggacgttggcctgggtgaggagagattacctgcagcagatgtcaataggaatgtgaggtagggcgtagtgttaggcagagtgtggactagagggtgagacaagaaacaggcagatttcctggccagttgtcctctgggtggggagacaaagttcgggactttcaccaacctagaagagagaatatggcatgttctagtaacaaccttgtgctacccatgtcttcyaggcatccccaatggattggacaattgccctaaagtccccaacccactacagacagacagggatgaggacggggtgggagatgcttgcgacagctgccctgaaatgagcaatcctacccaggtacagggagatggtaaggacaggggagggatgagggtactgatggatgaagccccagccctttggatggaaagtggtcagatcaccctcttcagagttatcaagaggagatggtgagaacaggtccctctctctcagacagatgcagacagygacctggtgggggatgtctgtgatactaatgaagacaggtaaggtcttggtcaagagacgcaaggtctttcttttttttgtctttctgagacggagtcttgctctgtcacctaggctggagtacagtggcacgatcttggctcactgcaacctccgtctcccagggtcaagtgattctcatgcctcaacctccctgagtggctaggattacaggcatgtgctaccaagcccagctaattcttgtattttcagtagagacagggtttcaccatgttggmcaggctggtctcgaactccttacctcaggtgatccgccagcctctgcctcccaaagtgctgtgattacaggtgtgagccactgtgccagcgaaatgcaaggtcttataggggatattttactttcctctagtatatcctttttttttttttttgagacggagtcttgctctgtcgcccaggctggagtacagtggcatgatctcggctcactgcaagctccacctcccgagttcacgccattcttctgcctcagcctcccaagtagctgggactacaggcgcctgccaccacgcccggctaattttttgtgtttttagtagagacggggtttcactgtgttaaccaggatggtctcgatctcctgatctcgtgatttgcctgcctcagcctcccaaagtgctgggattacaggcgtgagccactgtgcccggcctcctttttttttttgagatggagtcttgctctgtcactcaagctggagtgcagtgatatcggctcactgcracctccacctccagggttcaagcgattttcctgcctcagcctcccgagtagctgggattacaggcgcgtgctaccaagctcagctaatttttgtgtttttagtagagacagggtttcatcgtgttggccaggctggtctcgaactcctgacctcaggtgatctgcccgccttggcctcccaaagtactgggaatacaggcatgagccactgtgcccaggccatagtatattctaaattccttctatgatttagccttaattctctattgctattcagcaggaatttattcttacagtcatccctccattcctactgccagaccttcacctcacctggctgactgccaggggtctgattgtatggagagcaggctccagagactcccaggcagaagcgaagggaaggacaaggagtacctttaaatcctttatttggtacctgttcttctgattagcgatggggatgggcatcaggacaccaaggacaactgcccacagctgccaaatagctcccagctggactctgataacgatggacttggagatgagtgtgatggggatgatgacaatgatggcatcccagattatgtgcctcctggtcccgataactgccgcctggtacccaatcccaatcagaaggactcagatggtaagcctgcggacccagagcacgttagactggtgttgcctttgcccaggtggaggcagcaagccctgttgggaagtgaggaagggcaaggtggggaaagatgtcaggaatgcaggcccaacagatggtattgttgcctaatggcagtggccagggccttcctgagcacccagcctcactctgcccaggcaatggcgttggtgatgtgtgtgaggatgactttgacaatgatgctgtggtcgaccccctggatgtgtgtcctgaaagtgcagaggtaacgcttacggattttcgggcctatcagaccgtcgtcctggatcctgagggtgatgctcagattgacccaaactgggttgtgctcaaccaggtaactcggggcagtgggctgggcaggtgctatcagacagggctacygggacggggggcctgggagggatagcacacctgcatcacagctttttctttactatacaaccccagggcatggaaatcgttcagaccatgaacagtgaccctggcttggcagttggtatgtaagggatatgcagttcaatcacttccaaatggaggaatcctataggggcagagggtaggggaggaaacagacagggagaatgggcaaagtggcragagagaaggcagtggcacaagctggccacatacatagcaggcatcccttcccaactttaccccatgatgggccgccagtagctttgctgcccctgacctttatcccacccccaccccaggatacacggccttcaatggtgtggactttgaaggcaccttccatgtgaacacagtgactgatgatgactacgcaggctttctcttcagttatcaagacagtggccgcttctacgtagtcatgtggaagcagaccgagcagacctactggcaggctacacccttccgggcggttgcccagcccgggctgcagctcaaggtccccagctgctcagattccgcaacccagggccctttcccaaagctctcctctgcagccccagggcctcccccactgcttgactggraaccctcttacccagacatctggcttggaggccggctctctggggccccagggcattttcatgaccgccttgaatccctttcccacctgcacttaccgacctgttgtctcccctcactccagttctgcagttgacccactgtctttgccaatgtctcctaggcagtgacatcagtgtctggcccaggtgagcacctccgaaatgccctgtggcatactggccacacccctgatcaggtacgactsctgtggacagacccacgaaatgtgggctggcgggacaagacctcctatcgctggcagcttctgcaccggcctcaagttggctacattcggtaaggagaggggctgagcccacctgtgggactcaggccgggcctgtccttcctctttagctgggattcaccagtgacctctccatgggtgggaactgcagccacttctctccatcacccttctcaccacggacacaagcacctatgagtgatgttggtgaagtcactcctccatgacccattttcccgtctgtaaaatgagggcattgggttagatgccctttacagttctccagaagcctccaaacccaggccaatctgtgaaggggcacatcacatctggtcccttagttggtatgacctggaacctgtcttatcaacgtggatagggatcatctgacctggaaggcatcatcatttacagaagagaaaatcaaggccctgacttcacaggcctcggttcaacactttgtccacaactttgcatttctctccaacaagtagccctagttggtggagatgaacaggaagggaggggaaatgggtctgcttagaggctggactttccatggccaagagcccagagtccaggaacctgggttggttcccctttaaggtgcctggggctgtggggtgccaggacaggggataaaagggggtggactagagcctgggaagcgggtgacttcaccccccagcccattgtgcttattgtcatggcaacccaatcctcgcttggaatgcggctggtgctttgagatgcaaaaggagctggacaaagagctaggggccccaggcctgagaaaagcaccccccttccctctccttcctgcctccctttccctccctcccttctctctcaggcctggtgagctcaaggggggctggggaaaagcaaggccccaggcatggtggcacagtgcccactggcaccctagcaccaatggatactcctatcctggaatcctggacagggtgaagctctatgagggaccccagcttgtggcggattctggggtgatcattgacacatccatgcgaggggggcgtcttggtgtattctgcttctcccaagaaaacataatttggtccaatctccagtatcgatgcaatggtgaggtggctgattgagatcaacctaatccttcatgccttgtgggagagccacatcctctgaccttacttatttccccttcttcagacacagtgcctgaggactttgagccattccggaggcagctgctccagggaagggtgtgaggaggaggccaccagattcagaattcagaattttagaccctttggccttggggtccatcctggagaccctgaggtytaagctacagcccctcagccaaccacagacccttytctggctcccaaaaggagttcagtcccagaggggtggtcmccccmcccttcaggggatgagaagttttcaaggggtattactcaggcactaaccccaggaaagatgacagcacattgccataaagttttggttgttttctaagccagtgcaactgcttattttagggattttccgggatagggtggggaagtggaaggaatcggcgagtagaagagaaagcctgggagggtggaagttagggatctaggggaagtttggctgatttggggatgcgggtgggggaggtgctggatggagttaagtgaaggatagggtgcctgagggaggatgcccgaagtcctcccagacccacttactcacggtggcagcggcgacactccagtctatcaaagatccgccgggatggagagccaggagggcgggggctgccccgctaggggtagcggggaggccggggggccgggggggccggagggcgggacgagtgcaatattggcgggggaaaaaacaacactgcaccgcgtcccgtccctcccgcccgcccggggcccgggatcccgctccccaccgcctgaagccggcccgacccgggaacccggggcgcgctggggagttgggttcaccttggaggccagagagacttggcgcccggaaggcaaagggaatggcaagggggaggggggagggagaacgggagtttgcggagtcccagaaggccgctttccgacgcccgggcgttgcgcgcgcttgctctttaagtactcagactgcgcggcgcggagccgtcgccatggtgacgcgtgtcccagcaaccgaactgaatggctgttgcttggcaatgccgggagttgaggtttggggccgcccacctagctactcgtgttttctccggcctgcgagttggggggctccccgcctccccggcccgcgctcccgggcgcgctgacgtcagatgtccccaccccgcccagcgcctgccccagggtctcgccgcacacaaagctgcgcctcgggcgccgcgcggcgcgcgggcgagagcggtggtctctcgcctgctgatctgatgcgctccaatcccgtgcctcgccgaagtgtttttaaagtgttctttccaacctgtgtctttggggctgagaactgttttctgaatacaggcggaactgcttccgtcggcctagagcgcagcctgcgactgcgggacccaagttccacgtgctgccgcggcctgggatagcttcctcccctcgtgcactgctgccgcacacacctcttggctgtcgcgcattacgcacctcacgtgtgcttttgccccccgctacgtgcctacctgtccccaataccactctgctccccaaaggatagttctgtgtccgtaaatcccattctgtcaccccacctactctctgccccccccttttttgttttgagacggagtcttgctctgtcgcccaggctggagtgcaatggcgcgatctcggctcactgcaacctccgcctcccgggttcaagcgattctcctgcctcagcctcctgagtagctggggttacagcgcccgccaccacgctcggctaatttttgtagtttttagtagagacgaggtttcaccatcttggccaggctggtcttgaacccctgaccttgtgatccactcgcctcggccttccaaagtgttgggattacgggcgtgagccaccgtgccacgcccgatctgcctcttaagtacataacggcccacacagaacgtgtccaactcccccgcccacgttccaacgtcctctcccacatacctcggtgccccttccacatacctcaggaccccacccgcttagctccatttcctccagacgccaccaccacgcgtcccggagtgccccctcctaaagctcccagccgtccaccatgctgtgcgttcctccctccctggccacggcagtgacccttctctcccgggccctgcttccctctcgcgggctctcgctgcctcacttaggcagcgctgcccttactcctctccgcccggtccgagcggcccctcagcttgcgcggcccagccccgcaaggctcccggtgaccactagagggcgggaggagctcctggccagtggtggagagtggcaaggaaggaccctagggttcatcggagcccaggtttactcccttaagtggaaatttcttcccccactccctccttggctttctccaaggagggaacccaggctgctggaaagtccggctggggcggggactgtgggtttcagggtagaactgcgtgtggaacgggacagggagcggttagaagggtggggctattccgggaagtggtggggggagggagcccaaaactagcacctagtccactcattatccagccctcttatttctcggccccgctctgcttcagtggacccggggagggcggggaagtggagtgggagacctaggggtgggcttcccgaccttgctgtacaggacctcgacctagctggctttgttccccatccccacgttagttgttgccctgaggctaaaactagagcccaggggccccaagttccagactgcccctcccccctcccccggagccagggagtggttggtgaaagggggaggccagctggagaacaaacgggtagtcagggggttgagcgattagagcccttgtaccctacccaggaatggttggggaggaggaggaagaggtaggaggtaggggagggggcggggttttgtcacctgtcacctgctccggctgtgctagggcgggcgggcggggagtggggggaccggtataaagcggtaggcgcctgtgcccgctccacctctcaagcagccagcgcctgcctgaatctgttctgccccctccccacccatttcaccaccaccatgacaccgggcacccagtctcctttcttcctgctgctgctcctcacagtgcttacaggtgaggggcacgaggtggggagtgggctgccctgcttaggtggtcttcgtggtctttctgtgggttttgctccctggcagatggcaccatgaagttaaggtaagaattgcagacagaggctgccctgtctgtgccagaaggagggagaggctaaggacaggctgagaagagttgcccccaaccctgagagtgggtaccaggggcaagcaaatgtcctgtagagaagtctagggggaagagagtagggagagggaaggcttaagaggggaagaaatgcaggggccatgagccaaggcctatgggcagagagaaggaggctgctgcagggaaggaggcggccaacccaggggttactgaggctgcccactccccagtcctcctggtattatttctctggtggccagagcttatattttcttcttgctcttatttttccttcataaagacccaaccctatgactttaacttcttacagctaccacagcccctaaacccgcaacagttgttacaggttctggtcatgcaagctctaccccaggtggagaaaaggagacttcggctacccagagaagttcagtgcccagctctactgagaagaatgctgtgagtatgaccagcagcgtactctccagccacagccccggttcaggctcctccaccactcagggacaggatgtcactctggccccggccacggaaccagcttcaggttcagctgccacctggggacaggatgtcacctcggtcccagtcaccaggccagccctgggctccaccaccccgccagcccacgatgtcacctcagccccggacaacaagccagccccgggctccaccgcccccccagcccacggnnnnnnnnnnnnnnnnnnnnnnnnnnnnnnnnnnnnnnnnnnnnnnnnnnnnnnnnnnnnnnnnnnnnnnnnnnnnnnnnnnnnnnnnnnnnnnnnnnnnnnnnnnnnnnnnnnnnnnnnnnnnnnnnnnnnnnnnnnnnnnnnnnnnnnnnnnnnnnnnnnnnnnnnnnnnnnnnnnnnnnnnnnnnnnnnnnnnnnnnnnnnnnnnnnnnnnnnnnnnnnnnnnnnnnnnnnnnnnnnnnnnnnnnnnnnnnnnnnnnnnnnnnnnnnnnnnnnnnnnnnnnnnnnnnnnnnnnnnnnnnnnnnnnnnnnnnnnnnnnnnnnnnnnnnnnnnnnnnnnnnnnnnnnnnnnnnnnnnnnnnnnnnnnnnnnnnnnnnnnnnnnnnnnnnnnnnnnnnnnnnnnnnnnnnnnnnnnnnnnnnnnnnnnnnnnnnnnnnnnnnnnnnnnnnnnnnnnnnnnnnnnnnnnnnnnnnnnnnnnnnnnnnnnnnnnnnnnnnnnnnnnnnnnnnnnnnnnnnnnnnnnnnnnnnnnnnnnnnnnnnnnnnnnnnnnnnnnnnnnnnnnnnnnnnnnnnnnnnnnnnnnnnnnnnnnnnnnnnnnnnnnnnnnnnnnnnnnnnnnnnnnnnnnnnnnnnnnnnnnnnnnnnnnnnnnnnnnnnnnnnnnnnnnnnnnnnnnnnnnnnnnnnnnnnnnnnnnnnnnnnnnnnnnnnnnnnnnnnnnnnnnnnnnnnnnnnnnnnnnnnnnnnnnnnnnnnnnnnnnnnnnnnnnnnnnnnnnnnnnnnnnnnnnnnnnnnnnnnnnnnnnnnnnnnnnnnnnnnnnnnnnnnnnnnnnnnnnnnnnnnnnnnnnnnnnnnnnnnnnnnnnnnnnnnnnnnnnnnnnnnnnnnnnnnnnnnnnnnnnnnnnnnnnnnnnnnnnnnnnnnnnnnnnnnnnnnnnnnnnnnnnnnnnnnnnnnnnnnnnnnnnnnnnnnnnnnnnnnnnnnnnnnnnnnnnnnnnnnnnnnnnnnnnnnnnnnnnnnnnnnnnnnnnnnnnnnnnnnnnnnnnnnnnnnnnnnnnnnnnnnnnnnnnnnnnnnnnnnnnnnnnnnnnnnnnnnnnnnnnnnnnnnnnnnnnnnnnnnnnnnnnnnnnnnnnnnnnnnnnnnnnnnnnnnnnnnnnnnnnnnnnnnnnnnnnnnnnnnnnnnnnnnnnnnnnnnnnnnnnnnnnnnnnnnnnnnnnnnnnnnnnnnnnnnnnnnnnnnnnnnnnnnnnnnnnnnnnnnnnnnnnnnnnnnnnnnnnnnnnnnnnnnnnnnnnnnnnnnnnnnnnnnnnnnnnnnnnnnnnnnnnnnnnnnnnnnnnnnnnnnnnnnnnnnnnnnnnnnnnnnnnnnnnnnnnnnnnnnnnnnnnnnnnnnnnnnnnnnnnnnnnnnnnnnnnnnnnnnnnnnnnnnnnnnnnnnnnnnnnnnnnnnnnnnnnnnnnnnnnnnnnnnnnnnnnnnnnnnnnnnnnnnnnnnnnnnnnnnnnnnnnnnnnnnnnnnnnnnnnnnnnnnnnnnnnnnnnnnnnnnnnnnnnnnnnnnnnnnnnnnnnnnnnnnnnnnnnnnnnnnnnnnnnnnnnnnnnnnnnnnnnnnnnnnnnnnnnnnnnnnnnnnnnnnnnnnnnnnnnnnnnnnnnnnnnnnnnnnnnnnnnnnnnnnnnnnnnnnnnnnnnnnnnnnnnnnnnnnnnnnnnnnnnnnnnnnnnnnnnnnnnnnnnnnnnnnnnnnnnnnnnnnnnnnnnnnnnnnnnnnnnnnnnnnnnnnnnnnnnnnnnnnnnnnnnnnnnnnnnnnnnnnnnnnnnnnnnnnnnnnnnnnnnnnnnnnnnnnnnnnnnnnnnnnnnnnnnnnnnnnnnnnnnnnnnnnnnnnnnnnnnnnnnnnnnnnnnnnnnnnnnnnnnnnnnnnnnnnnnnnnnnnnnnnnnnnnnnnnnnnnnnnnnnnnnnnnnnnnnnnnnnnnnnnnnnnnnnnnnnnnnnnnnnnnnnnnnnnnnnnnnnnnnnnnnnnnnnnnnnnnnnnnnnnnnnnnnnnnnnnnnnnnnnnnnnnnnnnnnnnnnnnnnnnnnnnnnnnnnnnnnnnnnnnnnnnnnnnnnnnnnnnnnnnnnnnnnnnnnnnnnnnnnnnnnnnnnnnnnnnnnnnnnnnnnnnnnnnnnnnnnnnnnnnnnnnnnnnnnnnnnnnnnnnnnnnnnnnnnnnnnnnnnnnnnnnnnnnnnnnnnnnnnnnnnnnnnnnnnnnnnnnnnnnnnnnnnnnnnnnnnnnnnnnnnnnnnnnnnnnnnnnnnnnnnnnnnnnnnnnnnnnnnnnnnnnnnnnnnnnnnnnnnnnnnnnnnnnnnnnnnnnn

SEQ ID NO: 96216 - DNA, 48203 bp, Homo sapiens
ggatctccatatggaaaagagtgaagttggacccctacctcacaccatatacaaaaataacttaaaatgtatcacactaatatacaagaatttacttaaaactccaatagaaaaagtaaaactataaaactattaaaagaaaacataacagaaaatcttcatggcattggatttgggaattaggtatgatgccaaaagcataggtaataaaagaaaaaacagataaactggactctataaaaatttaaaagtgaatcaaagaacaatatcaaaaagtgaagaaaacccacaaaatgggagaaattatttgcaaatcatacacccaataagggtttaatattcagaatatataaagatctcccacaattcaacagaaaaaaaaactcaattaaaaaatgggcaaaggacttaatagacagttcccaaagaagacatataatggccaataagcacattaaaagatgctcaacatcattagtcattaaagaaatacaaaataaaaccacagtaagataccacttcccaccacctactaggatagctataatttttaaaaaaggaaattaagttttggtgagcatatggagaactggaacacttgtacactgctcccatggaaaaacagttttagcagttccttaaaaagctaaactaaaagcttaccatgtgatctagtaagtccacacgtaggtatattcccaaaagaattgaaaataggaactcaaacagattcttgtacaccaatgttaataacagcattattcacaatagccaaaaggtggaaacaacctaagtgtccatcaacatatgaataaataaatatggcatatatataatataaacaaatggaatattattcagccataaaaagaaatcgagttctgatacatgccacaacatgggtgaaccttgaaaacattatcctcacaaaagactctgaatagccaaagcaatgttgagctaaaagaacaaagctaggggcatcacactacctgacttcaaaatatactaaactctagtaattaaaacagcacggtactggcataaagagacacacagataatagaacagaacagagacccaagaaataaaaccacatatttatagccaactgatttttgacaaaagagccaagaacccacaatggggaaaggtcaggctcttcaataaacggtgttgggaaaactgataaccatatgcaaaagaatgaaagtagtcaattatctctcaccacatacagcatcaactcaaaatggactaaagacttaaatgtaagaccccaaaccatgaaaccacttgaagaaaacacaggaaaaaagctccctaacattggtcagggctagaggttcccaaccccagggccacagattagtaccagtccatggcctgttaggaaccaggccacaaagcagtaggtgagcagcaggcaagcaagcgaagcttcatttttctttacagctgctccccattcctcacgttaccacctgagctccacctcctgacacatcaacggtggcattagattctcatagcagcgcaaaacctactgtgaattgcgcatgcaagggatctaggttgtatgctccttagaagaacctaatgccttatgaactgtcactgtctcccatcactcccagataggaccctcaagtttcaggaaaacaagctcagggctcccagtgattctacattatggtgaattgtataattatttcactatatattacaatgtaataataatagaaacaaagtgcacaataaatgtaatgcgcttgaaatatcctgaaaccatcccctccctcctgtggatggaaaaattgtcttcgatgaaaccagtccttggtaccaaaaaggttggggactgctgatctgggcaatgattttttggatatgacttcaaaagcaaaggtaacaaaagcaaaaatagacaaagggattacatcaaaataaaatgcttctctgcacagcaaattcaacagactgaagacagaatctacagaatcggataaaatatttgcaaactatacatctaataagaggttaatttccaaaatgtttaaggatgtcaaacaactcaatagcaaaaaaataaaaaaattaaaaaaccatatttaaaaaatgagcaaaagacctgaatagacatttctcaaaaggagatatacaaataaccaacaagtatatgaaacattgctcatcaataaccatcagggaaatgtaaatcaaaatcacaatgagatatcacctcacacctgttagaatggctattaccaaaaagacaaaagataagtgttggcgaggatgtggagaaaagggaactccttcctcgctgttggtgggaatgtaaattattactaacattatggaaataactcaaaatattaaatgtagaactacaagcgggtccagcaaatccactacagggtatatattcaagggaaatgaaatcagtatgtcaaagagctatctgcacttccatgtttcctgcagcactattcaacaatagccagaatatggaatcaagctaactgtccatcaacagatgagtggataaagaaaatgtgatatacatatacaatggaatagtattaagccataataaagaatgaaatcctgtcatttgcagcaacatgaatggaactggaagacattctgttaagtgaaataaaccaggcagggaaagacaaatatcgcatgttctcacttatatgtgggagctaaaaaatttgatgtcattgaggtagtaagtagaatggtgattaccagaggctgggatggatgggtggtgggaatgaagagaggctgttaatgagtacaaaaatacagttagatagaaggaatatcatagggtttgagagctatatagagacaaaaaaataggtaagtgattgctaggaaagcgggtgggattgagtactaatggttatggagattctcttttgggtaatgaaaaagtcctaaaggtaattgtgataaaggttgtacaactctgaagacaaactaaaaaccattgtattgcacactttaaatgagtgaatcatatgatatattaattatatctcaataaagctgtttaaaaaagaattctgagtggaattggccagatacaaaaaagactaagatggcaaattttatgatatcttactccaattttttagaaacataattcagatcacgtttccctaacaactctccaacagcttcccatctccctcagaatgaaagccccaattttcaatatagcccataaagtcctacacattctggcccctttccctttctggcctgacctctgacctcctctccgctctgctccagctcactaggcctcttaagttgctctctgaacataaagaggcaggttcccccagggcctttgtactttcttctcctccagagaacgtcaaggtaagttctctcacttccttgagctctggactcaaaaattcccttctcagcgaggacgtccctgaccacttattgtaaaactgcagctccctacagccccccacccacaacacacacacacactcttcatccccctttcctttttaatctctattttcaccttctgtcatcctataattttactttttgcctgtctctttccactaaaatgtaagctccaaaaggagagagatgtttgtctgttttgttcattgttggtatctctagtgcctagagcagtccttaataaacatttgttggattaataaagggagaccactgtgggggaaaaaaaataaaagaaaataaaattttagctgaagaatgcaagcccctttaaattatcaggcccagagaggcattagaatgaaaaaacagtcccgtctcactcccggtctgagctggataattatctcttaaagcccacctgctatatgggctctagactggaaccaagaagccataaaatgccatatgctggacacgataactcataccctatgagttacagtgtacagccaatcactaagcaatggtatctctgtaaaccaataacaattcctgaccaactttgtctcagcccactcttccccttcgcctttaaaaacctgcttgtaaccaaggctgaaggagcactccccaaggcaactgggaaatgagtcctgggcagctgtcctcattttggctgaagtaaacactttaaattataattttgtgccccagcctcttccttttaggtagacaccactattcaatgacatcaagatctgaactgtcctacttatcccaatatcccacccctaaaaagaaatgtaccgaaccataaaaagcctgaagtactccgacttacagactcctgtattagcatcctaagaattatattaccctcttcaatagggagtagtatttttcatatcaaacctagcctgagaacaactgagattcaactaggaaaaaaagaaaagaaaatccattaaagactgagtgatttgaactcaaaaatatccatcatcacttgctaaatcatagacagcaggttatttccctcgactttgctgtgcagacctgtagtggctcaatttctgccataataaaggccgtactagaaagagcaatcctaactaagcgcgcaaggtaaacatcaagctggggccgtcaggggcggggaaacactttctgaatggcggaagctccgagagacgcctttcccagctgctccagaggggaaaggaaaagggagaaagtctgtttttccagaatctcccaaacacagcccaggggcctgctccgcgggcctaagcgcctccacgtgtctcagaagcctagcactatagataccccggggcacggagctgggaaaacgggaataggaagacactttaccccgagaagatccagtccaacaggtcttcttcagccggatgactgtggagcgccaccacaagcagggcctgcaacccaggcatccaggctagacaccaaatcagcaaactttattcccgcgctgccgagtacaagccggcgcctccccggcgcacacagtacacatcagctccgggagacctacccgacccgcccctccagcgccgtccccgcccccgttcctgccccacccctttccccgcccccggcccggctcgcctttctcgcggcgctgcaaccctcccaccacagcccatccagccccgcccagcgcgccgcggtgcgcatgcgtggaggccctcgctgccgctgagcacctcgggaagtgtagtctcttcgcaggtgcggctgggcagctagagtcctgcatcccggtggaatccggagaagtgagaacattcccgccgcccggtcctcattcccatcttcccacctgtccagtcccctcgcactcccgctgcaccccacgcgccgggcttcagtcagagagtgcactgaggaagagcggagaccccctcttcccctcagcaggctgtgccgggggaggcggggtccaccgcccgccccccgccgtcgctctccccgcctccccttccctcccctcctggcgggtgcggggccggtgtccgaagtcaggcggcggcccccgcagcggccgcaggaggggcggctgcggtgggcgccgcgggcgatgcccctgcccggctgctccggcggggggcagtgcgagcggcggcggcgggggaggaggcggggggcggcggctgcggcggctgcagcagaggggccgagagctggcggtggcggcggcggtggtcgtgaagggcatcggcggcggcggtgatggcagagatgatgtgagtgcccgccggctggagacctggggccgcggagcgcgggacgggcggcggcggcgtgcgggagcggccccgggggcggcggagggatgcggggagcgcgggcagagccggagcggcggccgccaaccggccggcagtggctggagccccgcgctgcggcgccgggggagccgggcccggcgtgggggtcgcgggcggcggcggggcggtcaggccgaggggcgtctgcgattgttctcaacacccctcccccaccccatcccgtgtgtctgtttgttacttgcagctgaagatggaaagagccaggcgaaggggaggcggcggcggccgcggccgcggaggcaagaatgtagggggctctggcctaagcaagagtagactctatccccaggcccagcactcccactacccccactacgcggcctcagccacccctaatcaggccgggggcgcagccgaaatccaggagctggcctccaaacgagtggacatccagaaaaagaggttttacctrgacgtgaagcaaagctcccggggccgcttcctaaagatagccgaagtctggatagggagaggccggcaggacaacatcagaaagagtaaactgaccctctccctgtctgtggcagcggagctgaaggactgtctaggggacttcatcgagcactatgcccacctgggcctgaaaggccaccggcaagagcatggccacagcaaagagcaaggctccagaaggaggcagaagcactcggcaccctccccaccagtctcggtggggtccgaagagcatcctcacagtgtcctgaaaacagactatatcgagagggacaataggaaatattacctagacctaaaggaaaatcagcggggtcgcttcctacggattagacaaaccatgatgcgggggactggcatgataggttattttggccacagtttgggccaagaacagactattgtcctcccagcacaaggaatgattgagtttcgtgatgccttggttcagctgattgaagactatggcgaaggagacatagaagaacgaagaggtggagacgatgacccgcttgaactcccagaggggacttctttcagagtggacaataaaaggttctactttgatgtgggctctaataaatatggaattttcctgaaggtaagtgaggtgagaccaccttaccgtaatactattactgttccattcaaagcttggacaaggtttggggagaattttatcaagtatgaagaagagatgaggaaaatttgcaacagccataaagaaaagagaatggatggcagaaaggccagtggtgaagaacaagaatgcctcgactagagtgaaattgaactccatcaggcaaaatttaaaatcacaaattggctaaaagtactgatccattatcctttgaagaagtttttcctcttttttggcccgttgttattagtaatacctctagtagttgatacttcaggaagtctgattctcatgttatgttacacatagatcactataattcttacgggaattccaaccttcccagagctaaatagtttagctgcttcaactgctccagactattgaagtatgcaaatcagcacaaaatgtgacattctgacattctaaataccataactaagatttacattgcactatgacataatcccgaaaaaagatacatatacttaaatagaagtgtgactttcccccaaaagtatttcaattctacttcattaaaagctgctaagcttacctgtagggcagttaccacagaaacagaaattgacctccggtatatataaatatttacttataaaagtacaagtagacgtatattgtccgttgaataactgaatataccatcaaaggatcaaatcttattacctaattaaaccttaaaaatataatgtcataatatttcttaagaatactatagtattctataatttcaaactttgtggtaaccctacattttatagttgccatatcaaagccatgggagagttttaattcgttattctaagtttagttacaatcccttctttacctctacttaatgttccatatatttttattgactttccaaagtttcaggaattacttttatgtcacattgagtgggaggcttcatccaatggctttgctatggaaatcttggtggtgtagcttttcatgctaatttaaagattgcaagaggtttcttccccaaaatatatcatggactcaaggtgttatactttatgcttcttctttaacactctttcagaagggttggtgtaccaattaactgatataaaaatatacctgtaataatatattttagtagcacttttgcaattgctacccttaaaaccatgtcaacacttccaatataatcctgwattttacaggtgttttaattctggagggggtggggattttttttttctaaaaataatttagaatacaaatttccagtctgagaaaaatattatttgaagattggttataaatatatttgaaaggaaaattcaggcattttccaaggtgctctttctgactttacacaagactcacccatttacctgtattaaaaattactttccaggaagtgccacagcaatttttcaacacctaagcaattttttaaayaagtggatatagtgttatatgtgtaccaacccatcctgtattaattgactgaaattacatctattcagctatattttcttctgaatgaaattattgtcttttatcttggctttattcacctcccacacaataagtccatctaatcatatttaagagccagaacactgatttyaacccccaaatatcactctcattgatgagagctggctgcatggattcaaatcagaatgtagctcttcttttatatgctaaaagtaatttaaaattatatcagcgatttttttcttccagagttttgtcccccaatacctttacgtgaggtcactaagaaaacttgatggtatgaattaaaaaaattaatttcattggtttatgttacttaagaacaagcaatcagtaaccccgacatatatactagtgttggtttgcagattgtatttcacatttcctctagtagcgtgaaggaatctcattagttcattataattgtggaccatctggatcactatggaacaactgaaggttaggagataatgttagtactagagctaatagcacatggtgggtgttgagactctaaaagtagcaaggatttttaaacagtcctaactgtaaaataactatgtaggcttgctaaaaaagtagtttttggtctatgaaggaatgatgtgcacttgaattactgtactactgattgttattgctgcccatcatagtgcctattaataataatcaacctgtcagattttggcaaactggagctgtgaatattctagtatttgattgttcctatcgctattgctatgagtgtatacactctcttaaagtcttcctttctaaaatatttatatccattaggtctaaatgatttccttttaccttttgggtctgataagatttgggtatgtgtctatatctatatatatacacacagacatatgtatatacatgtatacatatatatgtgtgtatacatacatacaataccatgtcagacttaaagataaatatctttaactcattgtatataaacattattaaatttagttttccattaattatttaagtaaagaattagttaagcagccagattttctactttgtatgtatacttcaaagtttttaccatctcaaagctgcagattaaatagatgcatatatactggcaattgagtatactctaaaattattaagccttctgccagtccttttgtttcatttttttcatagttaatcattcaaaaatgagatgatgctatgactttttgatacttaaaattcccaagaattcattagccgtaattaaatatgatccagttcaaaactctggtcttaggacatgtattgccatgtatcttataaaataagctactattcttatctgtgcaatatgcattttatttattgtcatttgtaacatacatggagctgcaagtgttcatggtatccttcaaaataacagaatccctgccttgaagacattaaactcttaaggcaactggaagttagaagttaaaaaatgagcatgaaagttagtaaccaaaagtactagttcactgtataattctaaaacactgatgatgtttgcacctaataatccaagcataatgtggtacaggctcaaactgtagtaatataagctaatagtatgaaatttggaaacgggttcctcttgatagttggcagtgtgctcctagcaatcgaaagcagcactaatctgttgctttatgcaaaagatgcaatgtattataaagatattaaagttcctctacattttataattttccttgttaaagccccagactgccatgtccctgaaacttgagtcaaacacaagcttatttgcactaaagagcatggccaaaaaaataaatgacagggtggaaaagctagttggaacctcttgaaataattggttctaatatgagaatttcacatttgtctatttgaaagctgtatggtccaggcagacaatctgtcagttcactaatttaataatgcactttaccttttgtatatagaagatgtacatttatgccacttgacaggtgggatgtgtttcaataactatgtagctagaatctataaggtgatcccgtgcatgcatatgtttgtgttggaactgttgttgtaacaggtttccattaaatcagtgtaatggagaagggtagaagatgcttttgaaacaaatcccagtatatttaacaaagaattttaaagtagagttcacatttgatgtcttaagaactagaataaataaaatactatttctaacccaaattcttattacagttgagactatatttagttgagattccccacagtgccctgacagttaatttggggaatttgtctagacaaaatttttttcaatcattgtttcattgttgatatgtgtttaagtaatgaataaatatgcagtacataatattatactcaaattaaaagtgtggttagctgatgtggcattatttaaagaacattcagactaaagaagtaaggtttcaagttaaggaaatgcaaggaacctatgaacagtcactaacacaaatatgatatctcagaattcacagaagtactaaccttccccaactaaaaagggtattgggggatttagtgkatccttccatcttaaaagcttcttaagatgtacatttgaaaactagataactgttgcttaataatactttactgagaaacactgtgtactaacaattcatcaagagtgtgctatatttactgagttcattttatatctatagataagaataaattatatagtcatcctaccttaatataatcatgtatttatattgtaattttgcaaatattttccataaaataaacatttatctgagctgcacaatttgaagaggatgaaactggaatataccctcagatgctcattttaaataagcagctaccattgaaagctgatgtatgtattatcattcctttaaatttgggtttatggtatattttaatatttaaatgaataggacttaatttgaattttaagtggttttctgaaaataattttttcataagtgtgagctttttttccttcttatctccaaatgtttttcattggaatatttatgaaatcctattcaaagcttkatgtaaggggtttgcttagtcaccacttagtttgaagtctgtctttactaaaacaccaaacatctttgacaacatacaaagaggagttaacattgattctatgcctacagaataatacaggtgtaatatttatcacggcctgaaaaggatcttaaatccttctgaaatttccttaaatatttcttgaatttcaaagagaaatggtggctaatggctagcccatcagagaaaaagaataagtatgttaacatgctgttgaaacaactcatagtccaccatactgtagcaatgaagttcagggaaaatgtgtttttcccaacttaatatcatgtgaaaattgggttttcagatcacagtaactctgtcgtaaagaaaatatacccaaatttagtaggtagagcttagaaaaataatataagtatatattttcatgtataatggaaaaaatccgtacttgttattaatttgacatgctattttaaatcatttaaatttattttggtaatgagattttaatcaatatttttgaatagggaaaaacatacatatagtacaaaatggaaacagtacagatgggtagagggtgaaaagtagcaaccaatgttagcaatttcttgtgtatccttctagagttactctgcatatacaagtatatgtgtatgtatrtatatatatatatatatatatattctttttaaaacatacagatgaaaacatattatatatactatcttgtacctagtagattcaatttcagatctgtcattttaagtgacttttttttaacttagatatcatacttgagctagttaacatatcacttaatttgaaatatattaactataccaaggaaatatcaaggaaattttgaatgaatcccattggtatttacttaaagtgcaaatatatgtgtattttaaatatacaaatattcagttcatcctactagtttcctttctctcttcctagccatcttgccttcctgtattcccctcacaaatatattggtctttttcctgaagtagtgcacttcaggagtgccaggatattaaataatttaaccaagtgttatcttaaaccgtattccctaatgaaaaacacccatatttaaaagctttaataaagtatcacgttcagtcaatttttactaattctgttactattatctttatccaaagaccttgcccttataagagcaaatgagtattagaactatagtaaaaaggtatatttctgttgaaatactttattagcatgaagcctttatctttatgagaaaggtataatgttcatttagcaacctcatcaaatccaagtttaagcaaataggtaactctagacccgattgtttaaagcattgatttttcactgaaggaccaagagtctgtcagtagtcttgggaccaaaggcagtgggatgatttggggaatgagtaaaaactggagtgctgtgaggttacaagtacagctaaactgtctctctggtggaagaatataaaatggtcaatataattttttaatgaagttagcattattactagtcctataaacataaacaaagctgccttaatagttttgtgagcacccgtccccaaaaatcataattctcttttcattcccatcaagagtgcattttgatatgacttttctattgaccaccaagaaaaaattatctgaaaaatgaaagatcccatacttgagtcctgaaagatgctatctaaytatgaattaaagcaaccagagtaaaagatccaatacaattgtaaatatctttaaaaatgtgggttgaggaagaagaattttttcatggattggtatccgtgaattttatgaacatgtcataaggtttaaaaatttaaagcattgctttaaactttagaataataactctatatttggtagcataatgtcctgtttacaaaatgaaagaggtgttgttaaaagataagatcctcttaaacatattttaaaagcataaaagtttgctccctttattttcatgctgaataattcattataaaattcattaaaaattcatctttaggaatgaattttgcttaaatttaggctaaagcatattaataatttcccatccttaattgaagagcttcccatgttggtgctttctggtaaattatatttttcaaactttatgttcttttgaatatttcttatgaaaaattacatatttttattgaggccagtgacatccaccagtaaataaaaacataatgaattagtgctgctatagtgaagttactttgtgatatgaatatgaagaaaaaaactcatttaaatggaatatatactttcctgtttaatattgtttacttatttctgattaagtagcagttctctgtcttcacattttaccctcttaaacttaatttttgcaaaaaatttttctattcggttttcattttcctagggaaagggaaaaattgtccctratgaaaagtgtttatagtatttaaaagagttgctcaaagtgtaagactggggaaaaaaagcttatgttgttttttttgtctttatcaaaataatggtataaatctgattatcttacttgatctgattaaagtcaggattacttttatcagaaacttttatattcaaaacatatttagtattttatttttcttaaagaaaatggttctcttggataatacagaaatcttcaggattttgttgtggattcaatgaggttgttgcctagaggtggcaaacagaaaagaaaaaatagaaaagagaaagacagtggctgattattttgcttgtctgtaacgaaattcatctaagagaaataagtcattctcaaaactcaacctctgtttaacctttaaaagagcatttgagaaagaataataagacgtaattctgccaaggtgcggcctgaccctgagtaaatcattcaacttctgttggatgatttcctcatgtgaaagatgaacagtattgtgctggaagctaaggttccctcctactctaaatgtttaaaattctgtatcagtggactgtgaaaggaaaaatagatggataataccagagttggaaagtgtgagagtttatctgtttacattaaaaacaactataatgatgcagcaacctgtgatgatacccaacggaacaatgcaaaaaaatgtcagttttataatatgtatgtatttctttagccacacaaaataaaattttgtttctagtccttattaagaccaagttgttgtatactaactacgtaactatcctaaactttaattttttaaaaggaatatttttaaatattgattatttcccatctccttattatatcaaatatctcattatttggaaggagcattgcttttttctgcatattctgtaatcattttttatattctgcatggcaaaggaattttacagattaatatcacttcctgaaatgccatttttcctaaaataaccatagatcacattgccaaataatactgcagctgtcatggtagtggtccctactgtcttcgattcctttttgttgatcctgtccaatatcctatgctagaaataatgatgtctgacaaagaccatcagaaaggatactgacctgtgaactgtatggttctgttttagaggacttgtaactactagggtatgcaaagattaaacatctaatggtttgggggttttttttagccttaagaaacgtcaaaggatggtgattggaaaagagaagaagcagcacacaagggttttgtcttagaagcatttattttatttatttatttattattacttttttttttttttgagatgcagtctcactctatcgcccaggctggaatgcagagaagcatgtatttaagcaccccagtcctcagctatgcagtgccccgccactgccagtgaagaggcttaaaaaagagtgacatgtttctccctagacctctcttttagtgcctatttgtttatcagagactccatttaagggtaactgaagtgtattttcaagtgcatatgcatgtgtattttgctaatttcaaaagtttctgtgcacataaattccattacggaaacattccatatgataactaatctttgccctggtggtggttcaaaatagcaatttggttggtctgttttcaacaaattctatagaatgaattggctgttgttagaaaatgttttctctcttttctcctccctcttctcaaaatagcagatacattttaaatccttgattgcttctttttcagtggtgtttgaaatctaagtgggatttgagagaatagtttagtttggcagttctttacccttgccattttgtagaaactttcctcagcttcccatcagatattctaagcaactttaccaaaagaagtcacctacgtgccaaaactgccgagcaaaataaaacaacagagccatagaaaatgatgtaggagtaaggataaagatatatacagacacccaaattcacaacattccttatcatttgctaatttacttcagagactgttgtattttatttcttggttcttcaaactagcaatgtggtttattccaatgatttgtcagtctagaatgtcaatagaacaaaatcttttgctgcttagtaaatgttccaaaaagggtatctcatgttataatcagttgtaaaaatagaattctaaaattccattcattataatcctctttccttcttccctcctgtacactgtaccctattggaagtgggtaagggcattaatttctttcactatcacatggacccactccatcctatttatttgttcagaagacaattgaaacataatagagaccagagctgctctttgaaaatctagaaattgccctgtgagcttgatctatagactgtaagaaagaagggttactacttcactgaactgttctccacgctcttgccagatttctatatgacagtttaggatgaatagaaaacagatttgacttgggatgacatgaactgaaaggtcagttcctccagcttttcaatacacagtgcatcttcagaaaatatttttgacgagcatgattgacaggtaatttcagaaatgaatttaggctgggtgtggtggctcatgcctgtaatcccagcactttgggaggccaaggcgggcggatcacttaagttcaggagttcaagaccagcctgaccaacatggttaaactccgtctctactaaaaataccaaaattagccaggcatggtggcacgctcctgtaatcccagctagtcagaaggctgaggcaggagaatcgcttgaacctaggaggcggaggttgcagtgagctgagatggcaccactgcactcctgcctgggcaacggagtgagacgccatctcaaaaaaaaaaaaaaaaagaaagaaatgaatttggtccctagagaagtttcaccatgaccattttaaaagagcaggtggtaagaaaaggaagagtcaattaagatttattagtagtaataactattgcttatggaccacccactgtatactagacatagctgggccccttatagctactattcctaatccttataacaaccctattatccccattttcatatgattttccagaggtttataaactggttcagaatatcagaactaatgtatttgaacccaaatttacaccaaagccaamgattgtgcccgttcagttaggccaaactgcctttcagatttcctatgaagctgatccttccaactctaataaagcacagtctacccccagccgccactatacatctgcctcagcttacttggaattattttatccaaaaccrtcccctatatgtgggactagtctcaccaaagagacacttggcttatatgaggattccattggttaaagttggtgctaataaatacaagttatttgatctttagtttacagataaaacctctaatcttgatcaactatttccaataaactttttaaagggatcataactttttaaagggatcagatcataagaatgtagaagagcttcacagtttcatccctaagggcagagaggagacaaattactattcaccatgggtctacaatttcattttcatgaaccaaaaacaactggttacgttatcttagtttcaaaataaatcttatcaatatttttggaagttttattgatttcttacaactttttcctgccatcttattgatgtctcacaacttttcctgccatactcctccctatatcattccactcattttcatatttaattaccaaatttcctcctctttctcttaattccagtacaataaacagataattctccatttacagatacatatttttccccattactatagggcactaattttcaaacttcagtgtgaatacaaatcatcttgatggtttgttaaaccacagattgctggccccagctcagagtttctgttcagtaggactggtgaggtggggagaagaccaagaatatgcatttctaacagtcctaaggagagtggatgctgtgatctagggggaccgcactttaagaaccacactgctgtcagctgatgagattttaccttagctacagaagatagtgatggaaaaactcggtcaaaacaactagggtatctgggtagaaagaagactgagagctactccttcttctgccttgacaagcttacaaatcttgaaacaagcaactttttaataagttgaccagagttttgtaaaaaattattttcttcccttttgaataacctttctgattccctctcatttttcaacagctatcttgagagaaatctgataggaattaacagttatgaagcctcatgtgaaaagcttagcttttaaatatatggagactgatgcatatttttaatttattttgtaattatagtatataaatcttggtaaagaaaagtgaacaatttctctacctaagaattattaatacaagtttaatgactattaaatattaggacttaaaagaccttggaattaatttaatcccttagttttccattttgtgacatacatcatgtagctcaaattgttcatagttactagaatacgctaagtaaacagaatttaaaggctagagcttaaattgctgattatctcaagatatataaatggtgagaaatatactaatttcttctaaaagcatatcgcatttttaccatcttcctgtatcctctctgtacgtatagaatggaggaactatatactgtactgtgtttatagtacctttttttgtcttcaaactctgcctcccaggttcaagcgattctccagcctcagcctcccgagtagctggaattacaggcgcgtgccaccacgcccagctaatttttgtattcttggtagaaacagggttttgccatgttggccaggctggtctcgaactcctgacctcaggtgatccacccgccttggcctcccaaagtggtgggattataggcatgagccaccacccccagcctacagtacttttctttagatcagcaattgaactcactgctttaaaattagagatattgggccagacatggtggctcacgcctgtactcccagcactttgggaggccgaggcgggtggatcacaaggtcaggtgttcgagaccagcctggctaacatagtgaaaccccatctctactaaaaatacaaaaaattagccaggcatggggatgacagagtgagactccatctcacaaaaaaaaaagaaaaaagagatattggctgggcatggtagctcacacctgtaatcccaacactttgggaggcagaggcaggcagatcatttgaggtcaggagttcaagatcagcttgacctacatagtgaaaccccgtctctactaaaatacaaaaattagccaggcgtgttggcaggctcctgtaatcccagcaacttggaaggctgaggcaggagaatcacttgaacacaggaagtggagattgcagtgagccaagattgagccactagactccagcctgggcaacagagcaagactccctctaaaaaaaaaaaaaaaaaaaaaaaaattagaggtgtttcacctgaacactcattgagcccattttctataactaacatatttttaaataatttattctatgcttgacaaccttgtagatattctgtactataattaatatgttgatcaaaattaaagccatatatatatatatatatatatatatatatatattttttttttttttttttttttttttttttttttttttgaaaaaaaatctccctctgtcacccaagctggagtgcaggggggcgaactcgggtcactggaaactccccctcccgggttcatgccattttcctgcctcaaccccccgagtaggtgggaatacaggggccccccccaacgcctaatttttttttttttttaaaaaaaacgggttttcccctgttagccaaaaagggcttgatctcctgacctcgtgatccgcccgcctcagcctcccaataataaaaccatattttatgtctaaatctatataatatctataactatatataaaccttaatgctgtcattctagtggattacattgtattgaagtattaaattaattcatacatagacatttggcagttctgcaagttcattgacttctcttaacagctactacctttgaatgattagcactccagaacactgaatgagttcctaattgtgaaaatgattaactaactgctgacataacagagatagtcacaaactcaaatggatcattacaggcaatgtaacttttttaaaaattctctattcatttgcattatggctacaagataaattttagatttaaaaaaattaagtgttagaattatactttgagtaggcttcaggcagaataaatttatagtagacttcagctcaacattagggcaaactttaaggattgcatgacttctctgctcctggaattaattatttaggcacgcactgaatgtgggatgcataaagggaattaataaatcagaaaaggtgaattgttatggctcagattcttctccactctgagggattcagaatttattggaaataatcattggaacttttgccttcaggccttctgttaatttactggtttggataaagaagtgtgatttcaaattttctaatattattgtgaaaacatataaagaaaagaaatccttcttcccatcctttgttattgcaaaacaacgtaagaactaggttttaaattttcatgaactttattaattaaatgactagttaaatagaatttatgaaatttattctgtaagattaagtctaccttttataatcttcaaagaaacttttcactttcaatctgttttcaaaaatatgaaggaataaatttagtatttatagtgctatttcaaaagtacctgctgtcggtttatttagaatgacacaagaggcaatagggtaaattggaaaaccaaattattggatattatcaaattttttctttataaaattcacattaaattctgtttaaaagtcgaaacatctataatatctttctccattttttcttgcactgctaattaaggtggaaagaagcaacatcgtttgctaatttcatcttaaattttttgttttagacaacaagtttccaagtaagttcattattgctacaaatgcaatcatatctaaattcaggacctagtgaattcatatgaaactcgattctgcctggtggtgtccacttttttcttgtcacttcttctaatcatctgtgctttcttgtgatactgtaacatttccagatttcaagtgggcaaatagtagcttttatggagagatctgagtgatttaaatgttatcacacaaacatctataaactatattgcacatttctaaatatttggctaagcaaattttattcctccagataaatattacataccctttatatataatagatagatatagatatagatatataatctcttatagagagtatgtgtaatatatattaaacatacatatattgcacatgcatatatatacaattttttacatatatatgtaaaaatttttaaaagagatcccaatcctrttcacctttttcttgtccctggagaagtagtggtaaatgggtttcatctcgcttgtatttgcaattgattggctgccctaaagtgctgtgtttgtatctacagggagagggaaaaaacagtgttcatgccaaatatttgctatttatcattcctgctttagagacataaaagttttcattgtagctctaaaaatttctagcttagccagatagctggcagttgcagcacaaactaccatgtgactcacctggaatgtgtctcttctaatatgtgaaagagattatttgaaatctctttccttttttcttttttcttttgatcatctctcctttaaaagagcagagcatctccactatgcctctgagaaactagaatgatggccatgatgatgtcatcaaagatactcttaagtattaaactctacatttgcttctaatgagttctaacccccattaaaatgacagcagttgcatcctttaaaatttagtccagtgattctcaaacacaagtgtgcaggtgtattaaataaaaatacaggtttggtccccatcctcagagattctgatttgattggttcaagagaggggttcagaaattggcatttttcatcgtcttactcattctgatacaagtggtctggaagccactctttgtcattcacttagactgtggacttgcgttctttctttttttttttttttttttttttttttttggttcttgttagacttgcattctttcttccatatcgtttttccagcacaaattgcttaagttttaaatactgtcagtcatgacaccatggaatgatgatttttttggttacaatattaataagtagtatccagggctcactttattttatttatttatttatctatctatgtatttatttatctatttatttatttatttttgagacagagtctcactctgttgcccaggctggggtgcagtggtgcgatctcagctcactgcaacctccacctcccaggttcaagtgattctcatgcctcggcctcctgagtagctgggactgcaggcatgtgccactgtgcctggctaatttttgtatttttgatagagacagggtttcaccatgttggccaggctggtgtcaaactcctagcctcagctgacctgcccgccttggcctcccaaagtgctggaattacaggtgtgagccactgtgcctggccttggtttgtttgtatgtttttgtcgttgtttgtttgtttgtttttgagacagggtcttgttctgtcacacaagctggagtgcagtgacccaatcacagctcactgcagcctcgacttggcaggcacaagcagtcctcccacctcagcctcccaagtagctgggaccataggtgcatgccaccatgcctggcgaatttttttttattttttgtaatgacagcatctctttatgttgacccagctggtgttaaagtcctgggctcaagcatttctcccacctcagccttccaaagtgctgggattacaggcatgaggcactgcacccggccagggctcactttaaacacagagaggctaaatgcataaatccaggtgtttaagattttgtatgctatcatattggccagctttctgggcagtgattactggaaatgccagtttctcacccgcctcctaaactcaagttctgtctgtctggtcttacttgacatcagtccactggtttcatactccctggatttcacaaccaaacattcagagtcttcagagccaagcgactggtctttcagtctcaaaagttgaccctttacgtctcaaatgacatttctcaacctcttttttttttaaaatatatatgcagtataaacctatcatttatcaggagtagaaaaaaattgccttagtcaatctagttaatctttgaatgcctcacttctggtggtggtgtgtttgtttgtttgtgtgtttgttttcaattgtggttaaaaaaatgcatagcataaaatttaccatcttaagcatttctaagtgttcagtaatgttgtgttcagtagcgttaagtatattcaccttgtcatgcaaccaatctccagaacttttttgtcctgcaaaactgaaaagctatatccattgaacaactccccatcttcctttcccccgcaagcctggcaactaccattacactttcttctcaaccttttctttaaaataagcaatatgttttcttaacctttctcccatccataatgggtttacagttattgctatttagctctccaagtataaagcttatctcctgtattgttagaattctcacatgcaaaaagatttacaattacaaagcaattgtgctaataagatatgcttataatctttgagtgaaggtattttatcctggaagcttttccactgatttacagggggaggtaagcctttattcctcttgagacctatggatctcactttatgcttcctggctggtttggtattttatttgtttgttgaaggtttaagtttagagttaccagggcaattaggcttaaatcctagaatttccttggctttttcctgtctacattctaagactgttttaccataacactttataacgtaagtagtagattggaagtttttctggaatttgacaaattagtgtttactaaatgatttaataatctttgcttattcagtataaaatggtttacctttaaacagctttaatagaaacacaatttgggaggaaataggtaaaaaataaaaatgtatttttctgcaaatgaactgtttcaaatgttattttcaaaatctttggcagtaagaaaatactcaacccgagaaataaattttttaaactcttattctgtaaaagtttttcttttgaaacatttctcttcctctgttattaaaatttttttaagaaatcaataaaagcttaaagtcttataagcaatacacatctaaataaccaaaaatgctataattatgagtatgctgcttatgatcctcccatagggaaaaacatctgtcttttcttggcctaaattatttcagagctagcacaaaaactgattgatcatgactcttggataatgataactaagtcttcgtttcatgaatttaacaatttgtatcagtgctaccttatgagtttttcagaaaaatgctatttgtattgaacyattttaaataattccataatctggaataattcagatttttttaatgatctgctgcaacatattggtattattgaatctcattttttctttgatttccattataaaattagaaatattttctgggagaaaaaatactccttgagttgaaaagatttagtgaaggagttgtgttgcagctgattcagtaatgttccaggcaattaacctttttttgttttcagcgctcctctcactctttaagatctttcctcattgatcatcataccaccccaaaatcacagaagtttatttaattccatgcgttcctcagagcacgtgatgtcagaacttaacctcccctcaattttcagcttctaacctaagctggacactaatattttgccagtaggaaccttttattttttgagacagtttcgctcttgttgcccaggctggagtgcagtggcgcgacctcggctcactgcaacctccgcctcctgggttcaagtgattctcctgcttcagcctcctgaataactgggattacaggcgcccgccaccatgcctggctaattttgtgtttttagtagagacggaagtttcaccatgttggccgggctagtctcgaactcctgcctcaggtaatcctcctgcctcgtgcttccaaagtgctgggattacaggcatgagccgccgcgcccggccaggaacctttatatggtacaatgaattccagcctgaaaattccccaagttctgagcctttacttcatacatatttaccaaatatatcaattattatattaaacttagaatgaagaatgactgtaagatttataatgactaaagttagtttgcattatttttcttcaagcgttattaaaccgtactcctctttaagcaagtttttgggtcactaggtaactatgtgatttggtttgttgatcaccatttattgtttgactcactttttcaaaggcccaaatattatatttaatgacataccaagctctaattcaagcagtgccctctgttaaggtgatttgcatctgacttgaagcatattaaataaaatctacattttatttgatgcaaatgttttatatttatataaaaaattaatcttgggtaaacacaacttgattcttaaattagattcttaataactcaattctaaatgattacttattaaatttgtcacaaaataactataaagtgaacgtgaatgctacattactcagtatatctatgctataattaataaactccaaaaattagttgtgtattatttggactactatttcaatcattcagaaatttgttttaaaaaatccttgcagtcttgctgctgacttcatagygtgcagtagtgtgatatggagatgatgcactgtctttcagaagccttggctctatgccttctagctgggcctggggcaagtcatttagcctctgtggaccccagcttgcttatccataaattgagggaattggatcagagtgatgatctctaagaaccccttcaatttctgtatccctgaagtcagtgaaacttctcttaaagttagtttctactttcttctttggccttttctcattttcttcccactccccttggtttcgtctctcatctgacatttattgaccatcctttccttcttggcatggttcatatttagttatggccactttacagtgttgcagtatgctgcttctctgcctaatttgcccagttcccatttttaccctgccattttaattttacatataaattatcttggaactaacacaaaaactagttgatcatgatatattatatatataatcaataagacttatcttttggccctgtacacaaaagttttaaagaggcaattcttccagttccaagagatttttttagacacacaacctaaaacttgttggagtatattttaaacttaagtttcccatttgaaaaatcctaactccttaacttgcatttaagtttaaaagcagagacagtttcttcctcttttgtattcccctctccaccttgcactgggctgattacttaaatcatctcttttcacttaatcaccagcattcctgttcctgttttgtctttgaaatcttgttgcttcagaatcacggtacttaacagacaaatctaaatggcgacaattgttaatgaaagcgatagttttaaaacctaaccaaaaatgctatgtcatctttatttcaaagatgactcacaattaaaggatgatttgttgcctgcacaccctaaattttatttcagaaatattctttcccttgcttaatggataagtgatgttgttcctctactcattcaatggacattgagtagctactttttgccaggttctgtgctagggtctagggatacaataacttaggaaagacaaatatttcactgccattagctttaagtgtgccatgtccaaagttatttgattcaaagcagcttttggagcctaattacagtatcattttgttcattcaacagatatttatttgattatctgccatgtgctagacagtttgttggtacatatggaagtgtatttaaagctatctagtataaaatgctatgcattatttttcccttatcaatttatcctttaaatatgattatctacatactgtcatagtgctcaaaatatatttcattgatgcagatttagagaaatacaatgatactattttaaacaataattctgtcttcctcattccaaatctgccttgatgtcctagggtgaaaataactattctgtttcatttcatgtgccattgtgttcaagtggtaatgactacctgagtcctaggttggagatgattgtgaagctccattcaggcccatggtaaaagactgcgatgatttctgtatgttgatggggcagttagatgaggaaagcaaggagtagctatatacatgtcacatgttagcccttcctgccccaggcttttgtattcatcatcactaattttatttcactctcattgcatattcagtatattcacaaattctttttctcctcatatgtttggattgacaaaaatccatcagtgttctcagctatgatgactatctcaccaatgtcttagccaaccaaatgagatttactaacacctctgtgtcagtaaatccacagttgtaataattttcactgtagagacattgcaatgaagacaattaatagataaattcagttaatcatgagtaccaaaaatttgtcctgaaagttttccataactggtcattaattatgaaatattttctaattcaattaaatataaaaagaatgtgtaattttaaattataataatttacatatacgttaaaatcattttccaagttcttttttctattatacctcattttaccctgatgaaactcctgatttagattagttcaatatcactgtccccacttaacagatgaagaaaaccaaagcccagcaggtgaaatggtttgctgtaatcacttagctgcctaataaaaataccagggttttaacaagcccactgctcattgaagccttttatattaataataacatagaaatttaaagaggtaaacttgaaatcaaaatttggcaaaattaagcatatatgtttatagctcatttaaagagtttttttgaaatgcattctaggtattttgttgctttcatcacatctttaggctcaattctgcactcagtaaactcttggttttggccctggcagaaggcctagcaactcattggtgctcatgtctgtgcaccagctgcttgccracctcagcctctgcctcaaactctgagcctttgtcctctgtgcttaagactccctgcctgagcttcccaccttagctaaccttccagaacttgacgtttcctcacctgttaacccaagtcttgtcatggcacctgctttgcagaatagccctctaaaagtgatatcgtttagaggatttaagatgtaaaactacatttgcataataagtttggttaattaaacagcgagtaaatcttttccctgcattccattttttattatttttttattttttattttttcaagacagggtcttgctttgtcacccaggccggagtgcagtggtgcagtgayggctcactgcagccttgacttctggggcttaagtgatcctcccgcctcagactcctgagtagctggtactacaggcatgcaccaccatgcccagctatttttcctattttttgtggacacagggtctcactatgttccctagactggttttccctctacatgcttatgaacaagagataaatgaccacatgataagttagaagcagactttttcagaaacctgtttgaaaggaatgatccaggttttatgaaatcaactcaagaacccactgttcttcatctgcatcagtaccatsattacagttgttgacagtgaaggccctagagcactgcagtattctcatttgtgcatgcaaaatttaatcacatttattatgttgtatttattaaagcagaaaatcgaaataatacatgttagaaatatttccatttcaataggattaaaagcatactgttagctaggaattgctgttaagtaaatgacttcgctccctgacattcccagttaaccatggttttgtagcatcactgaggaactggcaggctaaattctgaattcttacatgcagactgaattattctggtggtttttgttgttttgttttgttttgttttgttttgagacagagtcttactctgtcacccaggctagagtgcagtgrmacgatctcagctcactgcaacctccacctcccgggttcaagtacttctcccaccctagccccccgagtagctgggactacaggtgtatgtcaccacgcccagctaatttttgtattctttggaagagwtggggtttcactgtgttggccagactggtcttgaactcctgacctcaagtgatccacccattttgacctcccaaagtgctgggattacaagtgtgagccactgcacctgtccgaattattctgtttstgtatttatggccacagaagtttcatattggctaaatctgcacaaattatcatatagttataaatataaaagtcagatcaatatggctaagattatcacagaggagcttaataggagttccacacttgccttttgccgggagaagaaaacaacaatgactttaatccacttcctctacccccttaagcaatggcagtaatttcagctctatttttaggtattggatcccctaaagttatcaggcaatctcagtggcctagtataaagtgcaaacagaacagaccttggtgtcagccagtcctgggttcaagtccaaattctgtcatttattgtgaaatttggagcagtttatgtaactgtatagagttgtgagaattcattcatcatttattgtatattcatcaatcacctactatgtgctggtcaatctttaaagttcagggaattatattgataacaaaacataaagttccctgccctcacagaacctagagtaaaccagaattctcttaaaaaagttaaatgcaaccaggtgcagtggctcacgcctgtaatcccagcactttgggaggccttggtgggcctcacttgaggtcaggcattcaagaccagcctggccaacatggtgaaaccccatctttactaaaaatacaaaaattaaccaggcgkggtggcacgcagctgtaatcccagctactcgggaggctgagtcaggagaatcgcttgaacccaggaggcggaggttgcagtggcagcgagccgagatcatgccactgcactccaggctgggcaacagagcaagattccatctcaaaaaacagaaagttaaatgccttcaggtacataaggctgttaacgaaatgtcacataatcaaagcatttaacaaatattagttaacatcattattaaktcttcccaacccacgaaatggatggttccctggaaagtataacaacattatgcaaagttcaaagggagcctccttttaccataggaacctttaggtgtagcagctgcaagggaattgggctgcttataatctcataaaactgttttcagtcaaatataaaagtgcacaattgtgcaggcaaaaatttcttgcacaggaaacaaaaagcactaactataagagaaaaaaacaatacattagactccatcaaaattaaaatttcctactcatccaaagacaccattaagaaaatgaataaactatccacagactggaaaataattgaagcatagatttattcctggaggaaatcagaacagctttgtttttttctttttttaaaaaaagagaatcattaggctgtttgcatgattgagggaccaattgctgcagcgctaaaagtattacattcacctacttcctagtacctacagtttttctcatctagatctaccatcgattttgatggttttttgcctgaaggtgtctttgggggtaatatgacaccctcattttacaagagataggaaaaatatttgtatgactttgacatcatttaactagtctttcagaacttgaactatattaagtggtacttccactgttcagtgtctgtttttcttattacactgattttgcttcagaatcagtgagattatatagacgtcattcagaatatttgtttttatccttcaactcgaagagttttctcacctctttattttcaagttgaaaacattattataagaktatgttagcgggtcatttgactctgaaaaaaatagctttttaaaggttgatcacactttaatcttcaatttcaggatagtaaagaaccattataatttaggccccagtgactgtcataaaacagcttttaccagaccaccatcttaatactgatattttcctctttcatatttgaactatatttttttctataatctagctcttagaactctattttcctttgatactaatgattcctcttgccctcagaaatgtttacatgaaacagcacrtgactgtcctttttgttgatcccaaaactttttattgttcattctagagaggcaaataatgtccttcagtgtcactaattgagtttttaaaaggaagatttgatagctaagaatctgttgtcttgtatcaatttatcatttttacaattgggtcaagatatatttatgcaatttttatgttaatagcataatagcagtagcaatataatgtgtggcttgggagtttcagagctttttaaaaaaaactaagtatgtgcctatgcttttcctttttaaccatattgaatgtgtaatgttgagttagaagacactgtgtgaggtaagaaatggcarttcaaggggaacaagaacattcgtttattcagtcaacmaatatggattgagttcctcccataggcccagcattgtactagggaaattgctcactatttttatttttcccctctaacctaaggtggagatgataatgaatagtaaaattacatgttttagatgtctttgtatgttataggtggatttgggacagcaaaagcctttggtgtgtttcacttggaattacaaaaagaagtaaattagagaaataattgtctgacttctgatgatagggtgtttttgtttttgtttttgtttttgttttgagacggagctattctcttgcctcagtctcccgagtagccgggaccacaggcgcccaccaccacgcctygctaatttttatatttytagtagagacrgggtttcaccatgttggccatggctcgtctcaatctcctgaccttgtgatccaccctcctcgccctctcaaagtgctgggattacagccgtgagctaccacacccagccttctgatgacagttttaattttgtagatgaatttggcatgacgtggatgaattctgtcaaggtcattattgttttcttctcaaaaccaatagaattttctcacttayttatttttagaattgtcaggtagtgtaataaagttatttctgtaggaaactgggaattcattggctatttgactctgaatgtaacctctttaaagctgatgaacgagtggccccttakatttgaagtggtaaggtagtcataagttaggctcccagacactggcattcaacgtgattttgaagtgtgatagaccatgtatacacttgattgtgcaccaagaggcataaggtaaaatcttgtttccttcccacctgtaagtgttaagtgcatcagtctcctttctctactggtggtgtcctgttgctccactagtagcccctgatataaaacccgtgtcctccatagataattagtcatgaatccctttccagggcgtgttgttctctatgtggtgatttgaagggagaagttttgaaatgaaaaaaaaaagaaaaaagaaaaatgctaagcaatttctgatgctttagaaggaatgtcgtgtttcattacaatgcattttaacatttttattaagatataatttaataaaatgctcagatcttagcatgtcattcagtcagatttgatgaatatgaagacacatttctgtcaccccagaaagttcccatgtacccctcctcagtcaacactcccccgaccctgacttccaaaagcaaccactgatcagatgtctatcaccacagattagttttgtgtattctggaatcccctgttaattgcatgtatttttcttttcttttcttttcttttctttttttttttgttttggtgacaggatctcactctgttacccaggctggagtgcagtgtcacaatctcagctcgctgcaacccccacctcccagctttaagcaattctcatgcctcagcctcccaagtagctgggactacaggcacatgccaccacgcccagctaacttttgtattttttgtagagatggggtttcaccatgttgcccaggctggtctcaaactcctgagatcaggtgatctgcccatctcagcctcccaaagtgctaggattatgggcataagccactatgcctggtctgcgtgtatttttctctgtttggcttatttcactcaacataataattttgagattgtccatgtttttgagtctgtcagtagagtgtttcttttattgcctgatgatacttttttaaaacaggcaagaaataagcagatcgtcactgaatatcttgattgacacataactactattaaaatcatggcagcaaacctgtagtaagaatgcagggggagaaaataccctcttatattaatattaagtgacagtacttctaacatccaaacaactctcccaccttaattagcgttatatgcatcaagagctactcttttggaagactctaaattactaaaaacagaacctgagttcgcatcaggaattgtaatagccgtaaacctatgactgtttccatcgctttatagttctgctttgacttcagaaactagtttgaaaaataatcccatttaaggatattcttttgttttgtttttttttgagacagagtcttgctctgttgcccagtctggagtgcagtggcacaatcttggctcactgtaactgcaacctctgcctccctggttcaagcaattctcttgcctcagcctccctagtagctggcacctgccaccatgcccagctaatttgggtttcaccatgttagccaggctggtctcgaactcctgacctcaagtgatccacccacctcgggcttccaaagttctgggattacctgcrtgagccactgtgccyagccaaggatatttttcttgtagtatctccattatcaaaacgtgctggaaaggatgttttacttgtttatcaatatggtgatgcctcaggagcttttaagccctcttaaaattatgtaatatagacctgatgaactcagttttattattagaaactcattttgatctgtaattccaagcaaatattatataaatgaaacaagagtagatacagtaagagcagcatccagattgcatttttcttcttttgaaagtcctaattaaattgtttgccatgttatgcaaagattcattgagattctggggagtggcagtaaatttaagcaargattatactgtgattctggggagccatagtaaattgtgtatcaacaaatctaaagggtgaayttttactttctgcttattgtctttttcaagaaaattctatagttaccaaaaaggtggctgaattttgacataataaaggagaaggttgagctggcctttggctagtccacccctattcttaccatctccaccttcaagactgaaataaggagctgcaggagcacaaagagatcccaaaacattgtcacataccaatagccactttcttacttttacaaaaagttagtatggtgttttttttgtttttttgttttttggtttttttttgagatggagtcttgctctgtcacccaggytggattgcagtggggcgatctcgggtcattgcaacctccacttcccaggttcaagcgattcttttgcctcagcctcccaagtacctgggattacaagtgggcaccaccatgcccagctaatttttgtatttttagtagagatagggttttgccatgttggccaggctggtctcaaactcctgatgtcaagtgatctgcccactgtggcctcccaaagtgctgggatgacaggtgtgaggcactgtgcccagccagttttctgtatttgtacaattattcagccagaaaaaaagtagccatatagtactataatgcttatatcacttcagtgggaaaaaaaaaataatggtacccaaaagaaataagaaatatagcctgattagtgagagaacactgataaagtttcagattattcccgttcttgaaatatttctcattcgcttttcttatttctttcacctacgactaaaatacacgtgctttccttttcccctatcatacttacttttttgttcaggttcctaagttgttttaccatcttcatatttcattctgataattccaaaaatactgaaatgaatcctccctttcacatgacctactttagtgtagaatttggcctaagtcatttctcatacaaaagcagttacatttgaattaccaagagaatcttgttggtataatttaacccagaagggcaactcacagtgctgtcatactaagcctcaaggatatatcttctcaagattgataagtgcttttgagcaatcgctcaaaagtatgaattgaagtctctaaacagttcattatcgttttggttgtagtaattaattttaattaaactgccgataatgtttgttccagatgaaaaaatgaggatatggtctttgttcccacttgaatatgaacactgctatccatttaatgttagaaagataaaagagatctcggccgggcacggtggctcacgcctgtaatcctagcactttgggaggccgaggcaagtggatcacctgaggtcatcagttcgagaccagcccggccaacgtggtgaaacaccatctctacgaaaaatacaaaaattagccaggtgtggtggtgagttcctgtaatcccagctacttgggaggctgagccaggagaatcacttgaacccaggagacagaggttgcagtgagccgagatcatgccattgcaccccagcctgggcttcagagagagaccctgtctcaagaaaaataaaaataaagtaaaatattttacatggtatcattgcaaaagaaggagtaatggtggtttaaagaaaacgtttaatacagttattcaagagttccaacacatcaaacttttgggatttaactatccttttttaaaagaaaatatattttgaatactgtacagattcccatcttatcagaggaagaaccagttagcataacatagaattttagggctagaagagactttcaacatcatcaagtcttacctckcggtattcaatagttcaatataattattatctttttacaggtcttagctttcctgccctaatttccaaaacaatgaagaactagtagtccccagatcccctttgtatatatgtataactgccttttcattccctctgatagtctccatattcatgttaatgattgcagctatgaggattatttccttgattcattatgcctgaattagcttaagaaaagaatagtctaccagaagcacaacttttaatttaaatgtttggcaaaggtaaagatgagtaattcagagttttagaagtagttgtagtaatagtcaattgtgtcattggttctctggaaaacacatcatatggattttgccatagcgattcaggcgtgagtaatactaccctattcaagagtaatactacccgattcaagagtaccacttcaagagtgagtaatactaccctattctttaagacaagtaatactacctaccacattgtatgggtgaagcaaaagtggaccagcacagctttttgtgggggttagtggtaggagagtgttatagtgaagttctttgttctgttttctcagtctcatttctcattsattcattaaatcaatagatatttattttgcctgtggtatgagctaaccatttctctgggtctggataatatagcagacaacaagatccagtctttggccccaaagagcatacagtacrggtactcacaacatggacaatgctagataactgcccagagagcagagaagctacatgagatcattataaacctgtgcacctgaaccactgcacaagcaatgcattaactttgccttgctcattgggatatggtgagaaataactgttataattagttgtgaagcactttggaaatgaaaagagctacaaagcaactgaatgaaagaaaacaatattaaattatagggtagaaatgattctcataggtatgttcagtatttatgtcaacgatataggactattaccagggaaaagctattttaggtaaatacaattgcctagcttttacaaagtcaagaaaatacgtgtgtgtattaacaagataaattgtggaatgttgtattattttgggtattatgtgagctaaatatagttggaatatcacacatactatgaagtttctataaatctgcagcttctattaagaatttctgtatttcaatgtttatcggaagtatttctccaatatttaaatgctgaaactatccaagactattattcacaaacaacggattatattttaatactcagaaactgtaggaaggtttgttaaataagatgaatatcctgtgattaacttgccagtatgttgggttcagtgatttattatgcctggtcttttctgattttagttaatgtttttaaagtttgttaattctctcagaagatgaggatgccaatttatatcccattatacaccctcaaaagatgaatttatagaatgggccatgtctttaacatgcttctatatagtcattcttatacctaagattcagatgctcaaggaagggacccatttagacagttatttaatgttctttgactatgaactaatcctaattttaattttagtacttttatgttcttaccagctttcaccctaattaaatggggcactacaccgcagagtttagcctgtggtgtagcagagcccaggtcatctgtcacagagaatcrtaatcttacattctctctctcctctgaacaatagaattttgaggtgggggagaatcttagtttataatgaggcaactctagttttatcacactcagaaacaacaaaaatattcaaaatttaactttctgtgcattccatttatttgcaaatatatatcagtatgattattacatgagtaagagatcttcattttttactgtcatccctgatttgccaaatttgatggagaacctccacagagttgcatattattttatttgttccacatgttggtgctttgttctctactgtccttttgtcattatattatctctgaacatttccatttagtgtttctatttagagtaaagaaatagaagcatgaaaattaataacccatgcatcatattttttgctggactttataggaatgaccagctaaggctagaaacctcagtgtttaatactgttttcaaaatttgattgttacatatattgtcatttcagtgactggagacaagatgtatatgtagacaaatagataaaaacagggtaattaaaccagtgtggtttttttttattttaaaggaaaacacatacgacttatgtacattgcatggcagagtattactaaaattcgcctaaacaaaccrtcacgatgttttcaggttttatggtaatgctttgactatatagtatttggatttgaatcctcataatcacaaagtctcttagttgtttaaaacaaaaaacaaagactatactgattctagaaagtatcatctccttgattatatttgtgctaagtgtatgaatctgtgctataccagtatgaaaaaggtaaaactgtatatatatttacattttgaaaagtagcattgtgcattttagaaaaatatttgtcaacttgtggcactttggcaaaggaatgtgcaattataaaggttaatgccactttatttttttctaattcccagtaattattcttactaggctttagagtcaaaatcaaacccaattttaagactagcacttttttcctactggtaattcctgtttttctaattacacaaaatgtttaacttaaactattctttgcaatgagttttagctttcctcctctatcctaayttcaaaacctttaatttaagaaccatttaaaattaatccagtggtaaccagaagaatattttaggtatcatgaccacttaatcttgtgcctgattttagtaattttctgataaaaataactgaattcctgaaaaagaatattcaaactttttaattagttttcattggtcataaataattgagtagttgatgtccatatagtcataatttatctaaactctggagctgccaagacaactaagtacacagaagtgcttaaaacacacccatatcccctaaagagaaatgacaagacttggaagcatcagaattctgtattattatgagtatcacatatatatatgctattttatatatacatatatacccatacacatacattctgttaggttaccagtattttactgtcatgcacccatgggtagtagaaacaaaataaaaataaatataaatgtttaactttaggtgttggcaccaayatagattatgcataaactgttgcaataaaagatactcattgtgcctgtacctgaaaaatttaccttaggttttctctggccttttttgtttaggcctgcatgatcattttaaatgtaaagatagcaggatatatgaatgaatggataaaatgatggccctgtttgccatgggattaactattctgttgaattttctgaggggcattggctgctgtatattacgccataaactatattgttcagaagcaacatgagtgtatcacagcatttagaaattatacatccttcgctttccccacaaaatgaattcagaatcgacattcaagtttataattttaagctgctaattataaaaatatattaataccttakggattgaagattacatgaaataagaactacaaaagaatgctaattaataacataactccatatgctatcaaacttctgatagcactgagtttcttataaagccttaaaatattttaatgataaattaattacctggaaaagaaggcactttattaccttgaactagctattcgtctgtatagaatatgtcaaaaatcccttaaattattctttatccttttataaatttatcctagttacatgtttttctgaagcctcttatggtataatgtgttaattcaaaaactattgtaacttaacagaaaaattgttaccaatataaccaatgaacaatacagaaataaaactcaagaataacaaaagtatatgtgataacaagactgttagtctaagttagtctacaatcatttgagattttaaaatgttgtaaaatttgaaggctttttcattgaacaatttttggacagtttttatttttaaatctcacttttaattggtactgccttgtcttgaaatgttgatcaaatgtaaaggcaatcataattattaagccagtccattataattcaattttgttttagttgagattttttagtgtaattctaaaacattaaaacatctgtttgtttcttttttgctcaagtcagccatgcctggtgaactatcaaatttaaatcatcaacatggatgtgctgctgtgtatagctgtttcctcttcagaaaattagtgcttgatttatacaaggaatttagttcagcagaaaaagcataggataattttttcaaaagggttcaaccctctcaagtgaaaccttaacatctttctgacattcataaggataggcttttatccaagaaattttttcaacagaaaattatttcaaagtggacaaactccactttcttttttgcttgaggggcagtacacttttacaaaaacacatttttctgtaagtttacttatctttaagtcattctctgtggtggccatttttccatctctaattttaaatgttttactaaatgtacgtgcagtttcatagacagtctgatcattacatgattacagaaaggagtcaagtttatcagaggtctatccttgtgaaggggagaccaaacacaaattccatgtcagttgtttggtttggttctttgttttcttttaaaaacaagatatattaacccaaaggtgtgttaatgtcatggcatgaacaatcttcaatgtagacctattgagtattttgtgatgctgagtaacagacgtttctcaactctctgtgatgctaaatattttccttaggaagttttgtttaatgttagattgttgttctgaaagatgttggtcctagtgggatttttttaaacttggaaaacaaataaacgcatgtattacaaatatagaaatggtgaattgtaaacttaccatatagtactgatttctattttcaaaaatgttttgctgttaaatatatacaacataaaattgctgccgtactgtaattgagtactttttcctaaacgaccctgttatcactattccagaattagaaggtgggcagatacatgattgattcatgtgtctgcatagatgcttcaaggtatattcttctcttggtgagtaaaattatattttccttggcatcaatgcattgagatctgaatatacctgtatctatcaatccttattacacatttcttaygcagtagcttcaaataggccaaaattggcctagacacaactaaaaattgagggtttgttacatgctttctaacagaaaggttttcaacgagattaattatgggtttgtactgtgaaaatagtggaactcccttgaaaacttcatgtttgctaaattcaaattaatattttttctttagctcacaaattaccccaaatccagagagaatatcaacctttttcactgttgtcaaatcaagcataaggaacagccccatgatactacaaaaacagttgaggaataaggaataaatctcttatgttacacctcagaataaaggcattcggtgaaagaaatgaactgaagttcatcatgaatgcaaggcctcagtacttgacattcctccacggaagggaagacaagtatcaacaccactggcatcatttccaaactgatcttatgttgaataatttccaccacattgaagtacctttcgactctatccagtttttgggttttgttttttttaattcatcaagcctttcgttttcaaaccaccatttgtcagccttgaggtagagagacatatagatttgaaaatactttcttaagagatcatgtaactatataactctgaatttaaaaattgaggggggagggataatttcaacccactgcctcttaccagaaacatttttttaaatctgtaactgctttagtgttaacagggtgcaaggtggtttttgtcccgtattgttcttaaaaggttctcatttattgtgattgtattgtactgtatgagaacaaatcataaattgccttgtattgtttataatagaccataccacgtactacttcagtttttatgttccaagtttttcagtgatgcatgttaacagttaggtcctaaaattctgtggtgctaattctcccatacccaatggtgcttttgtggatgctaactgcacacatgctgaacaaagcttgaagtttaaaactttcctcccttcctctgtttatatgaagtaaaatgaaataacttgaatttgtctcaaagtatcactgacaatctaataaacttgtttatatgtgtgattagtttggattcttaattattttaaggaaagcatctcagctctattgggccccaaaagttgattttgtgtttatttcattatgtcatttgtgcccccaaattcgtggtatctttataaatttcaatgcagtttgtctggcttccaaaatcatgtttaggtaggatctatagaaactagacctatcagaactggaaataagtaagttgagaagatcaaaaatgtgccaatccagtctattacagtgcctttattgtaatttattaataaggttttatcacctggttgagccgggagataacacttgcacgaaagcaagtatgccttcaaaacctttattgcaactcacatgacattgaaaaggccatttctatatgctgatattaaaagttccacttctcatatatgaaaatagggacaaaaaaattaattttgaattttccaggacaaactgacatcatatgccagaatgtcatagtagataaactcatggcaatggttttattggatttttatcttctgcatctatattaaatcacaacagaaggccaagtgaacctgctaatatcttcatgagggcagagggctgtttcttccaagccagggataaattcaatataaaggcactatgtaaatttgcattccgaccttggtactttgcctaactcaagggtaatgttaaaatttgaaaagaaaaaatcgaaacaaatgtattaaatctccttgagcaacaatcattgaccataaatagaagatgatcaaacctatatcagtcaaagaatctagcaggtatgatgactgaaatgatattcccataccactatggttctttattatataaagagtttcaggcccagtaaatttttgcctcaaatagctattaaattgtgtctaacttctaacatcagaaaatgaagtttagagaatagtgccagtgtgaaccctaagcttgcttctgtgactatctgaaataaatgcaatatttactaaatcacagcctctcaccaaagatatttctacaatatatttttgtaactaccttaactgtattccattttatgaaaactggtaaataataaatgtactacaaattaattgcacattttcttttggaagaaaaatctgtttaatctacatgaaaatatctctaattttacacccacagtcaaccagatttctgtattaattttcatcattgtcccatcaaaaagattatcctgaaaaatgcatatcagctttcgttggtagtggtgaaattttttaaaaaacttatcagccttaaataacatgaatatattttgtaagttttgttcctctataaaaataatgtagtccctctctaagtgaaaccattttttaaattacgtaattatatccattttcattgcattattagcattatttaggtaagttgtcttttctgttcctaaaacagtaattttcccttagagaccttatgctcaaggtgttttccctaaatccttatgggaaagcattttcaaaaacagacccaaatgttctctttccagtaaggaaaatctttcgtaataaattccatgtacactaaaagcataacagtacttgtattagggaagtaatttttctcatcagaaattgctttgagtttgaaaatggccaataataataaaaagccaatctgcagtctacataatttcagatttgtcttcatgcgatctttttaaaaaactgttgaagtaggtgcatactgacttgcactaggactaaagttatttttcttacctcctactttatcctttatccttggcagggattcaagagaggtgaaaagacttttggaaaataactaaaaagtagtacaacacacacaaaataagggagtggtagttcataggactgaataaatcatgaaattcagtgaattcagcactacacatattatgccaaattgttctcctcttacacttttcgcgaagcaaatttcccatcataaaagacttaacaaaacactggaacatgaagatcaaaaggactgaatgaaaaggctggccctcagttttgtgcatttggaagttcaggtttttttttagctaagaagactttgatgaaggaagaagtaaaaaagaaaaagaaaaaaagaaactcggttttgttagttcattctgagtgaattcacaagagattccttttaaacaaggtcataaagaaaacatcttgaatatcagatattcaatggagaaaccaattaacttacaacaaaaaataaattggtacacccagggagtggattggaaagaagctgtgcatgagaagtgaactttgaagtttgcttttatactttttgaatattatttcatgataagcttgtattattttataatttataaagtacttttttttttaaaggaaagaaatcaaatgctagactgactagaatacctatatcaactggtcagcacattctctttccagtaggaaaatctgccttttctttctttttttgagacagcgtctgactttgtcgctcaggctgcagtgcaatggcaggatcacagctcactgcagcctcaacctcccaggctcaagcaatcctcccacctcaacctcccaagtagctgagaccacaggcacgtgccactatgactggctaattttttattttttgtagagacagcatttccctatattgcccagcctggtcttaaagtcttgggcttgagcaatccttccaaagtactgggattacaggcattgaaccactgcacccagctggaaaatctacttctaaaacctgcttaatgtcagaacattgattggcaagcataaaatcaggtaaaggggaatgactaatattcatgaatggcatcatgttatgatgggcttcatgatacagacctgccaagaaacaggaataaccacatcagcatattggctcagagcacagtcaccccaagtcagggatggaaaccactaacaaatccttatgctttaaatctttttttctagattccatgtgacccaccatctttcagtgtgaaaattattgcttatatgattaagccacatattatcttgcatttagtatcactttaggattttcaatgatagaatactgttttataaatatcattcatcattaagcattaacattaatcatattacataatcatatcattacattaatgtataatcattgttattattttgcttgtttgtttgtttttgagaaatagagtctcagtctatctcccaggctggagtgcagtggcatcatcatggctcaccgcagcctcaaactcctggcctcaggcaatcctcctgccttggcctcccaaagtgctaggattacaggcataagccactgtgcctggcctgttattttttataatcatcattaatcattaagtatcattaatcattcactcttattataaatatcattcatcattaacaaaagttttacatacaatagctctctgaccatgacccttcttaatagagatttagggaacatccaaattcagcagaagtgactaatgaaagatcaagatgttcctcctttaaccctcatggtagaccttgccaataaacgatagcaactgggagcagctcacacctgtaatcccagcattttaggaggccgaagcaggcggattgcttgagcccaggagttagagaccagcctaggcaacatggtgaaaccccatctctagaaaaaatacaaaaattagctgggcttggtggcatgcacctgtagtcccagctactcaggacgctgaggctggaggatcacttgagcccaggaggtcgaggcttcagtgggctgtgatcatgctactgcactccagcctgggcgacagagcaagaccctgtcttaaaaaaaaaaaaataggccatagtatttatttcaaatggccagatacagctctagagtctttctcaactcagcactctcctggcagctgctcccagttgactacacttagcatgcaagattgacatagttgcctttctaccttagacacccaccagcacatatacatgccatctgtgttagtctgggtcctccaagaagcagattccaaggtggaattagatgtgcaagagatttattaaaggaaatgccagtgagggaaaatggagaaggagctggtggaggagacatcagactcagatgcaagtctgcccctgtgaggaagagaggaggaaagaggagggaggtagaaaggaagttacttcttagactgcagcacaattataagcaagtttcagccaggcctagggggagtccttgagccaaagtcactcttcagaagaggccagcatcttgagggttcagcctgcttaatatccctgtcacacccagttattggctgggagcagcctaggagaagcccacctgcagggcaaacgtgacgatagatttcagagcaccacagctggatctgtgggccagttgggtggagacttagagctgttcagtgcccataggagtctgtggtggctatgaaaatgcatctctcaaatttccttctaccgggagcataactgactcacgagctatttctgtattctgtgatgctagtctttggatggtgtggttttcatgttctacttacaccatccacctcctttgctgtgaagtggtcccttagttggatgcctctgtctctgctgccatggccactctattgctgtgcccatcctgccaattctgaggtggccaatggcagtctgattcaggtcaactgtccgagtcactttgtcaacttggttgttcagtgcctctcccatgatggatggcttctggtggacattaacatgtgatacaaaactcttcacagtctgggctgggtgtggtggctcacatctgtaatcatagcactttgggaggccaaggcaggtggatcacttgaggctgggagttggagaccagcctgggcaacatggtaaaaccccatctctactaaaaatacaacaacaaaaattagccaggcgtggtggcgcatgtctgtaatcccagctacttgggaggctgaggcaagagaatcgcttgaatccaagaggcagaggttgcagtgaatcaagattgcaccactgcactccagcctgggttacagagtaagactccatctcaaaaaaaaaaaaaagttttcacagtctgtgcctgctcccatatgtgcacccacaagcttctaccccaggcctcttcgaccctgtcttccagtc

SEQ ID NO: 96217 - DNA, 48335 bp, Homo sapiens
agagagacaaatatatctataaggaaaaaaaaaatagagcctatggaagtctgtgggccaggtgcagtggctcacacctgtgatcccagcactttgagagggtcaagacaggcagtttgatagcagcctgggcaagatggcgaaaccttgtctccacaaaaaaaattaaaaacttagctgggcaaggtggcatgtgcttgcagtcccagctactcaggaggctaaggccggaggttcgtttgagcccaggaggccaaggccgtggtgagctgtgattgtaccactgcacttcagccaaggtgacagagcgagaccctgtctcaaaacaaaaaaaagagagagatattaagagatatcaacagctagagaaaagaaaccatctacccagaaaagtaaatgtcgttcctaagggccttttcatattgttggggaaaatgccctgaatacttcctataaagaattatctattgccataacacatgttcccaaaacataacagcttaaagagaaactgcctttgcaaaattaagacagtaagagaaatctgacatagttgacttcatcttgcttgtaacctccaagctgtccttggtcattcctggcataggccaagttaatcttgggaggagtttagtttatttaagcaagggtgatactagcccttcccaaaactaaactgccttcataaaactaatgaaagcccacgaggttaggattatgagagtggcctgaattctgctaatatggagttattaaatggtaaccagccattgttctgaggtcacaagatttgcaacctccacagttgcccctgtaattaacatcactattgtagaacctaagattggtcttttgagacgttttagcagacttttgcattcaggcaactgactgaccacacctgggcttgcaacttgtgactcaacaggccctgtggccccacccagagggggactcagccaccaggactgttttccacacccctatgagtccatccccaaccgatcaacattccctatttcctagccctctgcccaccaaactatccttgagtattaactccctcttctgcgtggtcggcctcacatcagttacactccctttgctgcaaagctatggcctcagtgaattgatttttgtttgtgctgacagcaggagaaagccactgggcaattacaaaacagcattcattatctcccctagtttctgtgggtctgggctccaggagcagctcagctgaatggttctggctcgaggtctgtcatgaggctgcaggattcactcccagctggctcatggagctactggcaatgaggctccagttccttggcacgtggtcctccctggtgcactaacatggtttcagctagagcaagacagaagacagggatagagaaccaaaacaagtgcagtcctttatcatctaacctaggaagagacataccatgacttctggttaattctgttggtgtttttcattttggtttggtttgcgttggttttttttattttttttatttttttgagacggagtcttgctctgtagccagggtggagtgcagtggcgcgatcttggctcactgcaacctctgactcctaggttcaaataattctgcctcagcctcccaagtagctgagactacaggtgcgcaccaccacacccagctaatttttgtgtttttagtagagatggggtttcaccttgttggccaggatggtcttgatctcttgacctcatgatccgcctgccttggcctcccaaagtgctgggattacaggtgtgaaccaccgtgcctggccaattctattggtcttatagatcaaccatggcacagtgggaacagatgacggcacaaggtctgaatatcgggagagagggatcgttgaggtctgtcttggaggctggctcccactctgctctctatcccccaaaaatccacagtcctcccacatgtaagtacattcaccccctcccaaggaacaagacagtcccatcagctcacagcatcagctgaagagttcatcttatctatgttaggtccaggggcggatgacgaccctagggttctcaggtacagctctaagacagttcttcctgatctgcaaggctgagaactagacaagttatcaccctccaaacacccagcatgcaatggtgggacagttacatgatgcccagatgctcctgttcagaaaggctgcaaatgaaaggcacacacactgctggtccataagcagttctgaaattcagctgggtaagcactggaacccagtgatactcctgccaggaaatgactttccagactgtttgactctgccctgggaggacttgatttcatcttaggagtcatacttttacatgaaaggtggtgtggatttacagcaaaccatttttctcacgttgtttcctgcctgtagaatcttagaaatctcaaggcctgttttttttttactttgtctctttcagttcaagttgaccagcttactgctgatgtaattattttattattattattattttttttgagacggagtcttgctgtcgcccaggctggagtgcagtggcgtgatctcggctcactgcaggctccgcctcccggggttcatgccattctcctgcctcagcctcctgagtagctgggactacaggtgcccgccacctcgcccggctaattttttgtatttttagtagagacagggtttcaccatgttagccaggatggtctcgatctcctcacctcgtgatctgcccacctcgacctcccaaagtgctgggattacaggcgtgagccaccgtgcctggcccgatgtaattattttttaaactttgtcttctatgagtcgtattgaggcatcaactttgatttttcttttttcttttagagacaaggtcttgttctgttgcccgggctggagtgcagtggcatggtcttggctcactgcagcttcaatctctgggccccagcaaaactcccaccttagcttcccaagcagctgggactacaggcacatgccattgtgccgggctaattattttttgcagaaatggggtcttaccatcttgcccatgctggtctcaaactcctgcactcaagcaatcctcccacttcggcctcacaaagtgttaggattacaggcgtgagccactgtgcctggcccacctttgtcttctccagttttaacaaaggattttatagttacaccctcactttaatctttaaaccatattttcctgagtgttctgaatttaatctttgctctgaagtcacttctaaatgttagtgtaatcatttgccacctggagaagctgtgcatcttctaaaccagtgagccctggtttcttttttaacagttctttctttagcttatttcattcctgtcttattttattaaagaggcaagaagaaaccaatggcattttcactctagttggaaacagatttagctagatcactcattcattagctagctgtattttccactttccacacaactgtgggtgacagcgttgctgaacttactgcctctcaccaggacttccctttctccagctcccgggaatactcccgggttcaagtaattctcatgcctcagcctccgaagtagctaggactacaggaacctgccatcacacccagctaatttttgtatttttagtagagattgggttttgccatgttggccagagtggtctcgaactcctggcctcgggtgatctgtctgccttggccttctgaagtgctgagattataggcatgagccaccatgcctaaacaaaaaaaatattttttagagataggggtgttgctatgttgcccagtgtgtcctcaaattcctggaccaagcaatcctcctgcgttagcctcctgagtagctgggactacagatgtggaccaccatggccgcttccaactttgaaacttttatccacagtttcaaagcactgtgggctttcagcagcactctcctcaaagcccactgcctgattccaaagccactcctgcattggagggttttgttatggcagcaccttgctaacagatacacaaatctgttatatattgctccattacaaatgaactcaaaacttagctgcctcacaaattacctcacaaatcctcagagctcagaatctgggagcatcctagcccagtggttccggcttgcggcttgcgtgcagttgtactcaagctgttggccagagtggccggctctgaagacttggctgggacctgagggctacctctaagctttctctcgttgctgtgggcaggaagcttcagttccttgctgtgtgggcctctccatggggccactaacaggacttcttcccctagagcgagggacccaagagagaccaccaggacagccatggtctattataacctaatctcagaagtgatgtactaccactttttttttttttttttgagactcaagtgatcctcccaccttagcctccctagtagctgggactacaggcatgtgccaccatgcctggctaatttttgtattctataatttttgtattttgtattctttgtagagacacggtttcaccatgttgcccaggctggtcttgaactcctaggctcaagcaatctgcccatcttgccctcccaaagtgctggggttacaggcataagccaccacgcttggcctcattttttttggtgtgagatattctagaaccaacctgccctcccacccctaatttaaggttgagacaacttactgtttattttcaaagaagtattaagtatctaacatacagtaggtacttctgggggcaaaaaagacagtccctgcctttgaggaattgcctattgagaaaacaagacatagctataatacagtgtgatgaattctacagaagggtataaagggaatgcccaggagagccagatgagcagaccttttttttttttttttttttttttttgagatgagtctcactctgtcgccaggctggagtgcagtggcgtgatctaggctcaatgcaatctctgcctcctgggtttaagcgattctcctgcctcagcatcccgagtagctgggattacaggcgcacgctgccactccaagctaatttttgtattttctttttttttctgagacagagtcttgctctgtcgcccaggctggagtgcagtggcgcgatctcggctcactgcaagctccgcctcccgggttcacgccattctcctgcctcagcctcatgagtagctgggactacaggtgcccgccaccatgcccagctaattttttgtatttttagtagagacggggtttcactgtgttagccaggatggtctcaatttcctgacctcgtgatctgcccgccttggcctcccaaaagtgctgggattacaggcgtgagccactgcgcccagccaatttttgtatttttagtagagatggggtttcaccatgttggtcagggtggtcttgaactctttttttttttcttttttttgagacacagtctcactctgtcgccatctggagtgcagtggcatgatctaagctcactgaaacctctgctggccgagttcaagcgattctcctgcctcagtctcccaagtagttgggaattacaggcacctgctactcaacctggctaatttttgtatttttagtagagatgggatttcaccatcttggccaggctggtgttgaactcctgacctcatggcccacccgccttggcctcccaaagtgctgggataatgggcgtgagccactgtgccctgcctggtctcaatctcttcacctcaagatctgcccgcctcggcctctcaaagtgctgggattacaggcgtgagccaccacacccggcctgagcagacttttaaaacagagcatgagaaaaaaaaggagtgagtagaacaaagttaaaagccttttataccacatttggtgtctgaacttggtgttacagtgcatgactttatcattataggcttataagcaagagagggaaatgatgagatagatacagttttaaaaattcacctatattttaatgmtttcatagttttattttttaaaatactgattcatttggaactttgtaacatttaatacaaggcaaaattatataaatcgcaaacatcagttaagtaaactgtaatgcacacccaacagaaagaactttaaagcctccaagagctttgaagcttcttccaagtttttaatttcacagaaatacagcagaataaacattcctgcgtataagactttgaagaatttgaatcatgaaatattgtgtggtaagatggattgaagaggcagaaaggaaagttctaagggtttgttttctaacactgagaaatcatgtcagctgggaaaaaataccaattaattactgagtaccttactgcatacatttcaacctcattctcatttggtacactgtaaaatggcacagtccacagattattatatatagaaagcaatccttttctaatcctattcccatggatatcaatgttcaaagtttactgccatgagctcaatcaaggtatrgtgtgattygaaagtgaagcctttattgtgccagaaggtcatagcataactgacttcaygcaaacagggagctctcccttctttcctagttggtctgctccttctcctccaggatgagtacagtgtccacagttattcctatgtcctccagcgactggcctccctccactgccagaggccrtctgggaaaggaagtagaaaggctgtatagagatatgtggtacccaattctcgtcatccagtcaaataagacctagaagatgaaaagcttggcttagtcattatcaaatactttacacaccatgtccctttagaccaccataacattttataattttgtcaatgtaaaatcatatccctaggagtaatgagacagaagtttcatacctttcaaagaaactttctagaacttaaaggaaaatagcttgccatgagttcagagataggaatattctttttttttttttttgagatgggagtctcgctctgtcacccaggctggagtgcgatggcatgatctcggctcactgaaacctccaccacctgggtttaagcgattctcctgcctcagccttcagagtagcttggattatacaggcgcccactaccatgcccagctaatttttgtatttttagtagagacggggttccaccatgttggccaggctggtcttgaacttctgacctcaagtgatctgcctgcctgggcctcccgaagtgctgggattatggccgtgagccactgcgcccagccaaaaattagccaggcgtggtggcgggcacctgtaatcccaggccctcaggaggctgaggagggagaatgatttgaacccaggaggcggaggttgcagtgagccgagatcccaccaccgcactccagcctgggtgacagagcaagactcggtctcaaaactatatatatacacacacacatatatatatatatatgaaattttttttcccgaaacatataatggcacagaaatttgagaccagcctgggtaagatggcgaaacccagtctctacaaaaaatacaaaaattagccaggcctggtggtgcatgcctgtaatcccagatactcaggaggtgaggtgcaaggatcacctgagtccggggagsttgaggtttcagtgagctgtgattgcaccactgtgcttcagccttggtgacagagtgagaaccaatcttacaaaaataaataaaaataatggtaaattatctgtcaggaacactgatcttatttacattcacattaacaagttatgatggccaggcacagtggctcacacctgtaatcccagcactttggaaggatgaggcaggagaatcatttgarcccaggagttcaagattggcctggtcagcatagtgagacctgttctatttwwaaaaaaataaaaaatattaaaggttttgttttgttttgttttttgtgatggagtcttgctgtctcccagactggagtgcagtggcacgatcttggctcactgcaacctctgcctcctgggttcaagcgattctcctgcctcagcctcctgagtagctgggactacaggcacgcaccaccacgtccggctaatttttgtatttttagtagagacaaggtttcaccatgttggccaggatggtcttgatctcttgacctcatgatccgcttgcctcagcctcccaaagtgctgggattacaggcgtgagccatggtacccrgccaaaaaactattaaagttttaagaatccctgttttcccaacrcatttgccaaatctgggtactatttctttttaatctttgacagtctagttaagtagaaaatactgtttcattttatttgtacttcattgattctatgtgaggccaaacatttttttcatatatttatctatcactgagtcttcttcgggaaatcatgatattcatgtgtttctttccctgccagtctwctgagatgtttatctcttccttgatttaagttccttataaaaaataactatcatacataaatagtaaaatgggctggtcgtggtgggtcacgcctgtaatcccaacacttgggtaggccaaggtgggtggatcacttgagcccaggagtttgagaccagcctggccaacatggcaaaaccccatttctactaaaaataaaaaattagccaggaacggtggtgtgtgcctggtcccagctactcacaggcatgagccaccgcacctggccggaatttttatgtagtcaaatccagtattttccattacggtttatagcattcttgtcattgaaggttaaatacaacaaacaggacagaaaattatttacatatatttttaatgcacacataattatatgtttaaatgtacttagagacggaaatataccaaaatgttagtaactggttttggcatgagactacagatcaaatttttttctcgctctacttttccatgttttccaaattatcactaacaaccacagtattgtttttattatttagtatttttgagacaggatcttgctctgtcacccaggctggagtgcagtggcatgatctcggctcattgcaacctctgcctcccaggttcaagtgattctcccacctcagcctcccgagtaggtgggattacaggcatccgccaccatgcccggctaattttcttatttttagtagagatggggtttaaccatgttggccaggctggcctcsaactcctgacctcaagtgatctgcccgccttggcctcccaaagtgttgggattacagacatgagccactgcacccaggccacagtattgtttttaaaagaaaaaaaaaagtctaaagttaatagtggctacttcctaaggatttaaaagcatcttgcccatcaaattatgakaatgtaatgaaagcaaacaacaaaggaaaaatacaccaaagggaaagaatgagtaaaatgtgaatgcagagatcacaattcagagacatccggcaggcatgcctagttagccaaatttctgcaacgtggagtacctggaaatgtcctttatccatacctgatgggagrtgcagatgacagtgtgatcacaccttcccccacggcatgtgaataaactactgccatattcaacaaagatatttctcaaaatgtgaattccttcacttacctgtgagctgtaggacttcaaaaaccttctcctcaggacattcccactgggacatcggagagcaacagtaactacctaaggaagaaatattcacataagaactccgatccattgctctttgcaattcctttcattccataaaacagctaagcagctaaaaaggacttagatactgctttgctaattattaaaagacataggtagggcatggtggtggctcacgcctgtaatcccaggactttgggaggctgagacaggcagaccacttgaggccaggagtttgagacaccccccgccayaaaaaatagaaaaattagctagatgtgggtgcacgcctctagtcccagctacttgggaggttgaagtgggagaatagcctgagcccagggaatctgaggcaacagtaagctgtgatcacgccactgcacccagcctggatgacacagcaagactctgtttwaaaaaaaaaagacattataaaatgagaagataacacattagtgtttatttttcacctgtcaagaaaccctttatgactaacatgatcattaactgtgctgggagttatgtgggtatcatattaggcataagtggtggttttagagcagcacccctccctctcaggaaagctatgttagaaaatatttccaatcaggccaggtgcggtggctcaggcctgtaatcccagcactttggggggccaaggtgggcggatcacttgaggtcaggagttcgtgaccagcctggccaacacggtgaaaccccatctctactaaaaatacaaatattagccaggcattgtggcgtacacctgtggtcttagctactcaggaggctgaggcaggagaatggcttgaacccggaagcagaggtttcagagagccgagattgtgccattgcactccagcttgagcaatgcggtgagactcagtctcaaaaacaaaaacaaaaacaaaaacaaaaaactttcccatcaggcacagtgactcacacctataatcccaccacttggggaggccaaggtgagaggatcacttgagaccaggagtcggaccagcctgagcaaaacactgagacccaatctttaccaaaaaaaatttttttttaatttaaaaattagtcagggctggtggcacatgcctgcagtcctagttacttgggacgctaaggtaggaggatcacttgagcctgagaggttgaagatgcagtcagctatgatcgtgccaagacactccagcctatgagacagagcaaaagcctgtctctttaaaaaaaaaaaaaaaaaaggtttccaaggagtataactgttgccgagccccaagaagtaggttctccttctggatttattgcccaaatgacttaatggctttcaagacacgtatgtgctccccatacattaggaagtgtctataagttgggtggccagtgacaggaaggcatcacggactatgacccagcaactgggaagaagacagcttgacacagttggggatcagtcccagcccagcccccaacagcaaaccacccctaaattaaaacatctacaaagtagtcgccctcttcattttctcctttgaaaaggagaactgcaatttgaagtcatttgcctagttttttttccttttttttttcctttttgtagcgacagcgtctcactatgttgcccaggctggtcttgaattcctaagctgaagtaatcctcccctcttggcctcccaaagtgctcggacatatgcctattttgattctgttttagtaagcaacgcattttctgacctaaagttctggaaaagcccacgtgtcctatgcctgaggcagtgggtgggtgtaatcccagcrctttgggaggtcaagacaggcagatcacttgaggtcaggagttccaggccagcctggccaacatggtaaaaccccgtctctactaaaaatacaaaaactagcccgatgtggtggcagatgcctgtaatcccagctacttgggaggctgaggcaggagaatcacttgaactcaggaggcggacgctgcagtgagctgagatcatgccattgcactctagcctgggtgacaagagcaagacttcatctcaaaaaaaaaaaaagacaactcagcagacagcaggcttgcaaaatagtactcatgttgaggaatttgatactacactacattccaagtaagacccagctacccaggaggctgaggcgggtggatcacttgagcccaggagttcaaggccagcctaggcaacatagtgagaccctgtctctatgttctaaaaaagacctagttacagtataatcmcatgaacacttatgctatcacttctttctaaacccaagtttagataagacatatttaatggatgttaagcaaagaaaatagaaaataagtttaattttcgaagagaaaaatagacttacttcttctgctgtttgagaaggttcttcaggtaaatcaggaatctaaagaaaagtattggtaagaggaatgtaaacatgttcaacaagcaaaagtgtcaatgagaagagttcctctcaatacagagtttagacacacatctaagcttacttatatcttttcttcatacatctataaagagtttataatgaaaatagttcaattaataaacatttttgggcaagtgtgctaaaaattaatcataaaaataggatttgagataatagctcccaatctatacatacttaaaggattttgcttctattatgttccaaaatattactaatatataaaaatgcactatgtaaaaaagcaagccagatgcagtggctcatgtccgtaatcccagcaactcaggaggctgaggcaggaagatcacttgagctcagaagttcaaggccaaccattgcaacaaagcaagaccctgtcactttaaaaaaaaaaaaaatatatatatatatatatatatatatgattgtgtatgcatatacacatacatacatataaaaacaggataaatgttaacatgtatcagctgggcgcagtggctcatgcctgtaatcccgacacactgggaggccgaggcaggtggatcacttgaggtcaagagttcatgatcagcgtggctcacatggtgaaaccccgtctctacaaaaatacaaaaattatccaggcatgatggcgggtgcccataatcccagctactcgggaggctgaggcaggaaaatcgcttggaacccatgaagcagaggttgcagtgagctgaggttgtgccactgcattctggcctgggtgacagagcaagcctccatcttaaaaaaaaaaaaaaaagaaaagaaaattcagtaagaccccaaaattattttgcttcaaacatatacatattttattttattttattttattttattttattttattttatttatttatttttctgagacggagtctcactctgtcgcccagggtggagtgcagtggcgcgatcttggctcactgcaagctctgcctcctgggttcaggccattctcctgtctcagcctcccaagtagctaggactacaggcgcctgccaccatgccccgctaattttttgtattttttagtagagatagggtttccccatgttagccaagatggtctcgacttcctgaccttgtgatccgcctgcctcagcctcccaaagtcctgggattacaggcgtgagccaccacacctggcccatatacacattttaacatgaatatgaactttttgtcactcacactcctaggtgactgccagaaaccattcactttggttgcttttgtcatttactcatgtttccctatttccattaatctattaagaatccagatattgggctgggtgtggtgtctcacgcctgtaatcccagaactttcgggggctgaggcaggcagatcacctgaggtcaggagtttgagaccagcctggccaacatggtgataccccatctctactaaaaatacaaaaatgagctaggcgtggtggcgcacacctgtaatcctgctactcaggaggttgaggcatgagaatctcttgaacccaggaggcagagattgcagtgagccatgactgtgccactgcactccagcctgggtgacagagtgaggctctgtctcaaaaaaataaaaataaaataatccagatatttagaccattttctttcattaagacatttgtggccgggcgtggtggctcacgcctgtaatcccagcactttgggaggccgaggagggcagatcatgaggtcaggagatcgagaccatcctggccaacacgatggaaccctgtctctactaaaaatacaaaaaattagccgggcgtggtggcgggcacctgtagtcccagctacccgggaggctgaggcaggagaatggcgtgaagccgggaggaggagcttgcagtgagccgagatcacgccactgcactccagcctgggtgacaaagtgagactccgtctcaaaaaaaaaaacaaaaaaaaamaaaacaaaaaaaaaaaacatttgttaccaatgacttcatctccaggaactctttattaataccatagagtatattttataacatttaatctaaccttacctgcatttgctaaataactcatttgttttcctttggtatcaaaagcatatgtgactgtcaagtaaaatctgccatcagcataagacagtgtcattaacaaaacacaaacatgaatttttaatcagtccgtttagttcatatcgatctttttcaaaggtcagtgatagttcaataatctgattcccctgctcaatctccactatgggaccaggaaatctcagattgagaagcaatatcttagaaactattttcagggaatagacagcctcccagctttccctaagggccagtaaaaacagatttcttatttctaatcttttccagctccaattggaattaacttagttaaggattgaagatttgaatgaacaacatgtataataaacctgggcactaatccaaagtgactgattgctaatctattccctagaagggccagtaaggaaaattatacactcatgttaataacagctattagccactcacaagatagggcttgataatgttcttaagttaataggaatgcttcccttcgtaagcattatatttttcatttttacataatcaaattccttaaaaagaattgagtattttcggctgggcgcagtggctcacgcctgtaatcccagcactttgggaggccaaggcgggcggatcacgtggtcaggagattgagaccatcctggctaacatggtgaaaccccgtctctactaaaaatacaaaaaaattagctgggtggggtggtgggcgcctgtagtcccagctactcgggaggctgaggcaggagaatggtgagaatggtgtgaacccaggaggcagagcctgcagtgagctgagatttcaccactgtattccagtctgggcgacagagtgagactccgtctcaaaaaaacaaagaaaaaatatcaattcttttttttttttttttttgagacggagtctcactctgtcgcgcaggctggagtgcagtggcgcaatctaggctcactgcaacctccaccccgctgggttcaagagattctcctgcttcagcctcctgagtagctgggattacaggcgcctgccactgcacctggctaatttttgtatttttagtagagatggggttttaccatcttagccaggctggtcttgaactcgtgacctcgtgatccacccacctcggcctcccaaactactgggattacaggcatgagccaccatgcccagccctttttgttttttgttttttgtttttgagatggagtttcactactgttgtccaggctggagtgcaatggtgcaatcttggctcactgcaacctccacctcccaggttcaagcgattctcctgtctcagcctcctcagtagctgggattacaggtgcctgccaccacgcccagctaatttttttgtatttttagtagagatggggtttcaccatgttggccaggctggtcttgaactcctgacctcaggtgatctgcctgccttcatgtcccaaagtgctgggattacaggcatgagccacagtgcctggctaagaattgagtattttctaaacctattatcatttgtctttattgcttccaagttggattcagaacatcattaatattgaacagggaaaattattctttttttttttttttaaatagagatggggtttcaccatgttggccaggctggtctcaaactcctggcctcaacctccatcggcctcggcctcccaaagtgttgggattacaggtgtcagccaccatgcccggcctattctggggtgattgctttgtaaggcagtgggaagacaccatctggatgaaaggccagtcctgatcttcacccagtataccacctcacccagagttcaatactcctactgcacacagacacaattcaatgagaggcatgaagtactttacctccttgcatgtgggctgttcagcaggagacggaaattcagttaaaggtttaggcaagttctggctctttgctgcttctctgtttgatgtttcaaaagatgtctgacttgtaccttcatcaccctggtcaaacacaacagacaatttctaaagagatgttttctatcaactttattctattcacaattgtttttcctttttcctttttttaccctgatggcatatcagtagaaaaatattagcaagccattatgagacccaaaaaattaaagcattatctccgtggacaggaaaacacgaggcttgagccgggtgctatggctcacacctgtaatcccagcactttgggagactgaggagggcagatcacctgaagtcaggagttcaagaccagcctgcctaacacagtgaaacccaatctctactaaaaaaatgcaaaaattggccgggtatggtggctcacgcttgtaatcacagcattttggaacgccgaggtgggcagatcacaggaggtcaggagttagagaccagcctggccaacatggtgaaatcccatctctactaaaaagacatacaaaaattagctgggcgcggtggcagttacctgtaatcccagctacgtgggagactgaggcaggaaaatcacttgagcctaggaggcggaggttgcagtaagctgagatcgcaccactgcactccagcctgggcgatggagagagactctgtctcaaaaacaaaaattagctgaggcagaagaattgcttgaacctgagaggcagaggttgcattgagctgagatggtgccattgcactccaacttgggcgacagagtgagactcagcctcaaaaaaaaaaaaaagaaaatttaaaattgtaaacttctatagaaactgacaaaattcatattcaatgctgaaggaaaacataaccaaagtttaatttgacttaaaaatcagaatatataatatataataacatatataacctgagcttaataccttggagatcttgacttgaggaaagatcagaatattcttgtcctcatataagacaataacaatttatttgacagttttaaagactatcttatgtcacagtcagtcttcttttttttttttttttttttttctggagaaagggtcttgctctgtctcccagcctagagtgcagtggtacagtcacagctcactgcagcctcttgacctcctgggctcaagtgatcctcctgcctcaacctcccaagtagctgagactacagccacacactaccacgtctggctaatttttaatttttttttgtagagacagggtcttcctatgttgcccaggctggtctcaaactcctcgtctcaagcaatctgcctgcctcatccttccaaattgctgggattacaggcgttagccaccacaacagctttttaaggaaccaagttatatgctctttaggcaccaaaaaccacttaaccagccaggtgcagtccatggtagggtgcacctatagtcccagctacttaagaagctgaggcaggaggatcccttgagccctggagtttgaggctgcagtgagctatgatcgtgccactgcaccccagccagggcaagagagagagactgtcttttaaaaayaaagaccagctgggctcagtggctcacgcctgtaatcccagcactttgggagggtgaggcgggcggatcatgaggtcaggagattgagaccatcctggctaacacggtgagaccccatctctactaaaaatacaaaaaattagctgggcatggtggcaggcgcctgtagtcccagctactcgggaggctgaggcaggagaatggcatgaacctgggaggcggagcttgcagtgagccgagattgtgccactgaactccagcctaggggaacaaagcaagactccatctcaaaaaaaaaaaaaaaacgaccaaccccttaaccatgtaataaacaagtatgctgaacaaaaactgataatcattatcaataaaaactcctaaaagcagtctaacatcattttcaattaaaaatcaatcatgtaataggaaacatastaagaggattcaaaatataaaatgagaatattttccaaccccaagtttgtgaccactgcttaatttccaggcttcacccgtcatttgataaaagcgctcctccagttttctcaatttcatttcctggtgaggttttaaaacattctctatgtatctgctggcctgttgaaaacaacaaattaggtgttgttactatccattaatgttcctaaaaatgtacactgtctataaagttgtaaataagaaccaagtaagaaccctgctggctgaacagagccactgccaccctgtttggctgcttggttgtggggaggctcgtgccgacagctggacagcaagcgggacaggcatttgtttttgacctgcctgattatgacagtatcaaccaggttgtggttttcatgctgggaacaatcccatttcctgagagaatgggaggatctacttttcctatcctgattcaaattgaatgccggtatggcaactccaaggatttgtcacaaatgggaaaccaagtgccatctttagaatttcagatcttaaatctggagagggaagccaacatcctttgtttttgtttttgttttgagatggagtctcactctgtcacccaggatggagtgcagtggtgcagtctccactcactgccatctctggctcctgggttcaagtgattgtcctgcctcagtctcccaagtagctgggactacaggtgcctgccaccacgcccagctaatttttgtatttttagtagagacagggtttcaccttgttggccaggatagtctcgatctcttgacctcgtgatccacccgtctcagcctctcaaagtgctgggattacaggcgtgcaccaccacgcctggcccaaaattttttaaaaattagctgagcatggtggtgtgtgtgtgcctgtagttccagctacccaggaagctgaggcaggaagatcccatgaacccaggaatttgaggcgacagtgaggtatggttgtaccactccaccccrgcctgggcaacagagagaggcccagtctcaaaaaaaaaaaaaaaaaaaagtggtatatctattcaatggaatattattcatccacaataggtaaatccataccaacagaaagcagattggtggttttcagaggatgggatgagggcagagtggggagtgactgtttaaagagtatacggttttctttacagaagatggaacagaggtggtagttgtacagccttgtgaatgtactaaatgtcactgaacagcttggtcagttttggctgggcatggtggctcatgcctgtaatcccagcattttgggaggccgaggcaggtggatcacctgaggtcaggagtttaagaccagcctggtcaacatagcaaaacaacatctctactaaaaatacaaaaattagctgggtgtggtggtgcgcacctgtaatcccagctactcgggaggcagaggcaggagaatcacttgaacctgggaggtggagattgcagtgagccgagatttcgccactgcattccagcctaggtgacacagcgagactccatttcaaaaataaataagtaaaataaaatggtcaatttatgtcacgtgaatttgacctcattatatattttttaaaatcttagcaccaagacagaagcaacagcccttaattttaattgcctcagagatttttgtatttctctacgcayaaagtctctaaaaattctgccttaccttctctccttgtgcttcttgttgtttttttctcacaagtttttgtcttttctcattcttttcttcttcttctaagacatcaaaacataaaagtgctttttacttcccaagtatcttatttgaagtacaaccaatcaaataatgtatcaaaagaaagaaaaaaatctaaagtctatgatggggagaccctaacacatcacattgtcatttatgtttgggttgaatagtataaccttttaggattatggttttgttcacagttaatttgaaagggctatacattaaatactggtcactttccttttatttacttacattttaataaacagtgaaacaaaacacaatgtaccaaattcactaatgacaagcttcttcctagtagcatagaaaatatgtagtttttggttttaagattcacctattctgaggctaagtacaatattattttaaaaggcttctaggactcacaaacttttgcttatcaaaaatcaaacaggctgggtgaagtgggtcaagcctgtaatcccagcattttgggcgactgaggcaggacttgagctcaggagctagagaccagcctgggcaacatggcgaaatcccacctctacaaaaactataaaaactacaaaaattagccaggtgcagtggtacacacctgtagtcccaactactcgggaagctgaggcgagaggatcacttgagcctgggaggaggaggttgcagtgagccaagcacgccactgcattccagcctgggtgacagagcgggactctgtctcaaattaaaaaactaaaaacaagcatgatttcctaaaattaaaaacatttacatataaaagacaaaggtgcctaagtaaaaactgctagaatggaataaaacattaggatgaaaagcctttcaagattaatggtagattggccgggtgtggtgtctcacgcctgtgatcccaacacatcgggaggccgaggtgggcggatcacgaggtcaagagatcgagaccatcctggtaaacatggtgaaaccctgtctctacaaaaaatacaaaaattagctggcatggtggtgcatgcctgtagtcccaaatactcgggaggctgaggcaggagaatcacttgaacccaggaggtggaggttgcagtgagccaagatcatgccactgcactccagctggtgacagagtgagactccatctcaaaaaaaaaaaaaaaaaagtttaatggtagatacattgactctgtagaacagctcataaactgtaggtatcaaatggcagttaagcagcacaaacacacaatttaaaattagggaatttaccatataacaacttagaaatgatatagctttaaaacacatatataagaaaaatgtacaatttctcataaaaatgttgggatatactccatgcaaaacaatcatcactaatgtttaaaaaccaacacaaaaaatcatgactaaagttgtactgattactctccctgaaactacacatcacaaattaatagtaaaatggctcttactgtgcaaagttctagaataaataaattwgagtagaatggtataamagggtagaataaataataaacttacccttcagataaacttggggagatttaaatgagttaagccatgaggtagtcacagaaatarttaaagtaagaagagcaagcagtagcaaaatccggccacaaagcaaaagaaaatccttgattcctgataaaggaaaaaaactaaaattaaaattcaaaactttttttttaagagatgaggtctcactatgttgactaggctggtctcgaactcctgagctcacgtgatcctcctgccttggcctcccaaagtgctaggattayaggcatgagccaacatgcccaacccaaaacatttttcttgatactcctaataaattataacacattagaagattatttgtactggaaaagtatagtagaagttatacaactgtcttatgattttgttcatataatartcatccctcagtattcatggggtattggttccaggactcctgagtataccaaaatccacrgatgctcaagtccctgatataaaatggcacagtgtttgcatacagtctatgctcccacatactttaaatcatctatagatgactcatatactacccaatacaatgtaaaggctctataaatagttgctatactttattgtttatggactaacgacggggaaaaaagcctgtagatgttcgggacagacagacaaacatccatttatccatttttttcctgaatattttcttttttttttccttctttttttaagagacagggtgttgctcttctttttttttttgagacagagtctcgctctgttgcccaggctggagtgcagtggcatgatctcggctcactgcaagctctgcctcccaggttcatgccattctcctgcttcagcctcccgaggagctgggactacaggtgcctgccaccacgcctggctaattttttgtattttttagtagagacggggtttcaccatgttagccaggatggtcccgatctcctgacctcatgatccgcccgcctcagcctgccaaagttctgggattacaagcgtgagccaccgtgcccggccgacagggtgttgctcttcttggtcttgctctgccacccaggctgctggagtgcaatggtgagaccacggctcactgcagcctcaacctcctggggctcaaggagggcctcctgccttagtgcccccaagtagctgggactacaggcacgtaccaccacacccggctaatttctgtattttttgtagagatggggtctcgccatgttgtccaggctggtcttgagctcctgaacacgggcaatctgctcgcctcggcctcccaaggtcctgggattgtaggtgtgagccaccacacccagccctttctgaatagtctcaatccacaggtgcttaaatactcaatgtggaactcagggatacagagggtttactgtactctcctttgggcattaaaaaactcatgatggttgtcatttccasaacaaatgtacagagcataattctagaataaacactatcttgggaatacagttacaattagagcgatcagctacactatattatgaatatcagtaatgtataagttgtagtttcccatatagagaaaattacataactagaaataaaactgaaaatatcatcgtgttggtcaggtgtggtggctcacacctgtaatcccagcactttgggaggccgaggcaggcagatcagaggtcaggagatccagaccatcctggctatcacggtgaaaccctgtctctaataaaaatacaaaaaattagctgggcgcggtggcgggtacctgtagtcccagctacttgggaggctgaggcaggaaaatgtcatgaacctgtgaggcagagcttgcagtgagccaagatcgtgccatggcactccagcctgggcgacagagagagactctgtctcaaaaaaaaaaaaaagaaaaaaagaaaatatcgtgtcaaattctagttctatgataatctcactgaaacaccaaattcttatttctcacaaattgtgcaactgtgtgcttctttatttcttgacatttagtcacttgtaagtaaaattacgatttacatgcttgcggaggaaaaagtaaaaatatagtatttggtctatttatttatttatttattttattttattttttttttttgagacggagcctcagtctgttgctcaggctggagtgcagtggcgcaatcttggctcactgcaacctctgcctcctgggttccagctattctcctgcctcagcctcctgggtagctgggactacaggcatgcaccaccatgcctggctagttttgtattttcagtagagatggggtttcaccacgttggacaggctggtctcaaactcctgacctcaggtgatccgctggcctcagcctcccaaagtgctgggattacaggcatgagccaccgcacccagccagtatttggtgttatattaagaaccaaagtgaaaattatttgagcagaaatctaactacctactttgcataatacaatttggcaaatgttgagggacaggaaacaaagctgggttaaaaatgatttccatcctcttggaatttttactcgttttgtgtttttaattttcaaaagataaatggcagagatacagaggaatccaacgtgatcaaggctggtaattagtcaattaactaaaacttaaagaaggaatcagaaaaacatatatataggccgggcgagatggctcatgcctgtaatcccagcactttgggaggccaaggcgggtggatcacctgaggtcaggactttaagaccaacctggccaacacggtgaaacctccatctctaccaaaatacaaaaattagccaggcatgatggtgggtgcctgtaataccagacacttgggaggctgaggcaggagaatcacttgaacctgggaggtagaggatgcagtgagcagagatcatgccattgcactctagcctgggcaacagagtgaaactctgtctcaaaaaaaaagaaaaaaacatatatagacttaaatgttttattttaaactgaaaacagatagatgtatattcttgccttttttttttttttctttcagatggcctctcactctcttgcccaggctggagtgcagcagttgataacagctcactgcagccacaacctccagggctcaagcagtcgtcccatgtcagcctcccaagtagctgggaccacagatgtgggccatcagataatatatatatwttttttccaaatgatcctcctttcttgggcatggtggttcatgcctgtagtcccagctactcaggaggctgaggcaggagaatcacttgaacccagaaggcggaagttgcagtgagctgagactgcaccactgcgctccagcctgggtgacagagtgagactccatctcaaaaaaaaaaagaaaaaaaatttagcttaagtacaagtaaaatgtattgacaataaaggtttttacacagtagaaaaagacaaggctagtttttcaatatatgtctgaatattagtacaggcataaccagccctgctgctggtataaagtatgatgtgtaaatcagacttaaatgctgttaagaaataattattggaagctcactatcaagaatccaaaggtagcmaaaaaaaaaaaaaaaaaaaaaaagaaaaaatatatattaaaaaaagaaaacttggcctcccaaagtgctgggattacaggcatgagccaccttgcttggcccaatattctttaaaaaccctagcaatttaaagttgcttagagaagaagtatgactttaaaaaaaaaatcacggctcctccaacttgccagtattaactgttgattcaggtgttattcaatacaacacataatttaatctattttatctctggccaatacaaaagtagtttaatatctagagtattggtatgtaaagaaaccattgaggccaggcgcagtggctcacgtctataatcccagcactttgagaagctgaggtgagtggatcacttgaactcaggagtttgtaaccagcctgggcaacatggtgaaaccccgtctctactaaaaatacaaacattagccaggcacagtggtgcacaccagtaatcccagctagttgggaggctgaggcaggataatggcttggacctgggaggcggaggttgcagtgagcagagattgtgccactgcactcctgcgtgggcaacagagtaagactctgtctcaaaaaaaaaaaaaaaaaaaaacaccactgaggtgtgggatttatgttccatactactgctgttcgttctaacaagcaatttgcaaacatcacatgagaatatgaaagaactatatttgtgtgtatacctttaaagaaaaaaaattttaaggttttttcgtttttgtttttgttttgagatggaatctcactctgttgccaggctggagtgcagtggtgtgatctcggctcactgcaacctccacctcccgggttccagcgattctcctgcctcagcctcccaagaagctgggactacaggcgtgcgccaccatgctccgctaattttcgtatttttagtagagacagcgtttcaccatgttggccaggatggtctcgattacttgacctcatgactcgcctgcctcggcctcccagagtgctgggatttttttgtgtacttaaactatagaccccataagcagtgtacttcaacgtgaggaactggccttaaaatatttagcttagtcagggcgcggtggctcacgcctgtaatcccagcactttgggaggccgaggcgggtggatcacaaggtcaggagttggagaccaacctggcacaacataccgaaaccccgcctctactaaaaatacaaaaaaattagtcgggcatagtggtgcatgcctgtagtcccagctactcaggaggctaaggcaggagaatcgctggaacccagaaggcggaagttgcagtgagctgagactgcaccactgcactccagcctgggtgacagagtgagactccgtctcaaaaaaaaaaaaaagaaaaaaaaaatctagcttaagtacaagtaaaatgtattgacaataaaggtttttacacagtagaaaaagacaaggctagtttttcaatatatgtctgaatatcagtataggcataaccagccctgctgctggtataaagtatgatgtataaaacagacttaaatactgttaagaaataattattggaagctcactatcaagaatccaaaggtagcagaaaaaaaaaggaaaaaatatatattaaaaaaagaaaactgaaaagaggaaacaatccaaaggaaacaatcattcgttcagaattctgagaaagaagctaatcccatgaaaatttcaagaactagataaagatgctgccaggagcccaggtgcaatttatagaacccttgtccctagttctattaaactagacactggtaagtgctgggaatacaaaaacaaattccatttggtctctgccttcaagaagcatatttctggctgggcacggtggctcacacctataatcccagcactctgggtggccgaagtgggtggattgcttgagcctaggagttccagaccagcctgggcaacatggcaaaaccacatctctgcaaaaaaatacaaaaaataagcaaggcatggtggtgtggcccctgtattcctagctactcagaaggctgaggtgggaggatcacttgagccgggaagtccaggctacagtaagccatgaccgtgccactgcactgcagcctgggtgactgagcaagaccttgtctcaaaaaataataaatgagcagagtaggggtggatgttgaaaagacaagggaacaggtgaattgcggaaatggtgagtgtgaattcaacatttctgatcctttggataaaggtcttgttatattccaacacagcttgagtgagtgagaagcttcaggacagtctttgtacatttttttaaagcattttattttcatttcttattgcacgcaacatttctaggcatctgactccttgtgagcagggagaaaatgtggagaaagagagggagtacwcaaagccaagtttcattatggtctctaactttagaattgaccttaaaaagggagacagacatgtaaactgatcactgaaatgtccaaaaatcaactcatgattctcagcatctccacagtttttctttccatttcccctttaccagtagcactaccaaatacctaggtttgctcagtcccccatgaggyagtcgtccttgaatccttcctttcccttgccccaaacatcaacccataaacaaagcctgttggttgatcctactccgtcaatatcccaattctgtctacatttcatctcctgttattgttctagtccaggccatcatcaccacttgtcaacttccaaagcctgatgtgcctcactgcttccaccatagcttctgtccaaagcattctccatacagaatcgagtgacctttttaaaacttagggaagtcacttaacctccctaaattttagttccctcaactgtaaaatggggattataatagtgcctaccctcctctgattgcagtgcagattaaatgagataataaccagcacctggtgtttggcttataataggtgttcaataaacgtcattatcctgagccaattcctcctcctcctcctcccaactctccttgattcagccacaatggccttcaccttttcctccaacgtgtcacaatctttttgcctaaaatattcctcccctcccccatcccttccctgcccccactggcttttcacgggcgtggccccttatttaaacctagggccgggcgcagtggcgyaggcctgtaatcccagcactttgagaggccgaggcaggaggatctcttgaacccaggagttcgagaccagcctgggcaacatagtgagaccctgtctctaaaaacaaaacaaaaaacttctcagcctaaattctcacaagaccttcatcttatcaacctgtttatttccttttcagtgttcgccaggatgcgaaagcactgtctatgattgcccctgtgctctttgcctctaccctcttacacgtaaaaccatcacacctggagggaaaaggttcctcgaagtgaagtcagctccggaagtgggggggcaggggcgatgcagtctgggagttgtagtcaaagctgctccgaagccacgcagccgaagaggcggtcgttctatgcaacattcctgtgaaaattacccagctgtgactgtcgaagggaaaaartcacacttacctatatccgggatcccacgccggagctccagacacayaagggggacagcagagaggaagaaaatgccaacaaccccacgtgaagccatggtggcggaagcgcctggtgcargcggaaagcccgccccttccggccgcgttttccgggaaggaagtggaactcttcttgccgcgggccrgctggagagggtcaataacgtggtarayactgacggccgtgtcgttattgagggggagctaagccccgtgttttaaagttatagtctgtagccgtgtttcagaagaaaggcaagtcgtcccccaagtcacatgatgtccagaggagcctgggctctagagcggtggctccctggagggtagcagggcaggggctgccccttcggtctttgcagcgtctgtgagaaagcgctttccagagggaaatgaagccgaagaaaaagctgatgctgtgaggaggcagcctgggccccccggccttgtggccgtataggatgaatgtgggctataacaccttccttatctccctaacggttcctggttcctggccccgtccgcagtctctggttcctgcggaaagacaactcgaaagtggggcctggctccaaatacctgccccctaacacgcacgtcctaatgccaggtcctggagacccgctaccccttgttccgccccttttcagttttgcctgcacgcgttattgttaaccttgacttcatagttccatgacctcattgccgtcctataactcaccactgtgcacttctcccaagctactgaggtcctcccaatctacaacatttcgtacttggaaattatctttcctggccaggcgcggtggctcacgcctgtaatctcarcactttgggaggccgaggcgggcggatcacaaggtcasgagttccagaccagcctggcaaatatggtgaaaccccgtctcyactaaaaatacaaaaattagccgggtgtggtggcggtcgcctgtaattccagctattcgggaggctgaggcaggagaattgcttgaacccgcatgcggaggttgctttgagccgagtttgcaccactgcactccagcctgggcgacagaatgagaccccgtctcaaaaaaaaaaaaaagaaagaaagaaattatatttcctggctaagcgcggtggctcacgcctgtaatcccaacactttgcaagaaaaaagaaaattctttttcctgacccatccatctagcatcccacctgactattcagtttagttcatctgaaatttattgagctccacagtttggtactctacaactcttggatattcaaatatttacaagttactgaatttgtcctcaagaaactcagcttatccgactttstggttctatggagaagaaaaaaaaaaactgggaaagatagccctgtaagcaaataaacayaatgcagtkcctgagtgctatgatagagatatacacagggtgttgcagaaccatacccagaaggcttgcaraaggctttccaaaaggaagtcacgcctacgttgtgttcaaaggttaggaatctgggcaaggatgtccgggaagggtgggatttcaagtttaggaacctgagtgcaaaggaactaccagtgattattgctgcagtttagagcttgaggccgggcgcggtagctcactcctgtattctcagcactttgggaggcggaaggaggcagattgcttcagctcaggagttcgagacccctctgggcaacatagctaaacctgtctaaaaaaaaaaaatagctgcgcgtgatggcgtagcctgtgctcccagctactcaagaggctgaggtgggagaatcacttgagcccaggaggtcaagtctgcagtgagctgagatcatgccagtgcactccagcctgggcgatatagtgagaccctgtctctaaaaataaaataaagctgaatgaaggcttttagaggtagattgttgctagggccgcagaggctttcctttgtatataggctaagaactttatcctccaagcaaaggtgcaaaatattagggcacaatctgaagatcagtaagggtgaggtaatataaattacagcatgacataccataaaataattaattatattgactagttcagatgttcccatagttgtctgtatcttgtgttcatcatgcataaggaggaagacaggaaagaaagttctacagtctgtatcttgtgttcatcatgcataaggaggaagacaggaaaggaagttctacagttcttaaccacctacctcctgtatttttttcttcctccctggtcttccatattacctaatttaatctgttgatggcgccattgaatctctctctggactacaaaaggcagttcctaaccaatccaaatttaccttgtcttaacatatgggaagccagcatttcccaaactttgttgtttgtgaactctcttcactgcaactgctagctctccccaccaaagaccaccagaataacctgtcagtaagtaaatttgagtttcttacagcattagaaaagaacattgtggccgggcgcggtgactcacgcctgtaatcccagcactttgggaagccgaggtgggtggatcacctgaggtcaagtttgtgaccatcctggccaacatggtgaaaccctgtctctacgaaaaatacaaaaattagcctggcatggtggctcacacctgtagtaacagctcctcgggaggctgaggtaccagaatcacttgaactcaggaggtagaggttgcagtgagatcataccactgtactccagcctgggcaatagagtgagactcagtttcaaaaaaaaaaaaaaaaaaaagaacattgctttgacataatcttagtcgtgtctcagaggggacgtcaagggtgatttttatttgtttatgagacagggtctcactctgtcacacaggctggagttcagtggcacaatcacagcccactgtagccttgacctctcagggtcaagcagtcctcctgcctcagcctccagagtagctgggactgcaggcacatgtcaccatgcctggctaacttttttattttttctatagacagggtttcaccatgttgctcaggctggtcttgaactcctgggctcgagcaatctgccagcctcggccttacagagggcgatttttatagggttctatagtctagttagagtggtttaaggtggtcttttcaatatggagatttcactgggattggacatagttcatggtagaatagtttgagacggtacacccaacaaggtgaagaaattgaagttagattttccctcttttttgacaaggaaggtgatttgcccaattcaatgatcagctcaacttctcagtgcctgagaaggaagctttgcagcctgatgagcaacttagagaccagataaatgggaagttcctaaagctcagaatgaaggtatggattgacctatagcctatcttcgtgagtaagaattcctggaacrgtaaaatcaggttgatttagagctcttagttctcattggtgattgttaagctgtaagttactggtgtctccattctcaccaaaagggtctcactcttgtcacccaggctggagygcagtggcacaagcatagctcactgcagcctggaacccctgggctcaagcgatcatctcacctcatcctcctgagtagctgggactacaaacacatgccaccatgactggctaatttttattttttctttcctttctttttttttttttccaggagatggggtcttactatattgttcaggctgatcttgaacwcctggtctcaagtgattctctagcgttggcctcccaaagtgttggaattacaggcatgarccacsgcacctgaccatatgtgtttttttccttgtaggaatttagaaaattgccatgccagctgtgccctaaaccctcaaaaagtagctgactttttgtttccttaaccttagggtccatcttagttgataaaggggtaaatagttgtctattttagtctctcagatcacaatttttagttttttttttagagagatgaaggtcttaccatgttccccaggctggccttaaactcctgggctcaagcaatcctcccaccttagcctccagagtagctgggagtacacgtgtgcatcaccacgcccaactattatataatttttgcatttaaaaaatcaattattggccaggtgcagtagctcactcctgtaatcccagcactttgggaggccgacgcgggtggatcacgaggtcaggagatcaagaccatcctggctaacacagtgaaaccccgtctctactaaaaacacaaaaaattagccaggcgaggtggcgggcacctgtagtcccagctacttgggaggctgagacaggagaatggcatgaacccaggaggtggagcttgcagtgagccaagatcgtgccactgcactccagcctgggcaacagagcgagactccatctcaaaaaaaaaaaaatcaattatttttttcagtattttattataaaaattttcagaccaacagtggaaactatttttactcacattttattctccttatttgataacatacctatcaatccctccatcctttcatcaatcttagtttttgatgcctttcaaagttgcaaacattagcagactttccctgaaatacttcgacatgtatatcattaactatgtcacaagtatatacgtagaagaggctaaagatcacctctccccatcttaggtcttagctgggactcatataataaaagacagattaacaagaagaaaacaagtttattaatgcatactgtgtgcattagacaggagaaatctcagtgaaaagtaactgaaagcaatggcttagaattctgtcttatcagagtttaacaaagaacagtgaatttggggggaaatgacagggcaaaggaaggtggttttaggcttcagaaggtgggaggctgtgggaaggtaactactgcatatgcaaggaaactaatgggataagttttgtttgtagattcctctggtgccactttgggctggtaagagtcttgagctgcctccagtaaaggagaatgtatgtcctggatatacatacaaaggatagggagagctttttctctgttttctgctttttttttttttttttttttgagacggagtctcgctgtgtggccagactggagtgcagtggcactatctcggctcactgcagcctctgcctctcgggttcaagcaattctcctgcctcagcctcccgagtagctgggattacaggcacatgccaccacgcccagctaatttttgtatttttagtagagggtttcatcatgttggccaggatggtctcaatctcttgacctcatgatccgcccacctcggcctcccaaagtgctgggattacaggtgtgaaccaccgcgcctggcctgttttctgctccttaattgcctttggccaaaaaataatttttatctcaaagaggcatatcttggggtggcaccttctggtttccttcacatacttcatatgatatacatacttcatcgtgcatatcattaaacacaatgaaatggacacatcatgagcataccattccttgagttccaatgtatgcatacccagtgcaacctaaatcccaagcaagatacaaagcactgactgaccgtggcggctcatgcctgtaatcccagcactttgggaggctgaggtgcccaggagtttgagaccagcctggacaacatggtgagaccccatctctacaaaaaaacacattttttaattagctgggtgtggtggcatgcacctgtggtcacagctactccagaggctgaggcagaaggatcacttgagcccaggaggtggaggctgcagtaagctgtgtttgtgacactgcactccagsctgggcgacagagagagaccatgtctcaaaacaaaaagcaaaaagcattgcacagagagcaagcattgctctgatttttttccaccataggttaattttgcctcttctaggacttctgtaaattatacaaaatgtactctttggataaggctttgttcacactgtatgcttttttaaacattttatgagataattataaattcacatgttgttataagaggtcacggagattgcataaatcctttaccatttcccccagtgttaaaattgtgcataaggacagtataataccataaacaggaaatatatattgacacaatccagtgacttcattcagattttaccagttacagatactcatttgtgtgtgtgatttagtttttttattttatttttattttttgagacagggtctcgctctatcacccaggctggagtgcagtggcacaatctcggcttactgcaaactccacctcccaggttcacgccgttctccttcctcagcctcccgagtagctgggactacaggcgccygccaccacgsccggctaattttttgtatttttagtagagacggggtttcaccgtgttagccaggatggtcttgatctcctgacatcgtgatccrcscgcctyggcctcccaaagtgctgggattacaggcgtgagccaccatacccggccatgtgtgatttagttctatgcaatattatcacctgtgtcaattyctctgaacactacagtcaagatatagagtagttccatcacaggaattcctcatgctacccttctacagccaaaccacctcactttctaccctcaccaccatcaacccccatgaaaccactcgtctggtctccgtctccttttttccccctccatcttaattgaggtataattgagttaaaatccatctctttaattttgtcatttcaagaatattatatacatgaatcatacagcagcaacaacaacaaaaaagcctyttttgagatggagtttcactcttgttgcccacgctggagtgcaatagcacaatctcagctcactgtaacccctgtctcccaggttcaagcgatyctcctgcctcagcctcccgtgtagctgggattacaggcgcccgccaccacgccyggctaattttttgtatttttagtaratacgaggtttcaccatgttggtcaggcaggtttcaaatcctgacctcaggtgatccacccacctgagcctcccaaagtgctgggagtacaggtgtgagccaccgtgcctagcttttttttttttttttttttgagacggaggctgtcgcccaggctggagtgcagtggcacgatctcsgctcactgcaagctccgcctcccagattcaggccattctcctgccttagcctcctgagtagctgggactacaggcgcctgccaccatgccggctaattttttttgtatttttagtagagacaggggtttcaccatgttagccaggatggtctcgagctcctaaccttgtgatccgcccgcctcggcctcccgagtgctgggattacaggcgtgagccaccgcacacggcctttattattattattattttttaaaaagacagagtcttgattgctctgtttcccaggctggtctcaaactcctaggctcaagcaatcctgcctcagccycctgagtagctggcactacaggaatgtgtcattgcacccagctgttactgactttttgatgagaagtttttaattttgatgacaatttatctaagttttcttttatgattattgctttctgtgtcctaagaaacctttgcttttcttgaagtcgagagattctcctattttttttttttttaaatagacacagggtttcaccatattgttcaggctggtcttcaactcctgagcttaagcaatctgcccaccttggcgtcccaaagtgctgagataacaggcatgagccaccgtgcccggcctctatattttcttctaaaagctttgtattttagcttttacatttaggcttatgaaattgctcttttagtagtctctttttcccccctaaaaaataagatggctacgtgtgtgtgttggttgttgttgttttaacagggtccaatcgtgttgcccaggctgcagtgtggttgtacaatcacggctcactgcagcctccacctcccaggcccacgtgatcctcccacctcagccgcctgagtagctgggaccacaggtgtgcactaccatacctaatttttttgtttgtttgagacagggtctcgctctgttgcttaggcggagtgcagtggtgagatcacggcttactgcagccttgaccttctgggctcagactaggcaccaaaatcacatagacttgattcatccaatgaacaataaatatgatgcacctaccacaccccaggtgctgttacagatgctggagatatagccacaaataagacaagattcttgcacaccatggagtctgtacactagtgtgtgatgactagttttatatgtcagctgggatggtgtttttggatgaaattaacatttaaatcacttaactctgagtaagcagattgccctccattatgtgtgtgagcctcatccagtcagctaaaggcctgaatagaaagaaaagamcagcttccccgagtaagagtgatttcccaacagactgcctttggactggaactgcaccatcatrccaaaaagcagaaggtaacacaagcaggagaaaaaaaaatcaatcaacagaaacagacccagaaatgacagagttgatggaatccacagatacaactttaaatatgtcaacaaggaaaaatggttatgctagactggtgcaattatgatttttttcttatttttctaaatatatgaaaattaaacaaaaagaacattaatcccttatatgaatatttattttttgatgatgaacattattcccaagaacagataaatgaaggaaatgataaacaccacatttaaracattgattacctcttgggggagggagacagggagaagggtgcaactgggatagctatgtagaactagacagtgtggtagtactacatttcttaagctaagaggtgtggatgtgccattgtattattctttatacaggtactttgtttatcttaaatattgcaaaatacaattcaaaaataaacaagggctgggtgcagtggctcacgcttgtaatcccaacactttgagaggccaaggcgagtggatcacctgaggtcaggagtttgagactagcctggccaacacggtaaaaccctgtctctactaaaaatacaaaaagtatctgggcatggtggtgggtgcctgatatcccagctactcaggaggctgaagcaggagaatcgcttgaacccaggaggcaaggttgaagtgagccgagattgtgccattgcactccagcctgggagataagagcgaaactccgtctcaaaaaaataaaaagtaaaaataaaaataaacagttacagaaacaataccacatatttatattcagaataggagtagtagtgttatttccaaaactttttatgatctcccccatgatctttcaagatatgttactgaaaygagatcaaaagcgtgaaagagatcctcagtgcatgtgtgatttccctttagatgttatcttctgaggatgtatccagttttctcaacaaggcagacttgctatgtccctctgaaaatttctttccctttactgtataacttgctttttgttaattccacgtttagttatagttattgttctctgcctcttcagtgtttatctttcatctcaatattaaacactgatattgggtaactgagtaatgttcaattattcctttccttgtgttatttttatcctaagtgactgcaattatcttcatacatggaacatgaaaaattttattgagcaacctgtatttgcaaagttatttctgtaccactatttcctgcataaatttctcaaattgtttatagaagtaccatcaccacctttcgggtgacacagtatctcttgacctacaacctcaacacagagttgtaatatgaattagtcactattagtgggaaaggacttttttgtttatttgttttgaaacggagtctcactctgtcccccaggctggggtgcggtagtgtgatctcagctcactgcaacttctgcctcccaggatcaattgattctcctgcctcagcctcctgagtagctgggattacaggcacatgccaccatgcctggctaatttttgtatttttagtagagacagggtttcaccatgttggccaggctggttttgaattcctgacttcaagtgatccaaccaccttggcctcccaaagtgctgggattataggcgtgagccactgagctcggcgttgtttttttgagacacactctgttgcccagattggagtgcagtggtgccatctcagctcactgcaaccatggcctccagggttcaagactcatgtctcagcctcctgagtgggtgggactacaggtacacaccaccactctggctaatttttgtatttagtagagacggggttttcctgtgttgcctaagctggtcttttattttcactgtaagacatactcagtgatggtttctttctaataatggttaataggcttctgagttaggccttcagaatttgaattcctgctctgccattcaccagctgtttaatttttaaatttttttatcgttacagaatttttatttgacgatcctagcaaaacatccacaagtcaccagctgtttaatcttgtgcaagttatttaacctctttgaacctcagtgtccacatctataaaatggagacaataacagtacagtatttatttcttgggttgagggaagataacatataaaggtcttagcacagtgcttagctcaatacaaattaattatgggtttattattttgagaaatatttcataatgtcttcatagaaatcacctacgtttgtccagtggggttttttttgagacacggtctcactctgttgctcaggctggaatacagtggtgtgatcacatttcaccacagcctcaacgccccgggctcaagtsatctgctacctcagcctcctgagtagctggggctacaggtgtgcaccaccacacctgactaatttttaatttttttgtagagaccaggtcttactatgttgcgtacgctggtctcgaactcctagaatacagtgatcctccttctgtggcttcccttcccagagtgctgggattacaggcatgagccactgtgcctggcatcctctagtgtttgaaagaaattttttttttttttaagagatagtgtctcattctgtcacccaagctggagtgcagtggtgcaatcatagctcactgtaaccttgaattcctgggctcaagtgatcctttcaccttaccctccagagtagccaggactacaggtgtatsccaccacacccagctaatttttaatttttttgtggatatgaggaactcccctatgttgctcaggttggtctcgaactcgtgggcttaaggggtcttcctgcctcagcctcccaaagtgctgggattacaagtgtgagctactgcacccagcccaaaatggtgatttttgtgtgttccatctccatttattacatgtcagtctgtaggaaggaagaactttccctttttcccttaaattttgtaatcagaaaaaaatttttgtaaaagaattggatcccattctaattgaggtgtggtgtgtttccattctccttcattgtgctgggcctcgctgccctgtgacctggaccttccttcctttgccwaccgggctcagccgtgtgctcggatgacctgtgcactgtccttgtgggcacaggatcgtggcctaccacaagacaaattcgaagctgcacttactactttgttgtgcagttggtagttgtagatattcccaaaggagacccagtctctacagcttgggagatcaatgtttttgtgtctccatctctatccttttctctgtgcttcatctgtggatcacaaaaaccgctactccgaattaatccactattccaatgtttctcaaatttaagagtcacctgaaggcaagagacagtgttggtcaaaatgtagttcctagctgggcacaygcacrcctgtaatcccagctactcgggaggctgaggccagaggatctcttgagcctaggaaaggagtttgagacccctgactttaaaagaaaaataaggctgggcacggtggctggcatctgtcctccctctgcctggagaaagtccttttcctctttagaataagtaggtacaagatcaggtgcttgagggagcaggggggctgtcactgatgcccggaagggggcagatgctgcttttcgagcctctaagtcagcgtgggaattccccaaacccaccaaggtggaagctcgctggtgtcctctgcaatgtataactgccaccttgtggggtttccatactgcttctaataattgcaagatttcttgttgatattttatgtcttttcccccagagttcaataggcccttttctttatataatgctccatgcacttgaagggttaaaaaggcatatcaagagtcagtgtaaatgtttacagtcttaccttcactgagttctaaggcccgaattaaagcaatgagttcagctttctgagctgaagtgccctggggcaacgatctggcttcaacaacagtgtccagagttaccaccgcataccctgcaaatctctctccttgtgggttgataaagctgctcccatccacgtatagttcccagtctactgatgcccaaggctggtcccggaggtcaggtctgctagagtaaactgagtccaacacttctacacagtcatgctcaacagggctctctgatactgggaacaaggtagcggggttcagggtgttacaaacttcartggttatacggggattttcacaaagcaaactttggtacttagtgagtctagcactcrttagccaatgatgtcctttagtattcattaaagtcaccacagcatggggggcctttatgttccggttttgcccaagagtcagcttatctgcttcttgtactagcagggcagttgctgccaaggccctcaaacatgggggccatcctttaaaaaccccgtctagttgtttagagaggtaggccaccggcctcggccagggccccacagtttgggttaaaactcccaactgccatcttttctctctctgacacatacaatgtaaaaggctttgtcagatcgggtagccccagggctggggctgacataagtctttcctttaactcatgaaaggcttgctgttgctgggatccccattcaaaaggttcccggtcccctccccctttgtgacctcatacaaaggcttagctaatactgcaaagtttgggatccacagtctgcaaaaccccacagcccctaagaattctctcacctgccttctggtcttaggctccggtagattacaaatgacctgctttctttctgatcccaggctgcactccccgtcggatagtaaatcccaagtaacgtacctgctgttggcagatctgagctttttttcttggacaccttatacccacagtcctccaggtgccggagtagagcatctgttctcttggcgcacccgactgccgtggggtgtcccagcaaaaggtcatcaacgtactggagcaacacgcagcctaggtctctggtgggaaacttctggaggtctcgagccaatgcctccccgaagatggtgggggagttcttgaacccttggggaagccaggtccaagtgtactgagtagtgacacctgactccggatcttcccactgaaaggcaaacagcttctgcctctcaggggctaatctgatgctaaagaaagcgtctttcaggtccaagcaggtgaaccagctgtcctcagctggcagcaaccccagcaatatgtacgggttaggtactgttggatgtaaagtcactgtagcctgattaaccaagcgcaaatcctgtaccagcctgtagtccttggtcccaggcttgggaacaggcaggaggggagtgttccatggagactgacaaggaactataattccaaaggttcttaggtgcttgagatggacctggataccttcaagagcttctctggggaccaggtactgtttttgcctaaccggctgggccccgggcttaacttctataagtacgggggcttcgttgactgccaaccctggaggttgtcttccgcccacactcttggccaccgcttagccagagctggtcttatctcttggcccggctcagttaacaaaagtctccattcctcctctcgggggaccgtaagggtcataatgactcccgttccgggtaactttagcagcaaagagccgtgctctgtaaaagagatagtggctctcagtttgctaagcaagtcccttctcaacaagggcaagggataatcaggcatgtacaaaaactgatgaatcactttatgtcttcctacagtacaagtccggggcaagcagaaagcttgttttgctgaaactcccatggctccgatgatgtcaatagtctttttggataagggggcgactgggccggttactaccgaatgttcagcaccggtatctataagaaaatcaatgtctttacccccaactgtcatcctgaccataggctctttgggagtccttgagcccggtccccctcagtccaataacccttctgccaggttgagcagggccccttcctccttgtctggagcctcctgctccgagtcaccttgttttccttttagctgagggcatttgttcttccaatgtcctatttctttacaataagcacactgattacgctgcaagctctgacagccaggctgagtttctttcccggggccccccttcccttgcctttttgtgggagatccctctaattgctgcagctaacagctcggcatttcgccgggcctgacgttcattctctctgcggttttccttacggcttactgcatccctgtttacaaacacctggttagctatttctaataattgtgatgtgttcatccctgcaaacccagcctgtttctgcagttttcttctaatgtcttctgcgctttgactaactaaagccatgttaatcatgcgttgattttcagggctatcgggatcaaagggagtatacatgtgttaggcctcacacagtctctcgtagaattgtgctggactttcttcttttccctgaatgacctcagagaacttattaacgtttgtggccttctgggctcccctctaatccttctaagagagcttccctgtatcggtttagcctttgcatatcctctctttcatttgggtcccactgggggtcggttcccggtaactgggtccttacatactcttgggggttttggtaatcagccggtgcatgttcccctagccacttagttgctgcttggagcactctccgcctttcatctgtgttaaagaggaacatgagcaactggtggcaatcagcccaagtggggttatgggtctggataatagtttggagcaaatcaattagagcttgtggcttttcagtacaggacggggtattgtttttccagttgagaaggtcggcagaggtgaagggctggcacacaaaaacacgcctctccgccatgtgcccatcctcatctattccagtataccgctgctctctcaaggacatttgtatccccgttttgggtcttaaacgagctgccaagggaggggtttctcctgaggcttcacctcctctcttgtctactctgggtggcctagggatatgtttgtcttgcggaggcacaagcactgtggactcaaaagtggggagcctctctccctggtaaggggagggcaccactgggatgacttttgccatctcctgcaatggatcatctgatgttgggtcgaacagaacttcaggagttgatttccctcggtgggtggagcgggatccttccttgactatctgtccctttgctactagcactgctgctgcctgccctcttacccactgtggtaaccaagtgtctatgtatggaaactggtctgagtgtcctgacttaccagttaccttgtgccataccttagaaacaagggacctgtccaggcttccttctgatggccaacccacttctaatgttggccaatctatttcacacaaagttctaagtttccctggtgtcatagtaaccccatagtcgccattaaatcccttcttaaaatttttcaacatagttcctagaggagtaggcttattttgtgtctgacctgtgtttcctcaagacaaaacaccaagctcacaccaaacgcacaccacaaaacaaagaatgggtaaaaagggcacacacgcactttttcagttttcaccaaaccagaatcaaaaccaaaatcagagtatccagtaatccaagccaggtcaaaccaaaaccaaagtgtcaagcaattcaagtcaagtcaaaaacaaaaaccaaagtgccagtacaggcacgccgtgggtgatcaggccatgcttccactcaaatggagtgggcaagttccgaagaccagtcttaccaagtttcaaatgtccggactccaagtgcctgttccttcccggtgttcagccactgcgttgatactccacgggggcctgccacgcactgctctgactaggcgttccaccggggcaattgcctacccaggagcgctcgcaggatccgcgtcgctcaagctggcgggagttccccgcagggatgctccacagggcaggcctaagccccctaaggggctgcctcgactgtccgtcaattacctcgcttcccagtcagggaaccaagaaatatagcaggatgagtcacagacaaaactcctcagacaccagattaaagcaggaagaggttttttattcggccaggagcgttggcagactcgcgtcttgagagccgagctctccgaaaaagaaattcctagcccttttaagggcttacaactctaaggggtctacgtgaaaaaatcataatagatcaagtaagcgtgggaaacgtgactaggggctatatacatcagctaacagaacaaaaagttttacagtgctttctcatacaatgtctggaatttacagataacaccaatagttttggtcaggggttaataatattattattatcttagccaccagggccaggtggtggtgccaaggtcgtctagctatttatcttacttctgtttctttccaactttttgctttctcccttttctcctgtcttataaactagggaaaaggggaggttggggagaaactgagaaggacaacaggagaagtggtgacctcataccataatcctagcattttgggaggccgaggtgagagaatcgcttgaggccaagagttccctaccagtcctggtaacatagtgagaccctatttctaaaaaaaaaataaaaataataaaaaaaataaaaaaaaaattaaataaataaataaataaattagctgggcgctgtggcgggcacctgtagttcccagctaccgggaaggctgaggagggaggatcgctgcttgagcacagtaggtggaggctgcagtgagcagagatcgcatcactgcacccctgcctgggggagagtgagacccagtctcaaagaaaaagcaagaacaaacaaaagtggtctctggaacaaacctggacaaacaacccttcgaatagaggcaaatttctcttcctggagaagccgtgccactggcaactccccagggggccagctcgggaaaagccagctgaaacgagaggacgttcaccgttcctcgcctcgatccaccggacttcagaaggctacacgcggcaggcgccgctcgggatccaggggccggggtgagaacggaggcggagaaacccctcaggctccgccaccggggcggggaactgggaggcggccccgcctctgggcatcctcctgggtcttgcctagcggcgggcgcatgcttagtcaccgtgaggctgcgcttgcccggggcccgcgcccccctaccccggggaccgcccccgggccgcccgccccacttggcgcgccacttccgcgtgcatggccctgctgccccgagccctgagcgccggcgcgggaccgagctggcggcgggcggcgcgcgccttccgaggcttcctgctgcttctgcccgagcccgcggccctcacgcgcgccctctcccgtgccatggcctgcaggcaggagccgcagccgcagggcccgccgcccgctgctggcgccgtggcctcctatgactacctggtgatcgggggcggctcgggcgggctggccagcgcgcgcagggcggccgagctgggtgccagggccgccgtggtggagagccacaagctgggtggcacttgcgtgagtaccgccggtttgttcgggcggggggcgcctctttgtctcggtctttcgggggacagcctgtgctcgttcctatggcgatcctgtcccccggcgctgggctttcctcttttccacccccgcaactccccattccgaagccaggaacccagcaggtggaggagagagaggcgtccgggggcttctctgcggcccgcaaagccgagccagcgtctgcttccgcacggatgcgatattgaccagggccggggcgggttagattaaccttcctccatcctcacttgtccaagtgggagaggattggattctgttcttgaccgcgtgaaacacaaaactgcatctgggaacattgctggtggcctgtgtgtagggacgagggtgacggtgccatagatcctggttcttgaaaaatgtagatcctggttctcccgtttcaagggcagaatgatttatagcggttgttgtcaaccttggctacacattcgaatcacctgagggtgcctggattcccgacttaattggtctgaggtgcacttgggctttgggatgtttcccgacttaattggtctgaagtgcagcctgggctttgggattttcgggtgatctgaattgcagccaaggcgaccttgagtaggtgagttctcagagcttttgttttgtcttggttttatgtggattgcaaaactaaaaacagagggatgtaaatcctgagatttacaaaattcataatttttgaaaataagggtttttgtttgtgtttgttttttgagacagggtcttgccctgtcacctaggctagagtgcagtggccatcatagctcactgcagcctcgaactcccgggctcaagggatcctctcaccttggcctcctgagtagctggaactacagggggctaatcaccacgcctagttaattattattattttttgtagagatgggggtctcgctatgttgcccttgctgatttcaacctcttggactcaaccgatcttcccgcctcagcctcccaaagtgctgggattacaagcctgagccactgcactcattctaaaaataaatgttgtttccaagttattggtgtgcccgcccttttctatcacaagatttgggtgttgacgattaaaatgctgtatccaagaggaacctgggatttgggataggttctctaaattcctttggagatgaatatttaaattatgtcaaattgggagctctttaaggacagggatgggcttctgtgtttgtgtgtctcttatcaccttaaaatcccttgctcaataagcac

SEQ ID NO: 96218 - DNA, 17799 bp, Homo sapiens
caccccatcacacgacgagacctcttctctcaagagattcagctggacatggccctggcctcctttgatgaccagtacgctggctgtgctgctgccatgacagctgctctcccggatctcaaccacacggagttccaggccaaccaggtgtatgcagacagctggacactggcaagcagccaatggcaggagcgtcaggccaggtggccagagtggagtctcagccccacccgtccatccccgccacccctgggcttccgcgatgagcatggggtggccctcctggcctacacagccaacagccccctgcacaaggagttcaatgcagccgtgcgtgaggcgggccgctcccgggcccactacctccaccacttctccttcaagacactccatttcctgctgactgaggccctgcagctcctgggcagcggccagcgtccaccccggtgccaccaggtgttccgaggtgtgcacggcctgcgcttccggccagcagggccccgggccaccgtgaggctggggggctttgcttctgcctccctgaagcatgttgcagcccagcagtttggtgaggacaccttcttcggcatctggacctgccttggggcccctatcaagggctactccttcttccctggagaggaagaggtgctgatccccccctttgagaccttccaagtgatcaatgccagcagactggcccagggccccgcccgcatctacctccgagccctgggcaagcacagcacctacaactgcgagtacatcaaaggtaggagggcaagcgctggtcggcacctgtgcggaaggtggaccttccacatccaccagggactttggcaaaccgaagcccctatctcctgtgtcccagggatacataaatacaagtcatatccaccagctcccaaccccttccatctaaggggagacataaccttctgaggggtgcacttactgcccctgaagggatctaagccatagttcgccacttgcctgctgggaggctgaagaggtttcctggccaacgcagcggtctctggccatttgagtgggcaagcagacccggtcgggcttttctcctggtcagaggctggaagggaattattttccagccagattattgacacctagatagctgttgccagaaatgagtaggagtcccaccctcagtttctgagaacagtgcatttatgagatggaagaggaattatgtgctgaagggtgtgctgggtggggtggtgggggcaaggagacagcagttgggtgctgtgcccctaaggtccagctcaggctgtggtcaggaagtggtggatgctcctcctgttcatgtccccagcacaggccagaagaagaaccatgaggatgggcccaggttcttaatttctgaagggctatgggctttacttcctatcttggacaacatcaggagcatgcatgagttgacagaaggtaaggagggcatgcaaagaaaacaaaccaggctggggcgaggcatggaagagggagaggtgagtgtggcagggaggcaaagttataggcccagggagcaggagtgccccagagtagaccctggctctgatggcccactcccttctggccctgctgctcatgggtcgaggcaaacctagtcaagggaggttccaccatgaaagagcagaattagggggaaatgcaccaacttctcctagaacaagtcagggatggactaccagggctctgaggtccctttccatcctgacagctcctgagcctttcattctttactgtttcttttctatagacaagaagtgcaagtctgggccttgccatctggataattcaggtaagggctgcaggcacctgtgggactcagttcagggatgagcaggctgctctggggttggccccatcacctcgatctttttttttttttttttttttgagacagagtttcactcttgttgcccaggctggagtgcaatggcacaatctcggctcactgcaacctccacttcccgggttcaagccattctcctgcctcagcctcttgattacagctgggattacaggcgcatgccaccaagcccggctaattttttgtatttttagtagagatggggtttcaccatgttggccaggctggtcttgaactcctgacctcaggtgatccatccacctcggcctcccaaagtgctgggattacaggcgtcagccaccgtgcccggcccacctgaatcttttataaggaaacaactgcattaataataaaaaaaagtgcactagctgaagtggcaccttgggggttgccagccttagccaggagatgagtgtgtgggagagcagatggttgagggagcagggacacctgctctccagcctggatctgcctatcccttgcaggaaaaggccactgatcaggcccctgagagattcaggctgcactgaggtgagggacagaagggctgctccccacaaagtcctcctttggtccttctctgcctcccagtgcagaacccactgtctctgttactgccctcagggctccctcaaacccacctttgaaggccatgaggccaggcttttggtgctggaggcctgggctctagtccaggctctgctctaactttctctacgaccaacccattctttctctgtgcctcagtttctctgtgtgtataataagcaaattggaccagatgatccccagctatgactcttctcttccctcggacacttggtgtgccaaggcctacccaggccaccatgtttctaggtgggaatgggccatttccagggaagaaacagcagctcctccccaagccttcagaactcctttgtccttcagaactctgtgagtgggcaggaaggaccccccagcttcctctgatccactccaggcacatcatgccattcatcctcaccacaccccagtggtactgtcatcacctctgttctgcagatgaaagtaccaaagcacaaaggggcaaagagaggccgggtgtggtggctcacgcctgtaatcccagcactttgggaggccaagatgggcagatcacctgaggtcaggagttcgagaccagcctgaccaacatggagaaaccccgtctctactaaaaatacaaaattagccgggcgtggtggcgcatgcctgtaatcccagctactcgggagactgaggcaggagaatctcttgaacctgggaggcggaggttgctgtgagccatgattgtgccattgcactccagcctgggcaacaagagcgaaactctgtctcaaaacaaaacaaaacaaaaacaaaaaaaatcaaaggtgcagaggagaagcaactggccctgtgccacccagctactaagaagtggagtccagagagcctggctcaagagccaaactctgaaccaccacaccaggatagttcccacccctccccagacatcatctcatctcatcatctcatctcatctcatcatctcatctcatctcatctcatctcatctcatctcatctcatcatctcatctcatcatctcatctcatctcatctcatctcatctcatctcatctcatctcatctcatctcatcatcatctcatctcatctttactgcacagtaatctatgggaaggaggcagaacaggaggcattaccccccttatatggtcaagtgagacccagagacaaattatttgctcaaggtgacaatgagtttatggcagagccaggacaagaagccaggtttccagcttccaacccaggcatctttgagttctgattatgtaattccagatactggaaaagtttaggatttctccttctagtccactccacacctctcctaccagggtttgggtagaggagccaagttcagccacagcagatcccactctgatcttaaatccatgtttcatcccactctgcagcaccttatttgtggcaatagaaggcagttaagttagacccaatgacctctggaagagaaactgggactctaattggtctcatctctgtctaccttcctaaattctttattaaaaaaatttttttttgagacgtggtctcagtctgtcacccaggttggagtgcagtggcaccaccacagctcactgtagcctcaaactcttgggctcaagcgatcctcccacctcagcctcccaagtagcttggactacagatatatgccactacgcctggctactttttgtattttttgtagagaagggttctccctatgttgcccaggttgcctaaaattttttaagccagtcaaatttagcagtggggggactgtacatcaactttagtgacactggtgttaataagttctgataacccattaccattggaccagctcctccctaaacttgatcttcatctctgttgcccgtggcagttttgtgtatcagtctgtccagctcactctgccaatctctccaccttgtatctgcatgtccccacttttgctcctgtgctcctaaatacctctttttttctctctctctcccccaacctctctgcctgttttccctgcagccatgggtcagagccccctctctgcagtctggtctttgctgctgctgctctggttcctcgtggtgagggcctttccagatggtccaggcctcctttgatgcatgagacacgggacagcctcgcctgctgcctctgcccatcctgaggatgttggccatgtgtgctttcagtgtaaccaagattcctgtcaatcccatctgcagggaactctgggaccttctctggtagctgccagaccggctggtggagaaacaggagacaatctggggactgaaccttacccagggctgtaggagtgagactctgaataaagggttgggccggcggtgtggcgggtacttcaagacaggcagcaactaacctggcgatagaagggcttcagctgatttgggggatgactggagaggaaagcgcttggccgtcatacctgctagtgttactcagatgcctcacgtgtccatctggaaagcttctgttcactcctccaggaagccttctgtgacctctcccacctggctggggtagtgaccctgtctctacgctcccacagagacctggatgcttccctataccaccacatgtccatgtctgtctgccacatcagaccatgagcttcctgagggaagggactgggtcggaggcacagagatggtgccaggaaacgtgtgaaactcagaaaggaacaaatacctgtgaatggctggtccctgcactgcccctgccttggacactgtcaagctctcattgtccgtgtgtgggaatggggtggacggtgcctaactccagcacacagagagaaggagagacgggagagagagcgctagtcctccatcggcacctcggtcaaattccattctcttgtcagcacagatgtaacttctgctctaatccatgagtcctgaggctcctctcatcacggctcactgtagcctcaaactcctggtttcaagagatcctcccacctcagcctcccaagtagctgggactacagatatgtgccaccacacctgactaatttttgtgttttttgtagagacagggtctccctaggttgcctaagttctttttttttttaagctagtcaaatttagcagtggggggttatataccaactttagtgacagtgacattaataagttctgataacccaccaccatggacaccagcaatacccagacagctgggaaagcattatttctggatgtgtctgtgagggtttgcagcaggagattggcgtgtgagttggtggactcagtggcaagttccactctcaatgtgggagggcatggagaggacaaaaaaataagggaaaggcaaattcacactctttcctggagctgggacatccttctcttaccattggacattagaacttcaggttctcaggctttgaacttggacttgcgccagcggccatgagacctgaagtagacagacctggacccccagcttccactaccacagacctcatgggtaacacagggcatcgaggaggtgctaggtacacgcttactttattgagtcagggatttggggccaaatgtctgtagggcctcctgctctggaaactcgactgagaatccccgacccttttccctgagcccctcagcagggaaaggtaacagccaaagccctgcaaagcagccacctaggaaggaagacaggaaatgcagcagtacagttcagtttctcattataacccatgtgctccccactgagagctccaatacccagcacaaacaattctgtccctccaagactgtactctgtgatcttggcctttgtagagttcctcttttttttggaattaggggagtggcaggctctggacttcctttagttagggtgtgtagacaatgagtgctcccttgtggattgtgaagtcaagtgtctcaggatcttaggagcagtggggagagactggctggcccaaagaccagcaaccacttggccgtggctgtccctttctggaggagctgtggctgcagcagatccctgtgacttagtcccagccctcacagggcctgcaccagcaccaggaggctcatgaccagggccatggagaagaagatggccaggaagaagcggtccatcacacgggccaggcrcttccagtcctcatggcagcgctgggcagctcggtggctgcggaaggtattggcaatggtggctacgtggtgcagtagggcttcctggcggcacagacatcgtggctcgtggcaagggcccgctggggggccagcccctccttcaggcgactgggggctaggagataactcaggtggcctggactgcccacagggckcccctctttcccgcacgcacaggcyccgtgccaggtgtcccagcaggagggccctagcccaggctggcactgggcggacactgggaccacagtaatgcaggttcatgataaggatggtgagtgctgytgagaatgtgaccatggtcatagtggccatgtagtacttccctgcaagagagagagaaagccarttgactcaaaacaaaagcctgtggttcctgagcttcccagccacctctgcacaaatggaaataagcccaccatgaagctctccagaccctccaagccccatggatggaagcaggaaggaggtaagggccgagttctccccatccttcattcctacacgtgggtcatcrgaagctactgctctctaattgctcccgtcactgctggaggctgcactcatacacaatccaggacagtcccgctctcaaataacgacgggcatgagctggggcaagatacgaatcctttttgtacaaatgggatacccagaggacctacttcctaggtttgtggtgatgcttacctgagttaataaaggtcaagtgcttaggggagtgcctggcacacagcaagcagtcgacagattttgcctrtcattaggatctggggatactgatgttccatcatcaagggccaagtcgtgaggggtgttctccctggaagragctaatcctttcccctcagtcttaaaatgagggcacgttcccaggacgcccccctctcactttctgcagtggggccgttccgcagacccaggccctgtcgcggccccgccctggggggaccccagcgcatcgtcaggtcccccsgcgcccccgctgctcaccgatgagcggcacgctctcggccggtggcatgctctcggccagcagcaactggaagacggtgagcgccagcagcacggtgacgcccagcgacaccttctcgcctgagtcggcaggcaggtggaaggcgagcrgcgcaagcagcgagatgagcamgcagggcagcagcaggttgcacacgtaggcggcggcgcggcggcgcagcagcagcgtgaaggtgacgtcggggtagggctcggagcagcagccgtaggtgagcacgcgccgccgcgccggcatgcccagcacgcgccactccacgttctccacgaagtccgccaggctggctgcagcgccgcgyggccgcacatccagttggtgcccgccgtgagtccaggagccgaacgtcaggccgcagtgctgggcgtcgaacgggaaggctgctacatccacgcggcacgagctgcgcgtgatggccggcgcgtcccagcgcacggcgccatcgtggcgcaggaccacgttggtgctggcggaacctggaggctgcgcgtcggctctgggggcaggcggggcagggctcacctaggctgtccagcctgaggagcagccccggaggccgggagcccagggcagacccycaggggctgaaagaaaccaaaacttctccccagaatattgaggctcgttaagttcgagacactcacgacgcaggggagcacctggccccagcgtctgctggcctgatggcaggacatcagcccttccttgctggagtcagcacttgcttatccaaagggcaccagtaggtgccagaggaatctggaaacagattttaccctctttccacgttttcccgccttttaaaggtggctgtcctttgtcttgccactatttataacttactggctctttcttgaatttctatttaagcaaggcccctaagtcactgccttcagagagaaatacttttgaactaaggcctctcccatgatgggtacagcagattaataaacttctgcttgtggctgggtgcggtggctcacgcctgtaatcccagcactttgggaggccgaggtgggcggatcacgaggtcaggagatcgagaccaccctggctaacacggtgaaacctcgtctctactaaaaatacaaaaaactagctgggcgtggtggcgggtgcctgcagtcccagttatttgggaggttgaggcaggagaattgcgtgaacccgggaggcggagcttgcagtgagccgagatagcgccactgcactccagcctgggcgacagagcgagactgtgtctcaaataaataaataaacttgtgcttgtttttttttcgttaatttgattcttgttttcagaacaaagcaacacagagggtggagtgcacctagagagacccgctgcctttcgaggcctggaaggggtggtgcctgaagggcccagaagggacacagacgtagccagaggatgtataaaaaggcctctgcagaacccagaggtagctccgggacacacagtgacttcccttgggggacatctgcaaaacttgtagaagggccccagagaaaatatgcagagctatgtgctggctgggagacacggaactggtcaaggagacataaagcagtgttccagagggctatgtcctggaggaaagagacccttasacaggctcttsggggagccctgagagacttagagctaaaagtgtgccctagagaggcccttgtgattcagacawctgccctggaccacacagtaggttccgaggagacgttcagcctgggctggcctgggatagcctaaagtgggggtgccatggaggggctgagtgcytggcagcttagaagggtcctggggaaaagcttccagggcagcgtggcaaccaggttatgtggtagggagaggggatcactayacccccacagctaagggcaagtctagagaggggtaagagagaggaggggcccagataggcagtacttgttatagagtacgatgtctggccgccacacaagactgctggggatgcggatggcatccaggccaccatargcattggggtcccatcgtaggtaggcatctgtccactcctgccgtatccacagatacaggktcagcacctggttccgttcatcctagtgggggcagggaatggcagagatgtggacatgtatatgcatatcctgccctgtctgtgcacactcccctgcagggctctggtcagcacccacaaacctgacttgtccataccgtccagttcccacccagacctgacctygccatgtgaccttagtgggctcttctcttttctgcccctgtttcctcagcaggaatatggggtgagaatccctgcttagcagggattcagtaagttcaggtgaacaaaatattgggcacgaggtaggcacccaatactcmgtacccaacagtcagtacccaacagtttgtaactgctacctttgttaatattaacatttacagaaaagaaattccatggagaataatcccagtctctcaccccttcatttcttgacactgtgacaggtaagactccacagctgtaccaccaccacaacgcaccatgtcgatgatctgggacagtgtcacctccagggtcacattcagagtctggtctgtgtctgccacaggtctyagggcacttgtgtagttggcaaagaggtcacggaacagcttgagagccagccggccctcagctcccaggcactctggagggwcagtaaggagggttgtccatcccaggccctagtyccagggcctctgctcacaccctccactcccagggctggggccctgtccttatgagtgtcctcctggtgtctgccttctcttgctctagctgtggctctagttcctccctggcctgcctgcagggacacatgaggtaaaggccatggagtgaactggtactatcttctggcgccaggctgacaaatttctcctccaccctcccyttttcaaggacctggagtctgcctgcctctccacaaatgctagaggggcccaaataagccacaagagtccagactttcacccagggattctaaaycccactgctctgccccctccagtatctctcaaacctgtttccacttctccatctcgagctggtttcttcaaaacttctgatgcgatggaacactccctcactctgaaaacacacttccccaggctttactgacacamattttcctcaatccctgacctaaacattgttcccatgaatcctgtccttggctcccatctttttcttcatcccagatttttctcctgagctccagaccccaatagagtacagtccactcctgagtttcccacaggcaccttcaactctgagggtccaaaatatgaactcgcttcctccctccatgctctgaaacctgcttcctatcccatgttccctatctcagcaaatagcatgccctcagctkcaacagtgacctyagttggaaatctgggaattatccctcccttctccctctgctgcctcctcctcggggaatccagttaatctccagatcctgtcagatcattcaaatcctccagattttgcgaaacatygtcttgagtctaccctctcccctccaggtcagggccctcccttcactgtctccctttccccaaaggctcaccttcttctacccctcccatgccccargaccacgcttttaagcatgcacatctgaccaggctagtatgctgctgaaacctttcagtgctccccgtcatctgcaggagaaagacctggcctggccggcaggcccttcaacatctggcscctctgattttcccagccctgtctctggaagctccccgctcactgtttccaccctagccaggcaagtctcctctcacgcacttcagcacccctctcctccacactccccaaatagagagcttgttctcagaacaggtactgaggagaaacacaagagagactacatggaaagggattttgggagaacaggaatagtagcaccaccaggagaggccagggctggtgtaytgagcttcatacctgcagggagtagaaacagaagcagaaggcccaggctgaggtggtggctccggagccccatggccctggcactgcaagagcgggggcaggtctctggatgtgaggcctcctggccagacctagggcaaaattaggcccagctggcaaggatggtgtggacagtacctagaagtcagaagtaagacagatctctggtgggtccagccaccctccagcgagccctgcagcccctccagtcttctgaccctccaatttgtgcctgcccctggattttagtacttggtctttcttcttctctgctggtccttgcctcttctggcctctgcctctgccctttcctatgctccccacctgctttgtctttcactctgtttctgcttccttctctttccgtctgtaactttcttggtctctctgcctccctgactctgatcatcccctgcctgcctctttccactctctctccctttctcctacttctgtttcatccctcattccttccttcttccattccccacacctggactctagatgggcctgctgctctctcagcagaacagggaccagggactcctcccttgatcagcccagagtcgtccgaggcacaggaccacagcccctccctctctgccctttcattagcttaattacaccgtgcctatgacaacagagcaacggaaactgatacctcgggcctctggggcttgaattattcaaactctgtaaagcagcacacagactcagctcaggcccatcctcgggtgttggagagtacaggtatgctgggtcagggtatgtggaagaccagggcttaagagtgtgaggggccagggtcagtggatggataactgtcctctcatcttagccaccattgcctgaattctggaggtggaggtttgccttagacctgcagctctccttgcagtgcgggactagacactccaggctaggcactttgggtcaagcaagcccttccctcctggtgggagtagtgctgagcctcaggccactccagatgacccagtggagcagaagatggagcccacatcctctcctcagactccctgcagtcattcccatctgagcctgttttttcaccttgcccaaacactgtgggcagtgtgggagaagagggcaagcattcagtcactttcggccctgtcttatgagcgctctcacttgggtaagatatttaaactctctgggtttctgttctctcaatctggtaatgggattaacagtactcatcttgaaaactgcaaggatttaaatgagataacctgatagtgcaaggcactgtctagcacggtgcctaaggtacagcaggtcatcaacaatatttacactgtggtcccagtaaggtagccaggctatcctcaggtcacaggtatttatcatgcacagagttttgattatttttgttcaagctgaccagttgcctgaccaacagcagcacatacttccctggcaatcacatccatagccatgactttgggcatcgtggatatgccagtgattccctgcactttctccacccgtcccctctcccaggtactctgcttatctccaaccaccttcctaacacacaagcgtttcacatcatttcaaattgaaatccaacattcacttattcaagctagtagaggggaactgtccttaacttgttaaagaacaactaccaaaataccctacagccatcctgccacctcagcctcctgaatagctggaactaaaggtgcacaccacccagctaatttttgttcattttttaagagacaaggtctccctatgttgcctaggctggtcttaaactcctgggctcaagggattctccctcctcagcctcccgaggtgctgggattacaggcgtgagccatcgtgcccaaccaatacaaggtttaacaaatccttaggaaagcctaagaaatgaacatttaaagcagaaattaagattatacagaactccagtaaaattgattaatacgtctaaggactggttatttgaataacaaaaaatctggaacaattttctggaaatacaaattaacaaaactgagctaaagatgaaacatctaaaaagagcagatactctgcaggcctttgcttaattattccaatatttaattctccagacctctgttaactttgggttctgttgagaaaataagttatttgaatgttgtagattccacagatctatcgaatgttgaggtaactggttcctgttttatgtttttgagaattttttttgaaattaaaacattttttactatttcaacgggattttgggatgtggaagagattgttcaggcctggcgcggtggctcacgtctgtaatcccagcactttgggaggccaaggcaggcttatcacgaggtcaggagatcgagaccatcctggctaacacggtgaaaccccgtctctactgaaaatacaaaaaaaaattagtcgggcatggtggcgggtgcctgtggtcctagctacttgggaggctgaggaaggagaatggcatgaacccgggaggtggagcttgcagatcgtgccccactgcactccagcctgggggacagagcgagactctgtctcaaaaaaaaaaaaaaaaaagaagagattgttcatcacccttatcttgaactggaagttgatattctcttttatgcacaacatggcttctatgataaacctttgattgagaaccttttttttcttgctctgttgcccaggctggagtgcagtggcacaatcatggctcgctgcagccttcagctcctaggctcaagcgatcctcttgcttaggcctcttgagtagctgggactatgcacacacaccaccatgcccaactaattttatttttttttagagacagagtcttgtcatgtagcctggggtggtcttgaactcctggcctcaaacgatcctcccaccttggtctcccaaagtgctgggattacaggtgtgagccaccactcctggcccacaattccgaacactgctaagagctaaccatttctatagcatactcactttctgaaacattcctctggtaaggaaaccaggtcaggtgttctttgctggaagtccaactatgttttgtgactcactcaggttcacatagtgagtcagtagtggaggggattccagctgagtaacccctatcctgaggcatctaagttaaatggaagttccagacaacagagctgacccactctgctttctcatccctgaattcctgaaagtctcagaagtctttggtctaatcttaattggaatttgctcacatcttcagcttgacagatcaaaataagatctggaatagtactcatgctactcaattgattcctcttgaaaatagccctgtgtgaagtaacatcagcaatcattatcccctttacaaaagggaatctgatttagaaaggtgaagcgtcactcagggtttaaaaacaaaaccactatagtagaagagcgaggaggctttgaatggtatattctattgggcaatttgagacccgggaatctatgtgcataaatatatgtacagcaatcagtattaatcaataatcaactcccttgcccctaaatttccccttataaatctagcctttgggctaatctatctttcagtttagcacccaattgttctctttagcccatggcctgtctccatttagaaggcaaattcaaaaacaggctaaatcaaacaaggccaccataaagatcctcagggtaagaaggctcaaaaatacaaagggaaagccaataccaggaatgctataaacattttatttattttttaagaaagtagcttcagaaaaagaggaaaatatctagatcatttatttatacatatatatattttttaataaaaacctttacattatcttcatgcataaagacccaggtgtggccatattgcctgagatagccctaacaccagctatctcatgccattacctggggctccctatagctgtcagcagtgtagcaaaggccctctgcctgcccctaacgcccaactccatgcctgcctcagtcatggtttgtttttgcttctggaaggggtagatggagggtgggaaatgctttggagctaacatgggatgaacagggagggttacccaacctgccattttttatccaaactctgcaggcaaatccagacagagtctcagcaagactgaaaaccagggaccaaaccaaactctgggagcttcccacagacatgtcacatgtgaccaagggttcctgcacatagtagtagcaaaggtatggtgttcatggaactctaaaggcaggaacaaaaacagccctgaagatcaatccctccgtgacaggcattcacttctgccctaagtgtgtcagaaagatcccattttgtttcctaactcaggccaaccctcctttgcctccaaaattcagtgttaactaaccaattacttaagagacggatccctcttccttctgtggatagttcatctgttaaggatccattatcacctgtctcactcctcctaaggagtcctagtataaaagggccagggtaggagtagggaagctggttggcatggagggtcacaagatccagaatggctagggatggaaaaagaataccctggttctttgggggattctgccaaaggagctttattgaccatttttttaaaggaaaaacactgaatgatcttgaggatggtaaactgtctcctcttctgggttccagaagcccttatgctacgttcagtattaagaaaagccctgaacaagtggaggatgctgcttctggcagcagggagggagggtagatgccacagccaacccagagaatggcaaacagtgccaatccaaacaaggcagggaacctctgtgtggtgtgaatgggcatgtgactgtgatgcaaagtgcctggggctcacaggctcccaacagccagttctcgcagataggactgggtaaggctgcgcagttcgtccatggcatagtcctcaggcatgggaagccggccaatgtggggagccaagaggcgcaaagggactcgctgagggtctggtgttgagtcggaggttctatcaggaggatgatgcagactcagcaccacgcgcagcaggttggctacacgtttggccatgtctagagagaaaaactagagtcaagcactgagcatggggtctggagaagggtggtaggcactgagggtggggtgtaataatcataaaaacaggaagcaagaaggcagaaagagtgaggaggttagaggcttacctgactgagccaggcgatctttagcactgtaacactgaatctgctctatccgactgcacagtgaagtcactttgatgtgtaactgctccaggtcattacctgagcaatccacctacaaagaagcagagaagccaattaatccaaggggagttcctatcactccaatcccacctatagactctacacaaaaccttgaaacaacagtgaggtgagggaggggaaaatccaagatgatgacacagggccaagccaccaccatctagtggaggacaaggcactaattatgcagtaatagccaagaggaaggtaacacagttacctagccttggactaggaaaagtcttgagatcccgaactatacagcaagctttaataacacagcaccaaaaatcaagataaattgggttcagagagatggtatgacttctaaagagcacacaaggaagtaaaaaatgcagccagaaccaacatttaatttaggtcccctgactccaagtttatagccttttctaaaacaccaaaaaagctgtgtgcagggggcaggaggatcaagagcaagacaggttatttgctctcatgaaactgatagaaaataaataagaaaacacaaaacagtaataaatcctgaaaaatcacaagccatgtagataatttaaacaggtggatgtggcagagagaaactggatagctacttgagactggaggaccaagagaggcttctttaaggaggtcatatttaaattgagacctgaataacaaggagagagctcagctttccaggcaaagagaagacagctaaaacccccaaaggtgggaattcaaaggagatttacatggtgacatgtagggtaaggagaagaagcagaacaagataata

SEQ ID NO: 96219 - DNA, 17644 bp, Homo sapiens
  misc_feature (1)...(17644): n = A,T,C or G
nnnnnnnnnnnnnnnnnnnnnnnnnnnnnnnnnnnnnnnnnnnnnnnnnnnnnnnnnnnnnnnnnnnnnnnnnnnnnnnnnnnnnnnnnnnnnnnnnnnnnnnnnnnnnnnnnnnnnnnnnnnnnnnnnnnnnnnnnnnnnnnnnnnnnnnnnnnnnnnnnnnnnnnnnnnnnnnnnnnnnnnnnnnnnnnnnnnnnnnnnnnnnnnnnnnnnnnnnnnnnnnnnnnnnnnnnnnnnnnnnnnnnnnnnnnnnnnnnnnnnnnnnnnnnnnnnnnnnnnnnnnnnnnnnnnnnnnnnnnnnnnnnnnnnnnnnnnnnnnnnnnnnnnnnnnnnnnnnnnnnnnnnnnnnnnnnnnnnnnnnnnnnnnnnnnnnnnnnnnnnnnnnnnnnnnnnnnnnnnnnnnnnnnnnnnnnnnnnnnnnnnnnnnnnnnnnnnnnnnnnnnnnnnnnnnnnnnnnnnnnnnnnnnnnnnnnnnnnnnnnnnnnnnnnnnnnnnnnnnnnnnnnnnnnnnnnnnnnnnnnnnnnnnnnnnnnnnnnnnnnnnnnnnnnnnnnnnnnnnnnnnnnnnnnnnnnnnnnnnnnnnnnnnnnnnnnnnnnnnnnnnnnnnnnnnnnnnnnnnnnnnnnnnnnnnnnnnnnnnnnnnnnnnnnnnnnnnnnnnnnnnnnnnnnnnnnnnnnnnnnnnnnnnnnnnnnnnnnnnnnnnnnnnnnnnnnnnnnnnnnnnnnnnnnnnnnnnnnnnnnnnnnnnnnnnnnnnnnnnnnnnnnnnnnnnnnnnnnnnnnnnnnnnnnnnnnnnnnnnnnnnnnnnnnnnnnnnnnnnnnnnnnnnnnnnnnnnnnnnnnnnnnnnnnnnnnnnnnnnnnnnnnnnnnnnnnnnnnnnnnnnnnnnnnnnnnnnnnnnnnnnnnnnnnnnnnnnnnnnnnnnnnnnnnnnnnnnnnnnnnnnnnnnnnnnnnnnnnnnnnnnnnnnnnnnnnnnnnnnnnnnnnnnnnnnnnnnnnnnnnnnnnnnnnnnnnnnnnnnnnnnnnnnnnnnnnnnnnnnnnnnnnnnnnnnnnnnnnnnnnnnnnnnnnnnnnnnnnnnnnnnnnnnnnnnnnnnnnnnnnnnnnnnnnnnnnnnnnnnnnnnnnnnnnnnnnnnnnnnnnnnnnnnnnnnnnnnnnnnnnnnnnnnnnnnnnnnnnnnnnnnnnnnnnnnnnnnnnnnnnnnnnnnnnnnnnnnnnnnnnnnnnnnnnnnnnnnnnnnnnnnnnnnnnnnnnnnnnnnnnnnnnnnnnnnnnnnnnnnnnnnnnnnnnnnnnnnnnnnnnnnnnnnnnnnnnnnnnnnnnnnnnnnnnnnnnnnnnnnnnnnnnnnnnnnnnnnnnnnnnnnnnnnnnnnnnnnnnnnnnnnnnnnnnnnnnnnnnnnnnnnnnnnnnnnnnnnnnnnnnnnnnnnnnnnnnnnnnnnnnnnnnnnnnnnnnnnnnnnnnnnnnnnnnnnnnnnnnnnnnnnnnnnnnnnnnnnnnnnnnnnnnnnnnnnnnnnnnnnnnnnnnnnnnnnnnnnnnnnnnnnnnnnnnnnnnnnnnnnnnnnnnnnnnnnnnnnnnnnnnnnnnnnnnnnnnnnnnnnnnnnnnnnnnnnnnnnnnnnnnnnnnnnnnnnnnnnnnnnnnnnnnnnnnnnnnnnnnnnnnnnnnnnnnnnnnnnnnnnnnnnnnnnnnnnnnnnnnnnnnnnnnnnnnnnnnnnnnnnnnnnnnnnnnnnnnnnnnnnnnnnnnnnnnnnnnnnnnnnnnnnnnnnnnnnnnnnnnnnnnnnnnnnnnnnnnnnnnnnnnnnnnnnnnnnnnnnnnnnnnnnnnnnnnnnnnnnnnnnnnnnnnnnnnnnnnnnnnnnnnnnnnnnnnnnnnnnnnnnnnnnnnnnnnnnnnnnnnnnnnnnnnnnnnnnnnnnnnnnnnnnnnnnnnnnnnnnnnnnnnnnnnnnnnnnnnnnnnnnnnnnnnnnnnnnnnnnnnnnnnnnnnnnnnnnnnnnnnnnnnnnnnnnnnnnnnnnnnnnnnnnnnnnnnnnnnnnnnnnnnnnnnnnnnnnnnnnnnnnnnnnnnnnnnnnnnnnnnnnnnnnnnnnnnnnnnnnnnnnnnnnnnnnnnnnnnnnnnnnnnnnnnnnnnnnnnnnnnnnnnnnnnnnnnnnnnnnnnnnnnnnnnnnnnnnnnnnnnnnnnnnnnnnnnnnnnnnnnnnnnnnnnnnnnnnnnnnnnnnnnnnnnnnnnnnnnnnnnnnnnnnnnnnnnnnnnnnnnnnnnnnnnnnnnnnnnnnnnnnnnnnnnnnnnnnnnnnnnnnnnnnnnnnnnnnnnnnnnnnnnnnnnnnnnnnnnnnnnnnnnnnnnnnnnnnnnnnnnnnnnnnnnnnnnnnnnnnnnnnnnnnnnnnnnnnnnnnnnnnnnnnnnnnnnnnnnnnnnnnnnnnnnnnnnnnnnnnnnnnnnnnnnnnnnnnnnnnnnnnnnnnnnnnnnnnnnnnnnnnnnnnnnnnnnnnnnnnnnnnnnnnnnnnnnnnnnnnnnnnnnnnnnnnnnnnnnnnnnnnnnnnnnnnnnnnnnnnnnnnnnnnnnnnnnnnnnnnnnnnnnnnnnnnnnnnnnnnnnnnnnnnnnnnnnnnnnnnnnnnnnnnnnnnnnnnnnnnnnnnnnnnnnnnnnnnnnnnnnnnnnnnnnnnnnnnnnnnnnnnnnnnnnnnnnnnnnnnnnnnnnnnnnnnnnnnnnnnnnnnnnnnnnnnnnnnnnnnnnnnnnnnnnnnnnnnnnnnnnnnnnnnnnnnnnnnnnnnnnnnnnnnnnnnnnnnnnnnnnnnnnnnnnnnnnnnnnnnnnnnnnnnnnnnnnnnnnnnnnnnnnnnnnnnnnnnnnnnnnnnnnnnnnnnnnnnnnnnnnnnnnnnnnnnnnnnnnnnnnnnnnnnnnnnnnnnnnnnnnnnnnnnnnnnnnnnnnnnnnnnnnnnnnnnnnnnnnnnnnnnnnnnnnnnnnnnnnnnnnnnnnnnnnnnnnnnnnnnnnnnnnnnnnnnnnnnnnnnnnnnnnnnnnnnnnnnnnnnnnnnnnnnnnnnnnnnnnnnnnnnnnnnnnnnnnnnnnnnnnnnnnnnnnnnnnnnnnnnnnnnnnnnnnnnnnnnnnnnnnnnnnnnnnnnnnnnnnnnnnnnnnnnnnnnnnnnnnnnnnnnnnnnnnnnnnnnnnnnnnnnnnnnnnnnnnnnnnnnnnnnnnnnnnnnnnnnnnnnnnnnnnnnnnnnnnnnnnnnnnnnnnnnnnnnnnnnnnnnnnnnnnnnnnnnnnnnnnnnnnnnnnnnnnnnnnnnnnnnnnnnnnnnnnnnnnnnnnnnnnnnnnnnnnnnnnnnnnnnnnnnnnnnnnnnnnnnnnnnnnnnnnnnnnnnnnnnnnnnnnnnnnnnnnnnnnnnnnnnnnnnnnnnnnnnnnnnnnnnnnnnnnnnnnnnnnnnnnnnnnnnnnnnnnnnnnnnnnnnnnnnnnnnnnnnnnnnnnnnnnnnnnnnnnnnnnnnnnnnnnnnnnnnnnnnnnnnnnnnnnnnnnnnnnnnnnnnnnnnnnnnnnnnnnnnnnnnnnnnnnnnnnnnnnnnnnnnnnnnnnnnnnnnnnnnnnnnnnnnnnnnnnnnnnnnnnnnnnnnnnnnnnnnnnnnnnnnnnnnnnnnnnnnnnnnnnnnnnnnnnnnnnnnnnnnnnnnnnnnnnnnnnnnnnnnnnnnnnnnnnnnnnnnnnnnnnnnnnnnnnnnnnnnnnnnnnnnnnnnnnnnnnnnnnnnnnnnnnnnnnnnnnnnnnnnnnnnnnnnnnnnnnnnnnnnnnnnnnnnnnnnnnnnnnnnnnnnnnnnnnnnnnnnnnnnnnnnnnnnnnnnnnnnnnnnnnnnnnnnnnnnnnnnnnnnnnnnnnnnnnnnnnnnnnnnnnnnnnnnnnnnnnnnnnnnnnnnnnnnnnnnnnnnnnnnnnnnnnnnnnnnnnnnnnnnnnnnnnnnnnnnnnnnnnnnnnnnnnnnnnnnnnnnnnnnnnnnnnnnnnnnnnnnnnnnnnnnnnnnnnnnnnnnnnnnnnnnnnnnnnnnnnnnnnnnnnnnnnnnnnnnnnnnnnnnnnnnnnnnnnnnnnnnnnnnnnnnnnnnnnnnnnnnnnnnnnnnnnnnnnnnnnnnnnnnnnnnnnnnnnnnnnnnnnnnnnnnnnnnnnnnnnnnnnnnnnnnnnnnnnnnnnnnnnnnnnnnnnnnnnnnnnnnnnnnnnnnnnnnnnnnnnnnnnnnnnnnnnnnnnnnnnnnnnnnnnnnnnnnnnnnnnnnnnnnnnnnnnnnnnnnnnnnnnnnnnnnnnnnnnnnnnnnnnnnnnnnnnnnnnnnnnnnnnnnnnnnnnnnnnnnnnnnnnnnnnnnnnnnnnnnnnnnnnnnnnnnnnnnnnnnnnnnnnnnnnnnnnnnnnnnnnnnnnnnnnnnnnnnnnnnnnnnnnnnnnnnnnnnnnnnnnnnnnnnnnnnnnnnnnnnnnnnnnnnnnnnnnnnnnnnnnnnnnnnnnnnnnnnnnnnnnnnnnnnnnnnnnnnnnnnnnnnnnnnnnnnnnnnnnnnnnnnnnnnnnnnnnnnnnnnnnnnnnnnnnnnnnnnnnnnnnnnnnnnnnnnnnnnnnnnnnnnnnnnnnnnnnnnnnnnnnnnnnnnnnnnnnnnnnnnnnnnnnnnnnnnnnnnnnnnnnnnnnnnnnnnnnnnnnnnnnnnnnnnnnnnnnnnnnnnnnnnnnnnnnnnnnnnnnnnnnnnnnnnnnnnnnnnnnnnnnnnnnnnnnnnnnnnnnnnnnnnnnnnnnnnnnnnnnnnnnnnnnnnnnnnnnnnnnnnnnnnnnnnnnnnnnnnnnnnnnnnnnnnnnnnnnnnnnnnnnnnnnnnnnnnnnnnnnnnnnnnnnnnnnnnnnnnnnnnnnnnnnnnnnnnnnnnnnnnnnnnnnnnnnnnnnnnnnnnnnnnnnnnnnnnnnnnnnnnnnnnnnnnnnnnnnnnnnnnnnnnnnnnnnnnnnnnnnnnnnnnnnnnnnnnnnnnnnnnnnnnnnnnnnnnnnnnnnnnnnnnnnnnnnnnnnnnnnnnnnnnnnnnnnnnnnnnnnnnnnnnnnnnnnnnnnnnnnnnnnnnnnnnnnnnnnnnnnnnnnnnnnnnnnnnnnnnnnnnnnnnnnnnnnnnnnnnnnnnnnnnnnnnnnnnnnnnnnnnnnnnnnnnnnnnnnnnnnnnnnnnnnnncattcttaataataaccaaatttggccaggcacggtggctcacgcctgtaatcctagcactttgggaggctaaggcgggtggatcacttgaggtcaggagtttgagacaagcccggtcaacatggtgaaacccagtctctaccaaaagtacaaaaattagctgggtgtggtggcacatacctgtagtaccagctacttgggaggctgaggcaagagaattgctagaacctgagattgagaggttgcagtgagccaagatggcaccactgtactccagtctggctgacagagcgagactccgtctcaaaaataaataaataaatatataacctgccgggcgtggtggctcatgcctgtaatcccagcactttgagaggccgaggcaggcagattacctgaggttaggagttcaagaccagcctggccaacatggtgaaaccctgtctctactaaaaatacaaaaaaaattagcccggcatggtggcacacacctgtaatcccagctactcgggaggctgaggcaggagaatcacttgagctcaggagcggaggttgcagtgagctgagatcgtgccactgcactccagcctggccgacagagcaagactctgtctcaataaataaataaataaataaccaaattgaatacttgttgagcagagagccagggaggccttcatccctcttcctggagcctgacttctctcaaggtggagacctgctctgaccctcccacatcccaccccctgccaggtttatgttcatcctcatgatcatcctgaccgccttcctctgtggcctcaacaacatctatgtgccctaccagaagacagagtggctgggcaagtatgcaggggcagaggcaggatgggaggtagagagcctgggaccttacagcttggagccctagtgatctctccttttccctccctccctcatttattcactcaactaattctcttgtttgctcactccttctttgattcactctgtcactcattcatttgttcatttatacattcattcgtttacccattttctcctcaaacttgttattttgaaaaatgtcaatcctatgaaaagtacagtggacacccctatatccttcacccagcttcaccaatcgttaatgttttaccacacttgcttcatctgttgctccctttattctatttttttcctgaaacatttaaaaggaagttgtaaatataatgacacttcatccctaaacagttcaggatgtcttttaagaacataaccacaaaagtattatcacactcaaaaaatttaacatccatattatatatacacacacacgtatacatatgtatacatacatacatacgtatacatatatacatacgtatacatacatacgtatacatatgtatacatacatacgtatacatatgtatacatacatacgtatacatatgtatacatacatacatacgtatacatacatatgtatacacatatatatatacatatatatatatatwttttttttgagacacagtctcactctgtcgcccagctggggtgcagtggcgcgatctcagctcactgcaacctccaccgcccgggttcaagtgattctcctgcctcaccctcctgagtggctgggattacaggcacccgccaccaggcccaggtaatttttgtatttttagtagagacggggtttcaccatgttggccaggctagtctttaactcctgacctcatgatccacccgcctcggcctcccaaagtgctgggattataggcatgagccagcgcacccggcctcataccctaatattatttactatacagtccttattgatatttccccaattgcctggaaaaaagtctctctagttttaaaaatctgatatccaatctaggatcacacattacattttgttgtgctatctctttagtctcctttaatctcgaacacaccccgacctctttgtcttgcatgaagagtgyagatcaaattggatttatctataaattattgatcataattagattcaagttaagcagttttggcaagaacatgacctagttgattgtgtgtactttctactgcatcacagtagaaggtgcatgatatcagtgtggcctattggtgaggccaattgctgtagcaaagtcttcattgtaatggtaccagggaagcccttttagtaacaggaagctatgttgagactgtgtgacaacactgctccctcaaaaccttttacccagtggatttagcatccatagatgatttttacctgaattggttattacggtggtttcaagatcatgattttctgcctctgtcatttcttctacatttattcactggcatccttctgtgaagaagtgttttcacctactttcttcttcttcttttttttttttttcttttgagacagagtctcgctccgtcaccctggctggaatgcagtggcatgatctcggttcactgcaacctccacctaccaggttcaagcaattctcctgcctcaacctcttgagtagctgggattacaggcctgcaccaccacgcccggctaatttttgtattttcagtggaaacggggtttcaccatgttagccaggatggtctcaaactactgacctctggtgatctgcccacctcggcctcccaaaatgctgggattacaggcatgagccaccgcgtccggcctttcctcttttttgaatatcactatggactcaatatgataatccattacagtcattattcttttgggtgctcaattcttcctaaatgtggctaataactaatttatatatttgtttattccctcatttattgttcattcactctatttatttatttattttttgagatagggtcttgctctgttgcctaggctagagtgcagcagcgcgatcttggctcactgcagcctccgcctcccaggttcaagcaattctcccacctcagcctcctgagtcgctgggattacaggcacaccactacacccagctaatttttgtatttttagtagagacggggtttcaccatgttggccgggctggtccggaactcctgacctcaggtgatccaccctcctcggcctcccaaagtgctgggattacaggtgtgagccactgtgcccggcccactcactcactttttaaaattttttttcttttttttagagacaaggtcttgctctgtcacccaggctggagtgcagtggtgtgatcatggctcactgaagcctcgacttcccaggctcaaaccatcctcccacctcagccttcctattagctaggactacaggcatgcaccaccacactcagctaattttttatctttttgttgagatagggtcttgccgtgttgcccaggctgttctcgaactcctggcctcaagcgatcctctggcctcaacctcccaaaatgctgagatgacagcatttcatgatgtcatcatgagccaccacacccagtctcactcacttttaaaattcattcactttcttagtcattcagttgttgtaggttttttgttgtcactgacttcatacctatttactgacactttcttttagtaggttctgtttcctggcactggaagcacaggcaggagaaataaaccagactctttgtcatagagaagacagccatgtgcacaaatgagctcaatttgcgacaagtgctgtgagaaaggagagtttatactgattgtgcccagcggaggaagcaccttcctctgtcttagatgaccaggggaggctttacagagaagagagaatctggacttcagctaggaaggttacagacttcagagaagatatagggcattctgagcagagagggggcatgcgccaaagcagggaggtatatttggagaacagcaagatgcctcccatagttggcacatggagagaattttgtgaaaggaagtgagagagggtagctgggcccacgtcagaagctcagggaggtcttggtgagaagcytgggctttctccaggaggccagagagctctaggtggcctcccaagcagctgcccaatcataaattcctcatgagtgcaactgcctgatagttttatcgatgatgctaaaggacccacacttggtcaaggctctctcatggttccagtgtatatggaagctgtattcagacctatgctcttacaaagaattcttgttcatagcctggcttcaggctgttagcttaaaggaattgagtttactgtgactcttagtgccagggataggaactactcagaccagcctgctttgtggctcctggtgacatcacttcacagtggcaagggaaggccaagccctcctgggctattcattcatgagtgactgctaagtaagtcaaaagttgttttttgctgttgttttttgagacagggtcacactgtgccacccaggccagagtgcagtggcacaatcacagctcactgcagccttgaactcccgggctcaagctatccttctgcctcggcctcctgagtagctgggactacaggcgtgtgccaccacacctggctaattttttttattttatgtagagacaaggtctctaactcctggcctcaagtgatcctcctgcttctgccttcgaaagtgctgagaatacaggtgtgagccaccatgaccagtgcatcaaaaataattttgctaaaattcttacgtaggttgtatggtagacgtctggactgagggtagttaggagcatttaaaggttgacaagccaaagtacaacagattaggtcaggttcacatttagaaggagcaccctggatgcactgtggaggacagaataataagagagacagagcccacagaccagtgcaaagctgtgagaatctatacctgaactggtgctgagacggagggaatgagacggattcacaaataaatacaagaggaaggaaaatgtggtcaggtctgtgactggcgaactttctgctggaggtagggaagggaaggactgcctgaaagaggtagcactggagctgctaccagggtgctccaaacccccaacctgtctcacctagcccatgagaacagtttctttcaagatggagtctggctctgtcacccaagctggagagcagtggcgtgatctcagctcactgcaacctccaccttcccggttcaagcgattctcctgcctcaacctcccaagtagctgggattacagacacccaccaccacacctggttaatttttgcattttttagtagaaatggggtttcgtcatgttggcctggctggtcttgaacgcccaaccttaggtgactggctcacctcagcctcccaaggtgctgggattacaggcgtgagccaccatgcccggcccatgacaacaatttcttacctggtctctgcacctctgctgtctcacttacttcccttccattctactcacagcagccaacatgatcttttccaatgtaaatcagcgtcamccctctgcttagaactcttcacagcttcctattgctcatagaccatggtaaggatttttgtttttctcctacaagctcttgcatgaggtggctggtccctaactacctctcacaagcatctctctcctctgccttctgagaccagccgtgccggacttctctcagtttctcagatgcccagagctcgtctgccttggggaataccctttttcacacttctccttccctttgacatgtggaatcccacacatccttcagagctcagcttgaatgcttctcaaagaagctttccccagccccagactaggtcataacatcctgggctgctccttcacagcacttgtcacaattttaattttttaattttaaatattttgtaaattaaattgagacggcgtctcactatgttgcctaggttggtctccaactcttgggctcaagcgatctgcccactgcggcctcccaaagtgctaggattataggcgtgagccaccacacccagctacaaatttaaattgttggtataagtagtatccatttcaccccgccccccgcaccccagaacataaggccatgaagacaggaacgtgcttgtcttgtccactgatgtatccttagcacctgtgacacgactgtgcgctcagtaaataccggttgactgaaagaataagatccggagctcagaaacagcacaagtgtctgcactggccaaggtggtccaaagggctgcatggaagtgggcactcttggccaggtcctggggggtgggaaagagtgtgtctgggtgagctcaggcttttctcccacccctcatttcctgttccttacttggcctggcatgccagtttcaatgagacgtttcagtttctgttctggaccatgttcggtatggaagagcacagcgtggtggacgtgcctcagtttctggtgcccgagtttgcaggccgggccctctatggcatctttaccatcatcatggtcattgtgctgctcaacatgctcattgctatgatcaccaactccttccagaagattgaggtatgtaaacagaggccagtttaggccagggccaagaagggaaaaaggaatggagaggaatagggtgcaaagaggcaagacatgtggcgccatgctctgcctccactgttgtcttgtttgtggctttggacaagttttcctctgtaaaatgagggtcttagtgatgctattagtatcttcagacaccaagtctagtgctcattcccccttagggttgggcagaggagtgtgttgtagagaagtaaacgggaacatgagagggagagggaaggaaatggatgggttagggtctgcaggctggagaataggctgggcaggaactggatgtcagaaagatgaaagacaatggtggggagagaggaaacgggggacaggcaggagaaatgcgggtgataggggaggtgggagataagtctggggagaagaaagaggctggctaggattataggcacactggagaatcaaagatgtgaggagcggagaaaagagagacagtttgagtgggcaggagggccatatgcaaggggtccttgcaccaccccctgctgcctggctcccaggatgatgctgacgtggagtggacgtttgctcgctccaagctgtatctgttctacttctgagagggcctgacactgcctgtgcccttcaacatcctgccctcctcgaaggctgtcttctaccttctcaggtgatgacctcagagctcccactcccaccccctaaatccccagcccctgcccccatttccctgtcctctaaccgacctcttcccaccactgaaatctctcaggagaatttgccagttcatttgctgttgctgttcctgctgcaaaaccaagaagccagactatcccccgatccctacttttgtgagtacctcctcggcttgttgctggtcgccctggcgtaaggcttcacttgtattgtctataccatccatttgtctgcataccccgggcttatctatctttccagtatgttcccccagaaagcctgtcccaatcctactctctcacgtggcttccctttccctcttccaggctctggccatttcctgaatttccaaccctgtgtcatgcagcctaaacagaagtccttaccaccctcctcccaagctagaaatacccactaagctccagacagacctttttgtcctaaactggtccaagacgtagttgaacattttttaaaaaaacatgttaagaagccaaaggtaaatgtcccacaaactgggcagttaaatggctgacagtggcctaagagaggaagccaagaggccggacatccaaggagctccccagcccagtctggcctggcatgagggtgccttcctaattcaggtactgccaggtctgtagggggttctccccctccacaccatcagcctcccagccctcgcccaccccttcctggtcctctcaccgtcagccctttcccagcttctggcccctgtccttctaccttccaggtccgcactgtgagatggaggccaggggctaggtgggtcagggacagaaaagtctacacagacttttttgcctgggggtggggggaaatgggcagtgatcagaggaaggctggaggtagagaatctccctcaccctcttgtcttcccattccaggccaatcccagggcaggggctgtgcctggggagggagagcgtggatcctaccgccttcacgtcatcaaggccctggtacagcgctacacagagactgcccggcgagaattcgaggagacccggcggaaaggtttgtcacccacctccaagccctccccattcctgttccttgttcagctgggataaaggctccatacccagcgtcatgtcctcattcagcctgcataatatgtggtcccatcctgccctgcccttggaagggtaacctgcacagcatgccccttgcactccattaccctctgacccatccgggcatttgtcccactcatttcatgtaagtgctcattcctgccttcaggtgtgttcagttattctcccattcactcccttacccagtcactcattcacctttttcattcactcgcttattgactcgttccaccaacattcatcactatggcctcctttgttccaggccctgtcttggagggagagacggggcactgtagggcagggacacacgggaagctttcagtctggtgaggaagagaaaccatcacagcgggcatgaagtgcagctaagagagacgcgaattgccatgggcgcctgaagggagaaggagcacgtcattttgagaggctcatgagaaggcagaaggatagagtagcagaagggacaaagggggtgggatctgaactgggccctgaaggatggggtgagctggctggccgtagactcgggagagggcaggcaggtgaacgcacaaatgtctacgcagtccagtaagctttccccgtggcttgtcatctttctctggcccccagactttccttctttccagctcctcagctactccctcccacccccgatcagattcacctgccccagcttcacccacccacctgacccctagcccacaaacccgttcctcacttcttccagttctccctcaggaatcctggatagggcaacccctggggtactgtaaagggtaaaaggggtatagggcaggctcatcctctgaaaggccccttggtactccacctcctccagatctgggcaacagactcacagagctgaccaagaccatatctcgactgcaaagcgaggtagccggtgtgcggtgaactctggcagagggagggacgccctggcctcccgacggtgccagcgtcctcagtcactacatcactcaagtgcacaacagcttccagaacctggggcctcccatccctgagaccccagagctgacagggcctgggattgtgaggacccaggaatcatcaggaaccgggcttcaggacactggaggggtgaggactctggcttccggagagtctggcccctgctccccagctcatgtgctagttcatagggagcaggaagcagagggggctggggacctgccccagggggaggattcggggactgagaggaggtcctgatacagtggaagagtcccttcttctgttgctgagcgtggtagcctaggagggtgagggtggggggccccttgggaggagcctgtgctgcttttcttgcttcaataaagtttctgctctggatgtgagaggcctccaggctgtgtgagaatctctgtctcttgatgttttgaggtcctccctcttctttcccctgaaatggacccttgtgggagcagggcagagagaaatgacttgctctgtgttcccaagtatcttgggcttgggatcctactttgagtttcctcagatcttttatggacagagttctggaccaggaggcaggagaccggggaggcgggaggccggggttcaatgggaaccctctgaccagttgcttccttccttggctttgcattcctcacctgacaagtggggctgaggaatcacctgcctgctttcctgccttcatggttgtcgtgaggaccctctagctgttctagcttctggatttgcaagttagagtgttacacaggtctgcacaggagaccgtgttaataataacaagaagttattattattgttatttttgagacggagtcttgctctgtcgcccaggctggagtgcagtggcgcgatctcggctcattgcaagctccgcctcccgggttcacatcattctcctgcctcagcctcccaagtagctgggactacaggtgcccgccaccacgctcggctaatttttttgtatttttagtaaagacggggtttcaccgtgttagccagactggtctcgatctcctgacctcgtgatccacccacctcagcctcccaaagtgctgggattacaggcgtgagccacctgctcctggccccaagttttttttttagtccctcagtcagtccctcagcccagcaaggccacagcggggcagaaggtctagtctcatggaataaaccaatcataaaattccatgtctccacactgcaataccatttaatcacgtagctacctcaataaaactccatgtctccacattgcaacaccgttcaatcaagtggctgcctcagtactttccttgcttgtcccaggaagtccccatcacatagcagagttccctcagccctgctgtggcctccccaggccaacatcctggttggggagaaggctgctagggctgggtccggaaccatgttcttgcttctcaaggctgctggaggtgcctcttcgtcatatgaaggtcacccgttcccagggctcctaagtggcagatgttggactttcagggcccaacccctgagagctggaactctccaggggccaagagcagagtcttccaggggggcagagaggaggccccctcagattgtgaccctagctgcacccctgctgaagggaaaagaggaggaaggggtcagcagggtgagggggagtcaaagcagctgaaggaggatggaagggcaactcacctggcgcagacacacagccccgcctcttctcccctgcaacagacagcagggtgaggcctccgcgtggacagactcgcacccaaactgcctggcccaccaggccctggcagggccatttcccttctcaatctatctttcccttcacctaaagggaaacttctgatttcccttcctcctccatcctccaggaactctttccagattgcctttccatccctcttcccacccaagacccagtcactcttccatctctccctgccttagcacttgggaatggcacatacgtgccctgtcagccccatcgagcccagggcccccctgagacctgaagcagtccccttggctctttctgctgcttgctaatctccttaaccaggttcttttggtctattagaccatgtagcagatggacccttttgaggacatatagaatcatctaagaatgttcacgaatctagaaaacacttataggaccccaaaaaacctgagtcacagaggacagcaactccagctgacttccagccctcatttcccctttaaccaagtgggtctcccgaaggccccggggattattgtgtaaggacatcctggcttatttcacccacactgccagtcctgcttcccccatgcacagcttaccacccagataggcgcagttaaaatggctacaggtctgattatagctccagagagtcaccaagctctgggctccatcctgagagaatctggtaaccaaaaagacttcatgggggggaatcagcacctcgcgctccttgggaaagacagagaaggcctgtataggggccccaaagcaagttgttagagagaagagggtggcattaccaaatctgtgggccactgccttatccagggagctggaggcaaactggcccaagcggacagagtcccccagcctcttgggttcaaagcgaaggctgcccacacctcggaacaccacctccccaggtcccctgctgcagcccccactgcctcgcagcagctgcagggcccggatcaggtagaaatgcagggccttgaagggaaagtgcctcatgtagagctcccgggagcctccgcccgtccgcacggcctgattcaactcccagtacaaggtgttcgatgagttggtgtagaccataatggctattccattctgggctttgaagccagggggcaaggtaagccctcgacgcttgtcctcccaggtctcctgggctgcctcccaggattcccgcagcagggcatggtgggccatttcctcctttagcaggggggctgccttctcctccatctcctctgcacaacccacataggtatcgtcaaaggtgtctggagccaggcccaggggcaggatggtgggaacagcctgggcctgtggagcaaaagaggtgccacaccgaaaagagcataagttcagagcactggacatgggtcctgggggcaaacccatccagaaac

SEQ ID NO: 96220 - DNA, 18026 bp, Homo sapiens
tgctgcggctgctcagaagccaggtagcctgccctgggtgaagccttcgcgcaggtcaatgacggggcggaggggcagggcgcggtcccctgcatccccgatctggggagcggtgggcccaggggccatcgccttagcccctggcgctggggctcggcgccaagtgacgggcggggctccaccttccagccatccgcccggcccgggagggcggacgctgcgagactcccggccgcgccctctccttcctctcctccccaagccctcgctgccagtccggacaggctgcgcggaggggagggctgccgggccggatagccggacgcctggcgttccaggggcggccggatgtggcctgcctttgcggagggtgcgctccggccacgaaaagcggactgtggatctgccacctgcaagcagctcgggtaagtggggactgccccactcagttgttcctgggacccaggaacaactccttcagaaccaggaggtgcacccccaacctcttctccaggtcttcctaaggccctaggaatctccgccacctccccagccattactcctccaggaaccaagatgctccttccgctcctgaccctccagcctctcttgttttacttgaactatcgtttcccatcaccacctctgtggtggattttgcgcctcacagacaggtactcctgagaaacaggctggtggaagagtccagtatcagcggaacttacaggaggggagactcgagattccttcaggaaaggtgtaggaacctggaccactttctttttttttttttttttttttttttaagacagggtccctctctgtcgcgcaagctggagtgcagtcagcggtgctatcgcggctcattgtgagctccggggatcctcccgccttagcatccggtgtagctgagaccacagacatgtgccaccatgccaagctaattttatttatttttttttggagacggagtttcactcttgttgcccaggctggagtgtaatggcatgatctcagctcaccgcaactcccgccccccgggttcaggcgattctcctgcctcagcctcccgagtggctgggattacaggcatgcgccaccatgcccggctaattttgtattttaagtagagacagggtttctccacgttggtcaggctggtctcgaactcccaacctcaggtgatccacccaccttggcctcccaaagtgctggggttacaggtgtgagccaccgcgcctggcccatgccaagctaattttaaaatttttttgtaagagtgctctgttgcccaggctgatcttgaactcctgggctcaagggatcctcccatctcagcctcccaatatgctgggattacaggtgtgagccacagtgcccagccaaaccatggctatcttgaaaaccacttgtcttccagtccccatgccccgaaattccaaggctctcatccctgaaacctaggactcaggctctccctacctcagccccaggagtctaaacctttaacttcctctttccctgggactaaggagtgctgcaccccaggcgcctcccttaccccacatccctcctcagcctcccctcctcagcctcagtgcatttgctaattcgcctttcctcccctgcagccatgtggctccggagccatcgtcagctctgcctggccttcctgctagtctgtgtcctctctgtaatcttcttcctccatatccatcaagacagctttccacatggcctaggcctgtcgatcctgtgtccagaccgccgcctggtgacacccccagtggccatcttctgcctgccgggtactgcgatgggccccaacgcctcctcttcctgtccccagcaccctgcttccctctccggcacctggactgtctaccccaatggccggtttggtaatcagatgggacagtatgccacgctgctggctctggcccagctcaacggccgccgggcctttatcctgcctgccatgcatgccgccctggccccggtattccgcatcaccctgcccgtgctggccccagaagtggacagccgcacgccgtggcgggagctgcagcttcacgactggatgtcggaggagtacgcggacttgagagatcctttcctgaagctctctggcttcccctgctcttggactttcttccaccatctccgggaacagatccgcagagagttcaccctgcacgaccaccttcgggaagaggcgcagagtgtgctgggtcagctccgcctgggccgcacaggggaccgcccgcgcacctttgtcggcgtccacgtgcgccgtggggactatctgcaggttatgcctcagcgctggaagggtgtggtgggcgacagcgcctacctccggcaggccatggactggttccgggcacggcacgaagcccccgttttcgtggtcaccagcaacggcatggagtggtgtaaagaaaacatcgacacctcccagggcgatgtgacgtttgctggcgatggacaggaggctacaccgtggaaagactttgccctgctcacacagtgcaaccacaccattatgaccattggcaccttcggcttctgggctgcctacctggctggcggagacactgtctacctggccaacttcaccctgccagactctgagttcctgaagatctttaagccggaggcggccttcctgcccgagtgggtgggcattaatgcagacttgtctccactctggacattggctaagccttgagagccagggagactttctgaagtagcctgatctttctagagccagcagtacgtggcttcagaggcctggcatcttctggagaagcttgtggtgttcctgaagcaaatgggtgcccgtatccagagtgattctagttgggagagttggagagaagggggacgtttctggaactgtctgaatattctagaactagcaaaacatcttttcctgatggctggcaggcagttctagaagccacagtgcccacctgctcttcccagcccatatctacagtacttccagatggctgcccccaggaatggggaactctccctctggtctactctagaagaggggttacttctcccctgggtcctccaaagactgaaggagcatatgattgctccagagcaagcattcaccaagtccccttctgtgtttctggagtgattctagagggagacttgttctagagaggaccaggtttgatgcctgtgaagaaccctgcagggcccttatggacaggatggggttctggaaatccagataactaaggtgaagaatctttttagttttttttttttttttttggagacagggtctcgctctgttgcccaggctggagtgcagtggcgtgatcttggctcactgcaacttccgcctcctgtgttcaagcgattctcctgtctcagcctcctgagtagatgggactacaggcacaggccattatgcctggctaatttttgtatttttagtagagacagggtttcaccatgttggccaggatggtctcgatctcctgaccttgtcatccacctgtcttggcctcccaaagtgctgggattactggcatgagccactgtgcccagcccggatattttttttttaattatttatttatttatttatttattgagacggagtcttgctctgtagcccaggccagagtgcagtggcgcgatctcagctcactgcaagctctgcctcccgggttcatgccattctgcctcagcctcctgagtagctgggactacaggcgcccgccaccacgcccggctaattttttttgtatttttagtagagacggggtttcatcgtgttaaccaggatggtctcgatctcctgacctcgtgatctgcccacctcggcctcccacagtgctgggattaccggcgtgagccaccatgcctggcccggataattttttttaatttttgtagagacgaggtcttgtgatattgcccaggctgttcttcaactcctgggctcaagcagtcctcccaccttggcctcccagaatgctgggtttatagatgtgagccagcacaccgggccaagtgaagaatctaatgaatgtgcaacctaattgtagcatctaatgaatgttccaccattgctggaaaaattgagatggaaaacaaaccatctctagttggccagcgtcttgctctgttcacagtctctggaaaagctggggtagttggtgagcagagcgggactctgtccaacaagccccacagcccctcaaagacttttttttgtttgttttgagcagacaggctaaaatgtgaacgtggggtgagggatcactgccaaaatggtacagcttctggagcagaactttccagggatccagggacacttttttttaaagctcataaactgccaagagctccatatattgggtgtgagttcaggttgcctctcacaatgaaggaagttggtctttgtctgcaggtgggctgctgagggtctgggatctgttttctggaagtgtgcaggtataaacacaccctctgtgcttgtgacaaactggcaggtaccgtgctcattgctaaccactgtctgtccctgaactcccagaaccactacatctggctttgggcaggtctgagataaaacgatctaaaggtaggcagaccctggacccagcctcagatccaggcaggagcacgaggtctggccaaggtggacggggttgtcgagatctcaggagccccttgctgttttttggagggtgaaagaagaaaccttaaacatagtcagctctgatcacatcccctgtctactcatccagaccccatgcctgtaggcttatcagggagttacagttacaattgttacagtactgttcccaactcagctgccacgggtgagagagcaggaggtatgaattaaaagtctacagcactaacccgtgtctctgtagcttttttggagccagagccactgtgtatgtgtgtgtgggtttgtgtgtgtgtgtgtgtgtgtgtgtgtgtaagagagtggaggaaaaggtggggtacttctgaagacttttatttttttttaattaatttattttttttcagagatcgagtcttgctctgtggcccaggctggagtgcagtagtgtgatctcggcccactgcaaactcccacctctcggattctggtgcctcagcctcccaagtagctgggactacagacgttcgccaccatgcccagctaatttttgtatttttagtagagacggggtttcaccatgttagccaggctggcctcgaactcctgacctcagacaatctgcccgcctcggcctcccaaagcgctggaattacaagcgtgagccaccgcgccgggccctgaggatttttattactcgtgattgggagtactgtccctacttagatctgacagccccttgttgctggacttgtgtgagttgtggtccctgtttttctggttccctgtttctatcacacaggagagagagaccttccaggaccctaacgtctgagcccccagttgctcactcctggactgtcagtattggcccccagtcctctcctcccactgggacctccgcgtgggcagaagaggcggaggagggagcggattatcactgaactacatttcccggaaagctatgaggttggcagcgtcagtcagctacagagaaagaggccccagggcattttgggagttgtagtcttagggctaaaatgtccacttcgtggctcgacagccgtttccaaggaccgcggtgggggcggcagcggcctggggggccggatctagcccaaagcctgggtcctggggcaaggggaggggaggaaactgaaggcctgagtccggtccttgactctggaagccagagtagtcaggaggcttcctcttccctagatgctgggaaaattctagtccaaaaaggctgcagcctctgtgacgtcatggagcgatgggcgggacctccctttgttgcagtccaatcagacagagttgagtttctgggtggggccgaggaaaaccccaaggaatatctataaaggaattcgggcccctacgtgagaagctcggagggggtggtttcaggagttccttgtggagaggggatcgtccgtgactcagaccccgtcgaaaagctctcgatttcacgcaaccaaccttaccctsgtccccaacacaatccttgattttacccctgggaaaattagcgtaggtggtcatgaccccggcttcctctttaaaagccctcagaacctggaccgggctcctcaatgaaccctagtgttagaggccacaaatcgggaaycaaggtcggggagcggctgtttagggtgcatcactgttcaggatgcatcggggctcctttttctaagcggaagkgtgcgccctgcaaattggragcccgttagttttggggaagggtgaacaagggccccctaggtctagaggaccgcatggagtctcgcttaagtgttagtggggtcctcagttctagraatctggtatgtgttttggttttgaaggagttccgagtttgataatatcgtggttgggtctgtgttagatgtttattggtttgggcattgaatcttcagcttgaggttcaacaggttttggggggctggcgggggagtgcctcggtgttgctcttaagggttggagttcaggctcacgtcaatctggggacttggaaaattccacagtttgggattttgggaaggggcgcatggggttgggagattccaggttcwgagtttggggacttatgagtgattcctgtttaatagtttttctgatctctcagttgggggattcastgagaaccctaaattttgggtcccctggattggggctcagtttcacacttcggaggcatttgatgaaggacataggtcctctttatttggagatttcctgaagatcctcttttcgaggtttgcggaccccatggataggcggcccagtgggatttcttaagatggattttggcttttctccgtttagcgttctcctgctctcggtttggggtgagagcacccttcctaacggtcttcgggaactgtgcgcgccggctgcaatggggccgcattttaccctcctgtgtgcggcgctggccggttgcttgcttcctgccgaggggtgtgttatatgtgacccgtctgtcgtgctggcgctaaagtccctggagaaagattacctgcctggccacctggatgcgaagcatcacaaagccatgatggaaagggtagagaatgccgtgaaggatttccaggaactgtcgcttaatgaggatgcctatatgggggtcgttggtgagggcaggggggaccacggacccctgggtcctgggaaaggagggagataagaccaggggaaggaagaggctgacagcagggtctccgggattcgggaatggagaaggctgagatgcagawtccgaggttccccgaggctagtaaatacygttttccctatcctcggctggcaattttatgtaataaaactacaactcccagaaggcaacgggcggctgagtccttaaccaggcctatcyttgcccagtggcctcatgggtattgtagtttctaagattaggcgcgccaatgagacagtaaggctggaatctggggttatatctcctctgacagatgaggccacactgcaaaaggggtcctggagtttgctgaaggatctgaaacgcatcacagacagtgatgtaaaaggtaaatgcatcaagggggtgggagtcccgaatctctcagagaagccagcgttagtgatgcctggtctcttggtcagatactaggctgtggacccagaccgcctagattccaatgcctgctctgccacttcctagctgtatggccttgagcaaaggactttgaagctcccttggctttaaaatgcttcctcagttgttcagtttaaatgtgtattgctggccgggcacggtagctcaggcctgtaatcctggcactttggaaggctgaggcaggcagattacttgagctcagtagttcaagaccagcctggccaacatggtgaaaccttgtctctacaaaaaatagacatatgtatacatattagctgggcatggtggtgtgtgcctgtagtcctagctacttggggggttgaggcgggrggattgcttgagtccaggagtttgaggcttcagtgagccacgattacaccacacactccagcctgggtggcagggtaagaccctcccccatcccccaaaatatgcattgcctagcccagcagctggcattatgttagacggtcagttgtagygccctttcctgagaaggccaggaagtagactgccagactctgcaggcagaagtaaacttccaacacctcacacgtgggattgggggttcctgtgtcttcccaggcgatctcttygtgaaggagctattttggatgttgcacttgcaaaaggaaacctttgccacctatgttgctcgattccaaaaagagggtgagagaagatgggartcggtgtcccccagctcctctttccactatccaagagtccttgtctccagccccttacttctccaagcccagttcctcagcttccccaactrcctcctccttcagacccaagtcttttctccctcgaacccaaaagcccaaagcccagctcttcccccaaccccctcttccatcgtctttcatttagaaatctgactctgtcatctctttcttgctctctttttttctcttttgacacagcttattgtcccaacaaatgtggtgagtctggattacagaagttaaccctcatcctgccctctgaatagtcaacctccccactcgcctttttggatcctggtggttttgtcattctctgccttggagaggttcctgggtctccagtattctttctgcaccatggatttcttggggagcaggtcatattctacttacactcttttttttgagacagtctcaccctgtcacccaggctggagtgcagtggcacgatcacggctcactgcaacctccacctcccaggttcaaactattctcctgcctcagccccctgagtagctgggattacmggtgcccgccatcacacccagctaatttttgtattttyagcagagacggggtttcaccatgttggtcaggctagtcttgaactcctgaccttgtgatcckcccgcctcggcctcccaaagtgctgggattacaggagtaagccaccgcatccggcctctacttacaatctttactgagccttgttggagcccacttactacttacctgcgtcctggtcctgtgccttcgtctgaccatctaggaatgtcatagatgayctggccccagcccttagccctgacctctccttttagccatgccccttagtgggcawatacaagccttgaccctgcccctccaggtgtgatgttgcaaactctgatctggtgcaagaactgcaaaaaggaggttcacgcttgtcgaaagtcctacgattgcgggggtgagagaactggacccagcaggaggaattggtgcaggtggggtggggcgagaggagaggcagtctagagagagcctagatgggggtgtgggggcagtagacaagaaaaggtagggtttaggccaggtgcagtggttcacacctatagtctcgcacttcgagaggctgagacgggaggattgggaagccaggagtttgagaccagcctgggcaacatagcgagactctatctctacaaaaaaatttaaaaattagtcaggtgtggtgttgcgttcctgtagtcccagctacttggaaggctgaggcaggaggattgcttggacycaggagttggagactgcagtaagctatgatcataccactgcactccagcccaggcaaaagagtgagaccttgtctaaaaagaaaaaaaagaggccgggcgcgctggctcacgcctgtagtcccagcactttgggaggccgaggcaggtggatcacaaggtcaggagttcaagaccagcctggccaagatggtgaaaccatcgtttttgtactaaaaatacaaaaaaattagccagacatggtggtgggcacctgtaatcccagctactcaggaggctgaagcagagaattgcttgaactcaggaggcgaaggttgtagtgagataagatcgcgccactgcactccagcctgggtgacagagtgagacttcatctaaaaaaaaaaaaaaaaaaaaagagagagagaaagaaaagagaaaagacgaggttacaacaaatgtaaaggattaggggagggtaaagaaccgtgaaggaggcccggcrcagtgcctcatgcctgtaatcgcagcactttgggatgctgaggcagrcagatcacctgaggtcaggagttccagaccagcctgtccaatatggtgaaaccccatctctactaaaaatacaaaaattagccaggcgtggtggcaagcgcctgtagtcccagatactcaggaggctgaggcaagagaatcgcttgaacccaggaagcggaggttgcagtgagccgagatcgcgccaatgcattccagcctgggcgacagagcgagtctccatctcaaaaacaaaaacaaaaacagaatcatgagtgtcccatggtcatcccccacccccagagcggaatgtggaagttcctcaaatggaagacatgatcctggactgtgagttaaactggcatcaggcttcggaaggcctcactgattacagcttttacagggtgagggcctcaacttctgtaacccttgaactccctagactacaatacttgtgttctggatctatgggcctgcacccacgattctcatgacccaggagggtggtctattaggtgtggtctctacagacctctggggaccccgtgccctgaccagtgacaccctggacactcacctcccacactgaggccctgtgatcttctcacccctgtactcccccaacccctgaattcctcaggcctcagtgaccccttgagcttgggtctaggtttgggggaacaatacggagaccttggtgtccaaggggaaagaggccaccctgaccaagcccatggtgggtccagaggatgcaggcagctaccgctgcgagctgggctctgtgaattccagcccagccacgatcatcaattttcacgtcacaggtcagtgctgtggggctgagagaagtgtaggattcagggcccaggaaagctggggtccgcggcgggggcgtggccttggcgatgggggcgtgacttcctgttgggtgtggtttcggggcacggggtgtggcttcctgccgggggcgtggcctctggccccgaggacaggggttcccttgggtgtgttcaggcttgacactgttgaaggcgtgattatctctgggatggccggctactgggacgggcttgtctttgccagggcaggaactccacgccctgccaggactgctctttacgctttctctaacagtgttgcccaaaatgatcaaggaggaaaaaccttctccaaatatcgtaaccccgggggaggcgaccacggagtcgtccataagcctccagcctctgcagcccgagaaaatgctggcaagccgccttctggggctgctgatctgcggctccctagcactgataaccggccttacctttgcgtaagcaacccattgaagaagacaggcttggcttggagtaaggggcggggcttccaggaacccaacacagaagctggtctgggggctactgaggcctgagagcaggactttcctggggatggagtgcggggggcttgaataggaggacttcgaagggcgaggcttaggtaattgctagaataaggtcacaaagggggaggttgggaggggtgtcccccacacaattagtacccaaaccggttccatgatctgcaccccactcccacccctaggatatttcgtcgaaggaaggtgatcgatttcatcaaatcctcactgtttggccttggcagtggagykgccgagcaaacccaggtcccaaaagaaaaggccacagattcgaggcaacaataaagatttatcttgttgtctaagcatctgactcactccccgggacgggactgattctagcctttggttccccgagaggagaggtctggggatgggctccggcctgagggaggaagggcagaaaaccgggacccttgggtcctggaggggaccaactgactgcgatgtaattccagaatcaaggaatggggcagggccaaccctacccagatctcctcccccaggcctggtctcctcacaggacgccccctccccgctcttcctgccgggtttcctcttgccttttcctgtcccccacccagtgctgggagccgtggcagaggcaagagcagtggaactgacccaggccagtggagccagggcctccgggtgtgccggacccgaagcagggtaagagccagggacccagcagcccaaacccctcctccctgggccccaagactcagtcccccagccatcttccatcccaggacccaggaatccagggtaccatccctctcctccccctggactcgcaagtctgagccccagccccctcctccctctgactcggagtccaggttccctccaccccatccccacaagaatgccttaggagttggggccttacccgccttcccttagggccatgctgtctggtgaacggaaggagggcggaagcccccgcttcgggaagcttcatctccccgtgggcctgtggatcaattcccccaggaagcagctggcgaagctggggcggcgctggcccagcgcagcctctgtcaagtgagtgccatctctgcaggactcctgcccctgcacacctgcttcccatctgtccctgttcactgcccagtccctgcaaagtgttggctccggtcctcatcctgaattgggcaaacgagctggtgggcagggggagacggtggggcacagtgataccagggcgcggtgggagtaagagctaggctaggaggtggagtgaggccggatgggcacggggacggggacagaaggagcagggggattgattcaccttccttcctcccctccctgctcacctcttggaatttcctactgtgggacttgcctttatttatttattttttctctctctctttgcctcgcgtctgtccccaccctcacccccgccccgtccatccaccctgggtccctgtcctccctctgggtctctgcccacttccctcctaatatgcccccacccccgtcttggcgtgtcgtcctgggtctctctcccgcgactctgttccccggcggactcccaggtcttcttcgtcggacacggggagccgcagcagcgagccgctacctccgcccccgccgcacgtggagctgcggcgagtgggcgctgtcaaggcggccgggggagcctccggtagccgcgccaagcgcatctcccagctcttccggggctcggggaccgggaccacggggtccagcggcgcaggaggccctgggaccccggggggcgcgcagcgctgggccagcgagaagaagctgccggagctggcggcgggcgtggcccccgagcccccgctggctacccgcgccacggcgcctccgggggtcctcaagatcttcggcgccggactggcatcgggcgccaactacaagagcgtgctggccacggcgcgctccacggcgcgcgagctcgtggccgaggcgctagagcgctacggcctagcaggcagccccggcggtggccccggcgagagcagctgcgtggacgccttcgctttgtgcgacgctctgggccggcccgcggcggcgggcgtgggaagcggcgagtggcgggcggagcacctgcgcgtgctgggcgactccgagcgcccgctgctggtgcaggagctgtggcgggcgcggcccggctgggcgcggcgcttcgagttgcgcggccgcgaggaggcgcggcgcctggagcaggaggccttcggggccgcggacagcgaaggtgagcggcgggcggggctctggggcggggactcggtgccagagaggcggggtccgtggggcggggcctgggcggggcttgtgggactcgcgggctggctgggggcggggcccgcgggaggggactgggaggggactggacggtgcgtgttggactctaggcagagctagagcagggccgggggcggccagatgggcgggcctgagagttgggtggggcttgttgattgagcaggagttttacaggggccaagcttggggcttaggcgggacgggggctggttgctggtggtggcttggagtggcctgaagtggctccgaattggggttagggccttctgcaggcatttcagactgccttggaggaggtggggtgtgtagcggggtctgcggagtagtagatcctgaggagcgtttgtggagtccagtggaatgggcaggagtccgcaggggcctaagggattcgccctgtgtggtaggttagaggacactagcaatttgctgatctttgaaagttcctttctctaaccaatccccactttctggtaaggtttctgcgaggtctgttaggtgtacatcctgcagcttaatggcttaaactgtactctcctttgatgtggtctcttggggccaattaggagaaagagaaatcaatagtgcaactgttttgatactgaatattgacaagggtctttttgaattaaagaactagtcctggccgggcgtggtggctcacgcctgtaatcccagcactttgagaggctgaggcgggcggatcacctgaggttgggagttcgagaccagtctggccaacatggtgaaatcctgtctcttctaaaaatacaaaaattagccgagcgtggtgacgcatgcctgtaatcccagctactcgggaggccgagacatgagaataatttgaacccaggaggcagaggctgcagtgagccaagatcgcgccactgaactccagcctgggggacagagcgagacttcgtctcgaaaaaacaaacaaacaaacaaacaaaaaactgtcctccagaaaaagaaaaaggaattggagacctaggagccggaagagtaagcacggacaatgttcttgggagcgatgcagagcagatgggcggggcatgttgtggggcggggcctgtggtggggcggggcttgtggaaaagcgtggtctggggcaaaaactgttgggtcccgcgaggagtggtggcatgtggtgagcatgggtctctgtggtaggaggcagctctgccaagtaggttgaggtggctactgagcagggcctatgtgggtggagtatagaagggggcgacacctgcagagtgagtgaatacaggttcctagatcaggcctgctgggactaagatgggcggagccgctgaggggccggccttggataagacggccttaggctgggttggctgccaagtgggatcacatgggaaaggaaggggctgaaggaagatatcactgtagaggcgaaggaaggcctggaacagaaggtagagtcaatggtcaaacagctggtggtggaccgcgcctggcaggggtggggcctggcgcattgaaagcacgggtctgctcagggagccttctaaacgcttttctgtatctgagcttccttttgggagatagaatgttgtagcaattcaactgatgggctttgaactggggtttgaattccaacccattctgtgccagttaatctcagtaaaatcctaggtgaggattcaatgggataatatattcaatgtatataaagggcctagcacagggcttggcacagagtaggtgcttaataaagaatgacgattataagcattgtctccgccaccccctcgacaaagtatccattgagcacctggtgtaggccacacattttcctttttgtttttttgttgttgttgtcgttgttgttcgagatggagtcttgctctgttgcccaggctggagtgcagtggcacgatcatggctcactgcgacctccacctcccggttcaagcaattctcctgcctcagcctcccgaatagctgggattacaggtgcccactaccacgcctggctgattttttgtattttgagtagagatgggggtttcgccatgttggtcaggctggtctcgaattcctgacctcaagtgatccacccacctcagcctcccaaagtactgggattacaggcgtgagccaccgcgcccagcctggccacacagttttcggggcactggggaatacagtggggacgttgacagatgaggtttccaccctcccatatctcacaagcctagtgggaaacacatcagtccattcattcagctcatttccccttggtgcctactgtgtgccagggttcctgctgggtccagaaaaagctcagagtacccagtggtgcagtcacctgcttcaacttggactgtcagggaagggtgtttaggaagaggtggtttcaatctcctggagggcagggtcttctctgttatccagtgacttgaacagttctaagcatgtagtaggtagtcaataaatacttgttttgttttgttttgttttttgagacggagtcttgctctgtcgcccaggctagagtgcagtggcgcgatctcggctcactgcaagctccgcctcccgggttcacgccattctcctgcctcagcctcccgagtagctgggactacaggcacctgccacattttttgtatttttagtagagacggggtttcaccgtgttagccaagatggtctcgatctcctgaccttgtgatccgcccgcctcagcctcccaaagtgctgggattacacgcgtgagccaccgcacccggcctaaatacttgttaaaagaacaaatgggctgggcgctgtggctcatgcctgtaatcccagcactttgggaggctgagacgggaggatcacaaggtcaggagttcgagaccgaccagtccgagaccagcctggccaacatggtgaaaacccatctatactaaaaatacaaaaattaaccgggcgttgtggtgtgcgcctgtaatcccagctacttgggaggctgaggcaggagaattgcttgaacctgggaggcagaggttgcagtgagccgagatcgtgccactgcactccagcctgggcgacagagcgagactacgtattgaaataaaaaaaaaaaagaagaagaacaaatgattcaatggaaaggaatgaatgaaattcctgagctgaaaactgcaagatgggtattaatcaggacagaaaggtgttccacgcacagggaacagaatatgcaaaagcctaaatcctaaatgtgggaagcagcctcacctctctgcaaccagttctttgtctcataatctgcagctctgtgtctatccctgtctttccaggctcagcctcactgttctccatctctccgcaggcaccggcgccccttcgtggcggccacagaagaaccgctcccgggcggcgtcgggtggggcagcgctggccagtcctggcccggggaccggatcaggggccccagctgggtctggaggcaaggagcgctcagaaaacttgtctttgcggcgcagcgtgtcggagcttagccttcaggggcggcggcggcggcagcaggagcggagacagcaggcacttagcatggccccaggggcagccgacgcccaaatcggaactgcagaccccggggacttcgatcagttgactcagtgcctcatccaggcccccagcaaccgcccctacttcctgctgctccagggctaccaggacgcccaggtaaccgccgccccagccccgcacgcccagagccctataccccatctgttggtgggtgagcaacaaaactacaactcccagaaggcccggggcgcgctagcctcaagtactctagtggggcgtggtccctcaaggttccagagtagagattcacaggagagggagagtagatggctgagaaagagtccaatggaggaggaaatagggaatagttcactttattcaaagttggaggaaagcactgtcttcattaaggagattccattgtagaaagaagatccccgccaggcgtgcggctgactctcat

SEQ ID NO: 96221 - DNA, 18041 bp, Homo sapiens
  misc_feature (1)...(18041): n = A,T,C or G
cccactctcatgccactatcccgggggaagctggggcctgtgggcctgtggtttgctgaggtttctaatgccattctctgtccccttcttctccaggtttactggctccacatgctctatgctgctctgggggccatttgtttcaccctggtaagtcccagccccactctaggaaggggagctgaggggatgaggggaggaatctagggaagggggcatgaatttagactgcctgggaggcagggaatggggccatagcaggccattcctctcactactgtccagagattccattgatttttgtgggcactcttgccatctcttgttcaagctgcctgctattagaacactagtcagccatattgagaacggtgtgtctgcctcctttcctagactgtgagcagctacagtatagagcccatatgttatgctgtgcgttaatgtggccctaagcactgtgtggcgcataggcccccaagacaaatctgctgaccaaaaatgagctctggacactgatgcctgagttctcacttctggcttccctatccttgcagttcctggcttacgacacacagctggtcctggggaaccggaagcacaccatcagcccggaggactacatcactggcgccctgcagatttacacagacatcatctacatcttcacctttgtgctgcagctgatgggggatcgcaattaaggagcaagcccccattttcacccgatcctgggctctcccttccaagctagagggctgggccctatgactgtggtctgggctttaggcccctttccttccccttgagtaacatgcccagtttcctttctgtcctggagacaggtggcctctctggctatggatgtgtgggtacttggtggggacggaggagctagggactaactgttgctcttggtgggcttggcagggactaggctgaagatgtgtcttctccccgccacctactgtatgacaccacattcttcctaacagctggggttgtgaggaatatgaaaagagcctattcgatagctagaagggaatatgaaaggtagaagtgacttcaaggtcacgaggttcccctcccacctctgtcacaggcttcttgactacgtagttggagctatttcttcccccagcaaagccagagagctttgtccccggcctcctggacacataggccattatcctgtattcctttggcttggcatcttttagctcaggaaggtagaagagatctgtgcccatgggtctccttgcttcaatcccttcttgtttcagtgacatatgtattgtttatctgggttagggatgggggacagataatagaacgagcaaagtaacctatacaggccagcatggaacagcatctcccctgggcttgctcctggcttgtgacgctataagacagagcaggccacatgtggccatctgctccccattcttgaaagctgctggggcctccttgcaggcttctggatctctggtcagagtgaactcttgcttcctgtattcaggcagctcagagcagaaagtaaggggcagagtcatacgtgtggccaggaagtagccagggtgaagagagactcggtgcgggcagggagaatgcctgggggtccctcacctggctagggagataccgaagcctactgtggtactgaagacttctgggttctttccttctgctaacccagggagggtcctaagaggaaggtgacttctctctgtttgtcttaagttgcactgggggatttctgacttgaggcccatctctccagccagccactgccttctttgtaatattaagtgccttgagctggaatggggaagggggacaagggtcagtctgtcgggtgggggcagaaatcaaatcagcccaaggatatagttaggattaattacttaatagagaaatcctaactatatcacacaaagggatacaactataaatgtaataaagtttatgtctagaagttaaaaccctgtatggctccaggagtatgtgtggctctgcccaaagtatccacttcttccttctgcattctggcttgggctgtcccaccttttccaaggtaatcaaatacactttactgcagcagtttccggggacggatgcaatagactagtgaaggctcaggagttgggtggggaaagggagagctcaaccctatcacactggatcactggatatggaagagacctcttggctgtagtgcttgaccttttctgcaccatggaccctttccaaaagctcatgagagctaactctcttccccaaagagctgtatgtatacctacagttttgcagatggaggaggggatggactgcaggttcagtccatgtcaactccagtcccatcttacaaaatgaggaaactgggcctggtgcggtggctcacacctgtaactccagcactttgggaggccgagggcggtgggggggaatcacctgaggtcaggagtttgagaccagccagaccaaacatggtgaaaccccatctctactaaaagtacaaaaaaaaaaaaattaactgggagtggcggtgagtgcctgtaatcccagctactctggaggctgaagcaggagaatcacttgaacccagaaggtggaggttgcagtgagctgagatcatgccattgtactccagcctgggcaacaagagtgaaactctgtctcaaaaaaaaaaaaataaataagtaaaaaaaaatccaaaaaaaaaaaaaaacacaaaaagtaactgggcatggtggcactcacctggggtcccagctactcaggaggctgaggtaggaggatcacttgagcccaggaggtggaggttgcagtgagctgacgatcacaacactgcactccagcctgggtaacagagcgagactccgtctcaaaaaacaaaaaacaaaaaacaaaacaaatgaggaaactgaggcccagagtcgagtcatttggactcagtaaagagcagtgcttttttttgcctccacaccctgaataccttctttgattctctttattgtttcaaggctgagcgggaccccaccctcctggccggcagctctgagggcttggtcccgagggcccggggcctaggctggttgcacttaagtctctgggtttgccccaccatccagctgggaacactgagctctgtgagagggagcacacatgagtaaccagccccaccctctgcccctcccatcccaagggactcacaaacccagacctggttcctttctactaaacactcaataactttatttgcctttggctggctccttggtgtggggcagggtagggtttggcaacagcctgggcttcatgcgccctctggtggacctcagaggcacgaactggaatctgggccaaacctgaggacttaacagtcaatagcctaggagggtcgcagcgctcctcaggtctgcaccccagacccaacatcaggggacggggcactctgggaggaagccctgaacctctggctctcatactcgcccgtgttggacaaccgcatgttctgccgagccttcatctgcttcacacggtccttgtccacttcccgcttggtgaggatgaagaggaggataccacaagggaagccgatggccctacgggtggggagatgtgcacggggtttggggaggggccaagcctgagccagaggagctggggggagtcattctagcttcatcagttgcatgaatgctgcaatacctcttatagtctattcatcctctgtgctggctgctggagggacccacacaaatcagatcctgtcacttccctgcttaaaaccccgtaactccatcacttcctggccaagtccaaacatggcacaaaaggcccagtgtggctgggtctctgcctgcctctttcctcctcccgcctagagcctgatcctcagcacgagccctgcattcctgcaacagcacctgtgcaggattttccaggcagccctgacgctttccctctctgagacttggccaaggtaccctcccagttttcccctcttaagctaagtaaccactgcttgggaggcactttggtatgggggaaagagcatggagtcacagactaggtgagaatcctagctcagtctcagttccttcctctgtgaaatggggatgtaatacttatctcaaacactaaaacattacatggcaaagtactggcacacctcacatgcagaaaaaaatgttgatttcttcctcctttccctttaatattggtcaataatatgtattaaggtcagagtcagagcccaatcacaatgttcataacgccttctgagtactactatacaactagtacaagctcacatgatctcaacgaactacttacttaaacttgggtctcactccaagctcccaaaagggaggatgaggccagggacccaagtctgaatcagatcaactcagcttactccacagtaaacccactgtcttctcaattccacatactttcccacctccactgccccacccctctgagattccaatcgaacccaacaattctgttcccacaactttggattcagctcgccacctgaaacttggagaagtttctaagtcctgccctcccctacaagccacgccccgttggtgggcaaaggggtggttaaaactcaccaggccagtcccacagctttcatggggttcttgcccctctttctgggaatgtattccagctccggggataggggttcaggttcctccttgccctctggggagctgtggctttgcagggcccgggtcctgttatgagaagccttgttagctgtggctcctgcgagaatccctgtggatggaggtaaggaaggtcagtaagaagagatgagaagaaagcaagcggggaggtggggggcagtaagggcttgggaggagcggctgagatctggggaaggggagtgactgcagtctgaagtaagaagtgccaaggagaatccaaagggaaatgggaaaatcgccaccgaggtggcacctttggaagccacttccacgtcactgcgggctcatcaccctggtgccaggacgaaaagcttcgctgttcttcctcagacgacagcatgggaaggactgcagtgggactcacataagacgtatgaaggaaatccgggaaaaggttttgaaactgcaaatgttagcactggaagggaccttaaagatagtctactccatcccttgcactgtacggaagaggaaactgaagccctgagagaaaaactgctttgcccaaggtcaaactgctaattatccggggctggaactcaaacctccagaagcccggggctctttcctctgcactgcggtgagtgtgaaacacctggagcgcgggagtccaacaggcttcctaggagctccctcttgcagcaagaccccggaggtgtcgagcaacccgaaggcggggggatgcactgggtgacctctaaagagcatctctgcacccccagactctaagatcttgcagaaaagtgtggggaggaaccaagagccctgacctcctgctatcgtcgggctggacgtgaaagaaaagggatcttctgcagtcctgccctccccggggtccctctccttaccccggaggacgcgggcatttctcgccccccggcccttcagcgccgtagcagctaccaccgccgccatgttcagatcccacccccgcttcaccgcgctccccgccgggaattgtagtttgcgtaaggggcctcccccgctccttccgtcctgcctacagaccagaaactacatctcccagaagcccgcagagcggacccaggagaactactcttcccaggagaccccggaggcgcgcgcgctcgcttgtttccctccagttgggggcggagtcaggtggggcggagtttgggttctctccgccacgccccggccccatcttccaatgccgctctgtgattggtgaggcggccagccaaccttcgtagctattggccgaacggccgtcgctcttcctgccggggagtcgcctacgcctacttcctgccgggaggaggggctcgagttccgcgtcgtcgcgcagagctgactctgggaggcgtttgggcccagagaagtggatccgccgcttgcgccgcatggagtccgaatcggaaagcggggctgctgctgacacccccccactggagaccctaagcttccatggtgatgaagagattatygaggtggtagaacttgatcccggtccgccggacccaggtgagaactgccgctcctcaggccatgggacaggagacgctcacccctggcctctgactcctgcttttccccgctcccctccacacccgactggtcattcctaccgatatccctcttcccctcctcccccactcccaccctcacacttagttctcaggcctggctggggtgggggttccctgacgcctcctctggcccttcccctcacacacccccttcccatcatccccttggccctcccttaccgcacggtctctggccagccgtggcctcccgtcctgtgtcccgcgcgcccccgcggaccccggtgtgtctgactccaccttcccttctcgccacatgacccgccccagcctcaggcctcctcatgcttctctccgtacctcttaccgcctcccgagccccatcttctaaccctctccccaaagcagatgacctggcccaggagatggaagatgtggactttgaggaagaagaggaggaagagggcaacgaagagggctgggttctagaaccccaggaaggggtggtcggcagcatggagggccccgacgatagcgaggtcacctttgcattgcactcaggtaggtctttgaggcgatccacctcaaatcagtttaggtgggcgtgtaagcattaaacatcagccatggacagaacgttatgggggacacagagatgggcaagatgctggccttgcgctggaggagcccacaggtgggaaagtgtggcagaatggatgattgcttggcttctggcatcagtcgagacaccctctactttgccagttaaccttgattaacctcttagttttcttttaaaaagttatctttggccgggcgtggtggctcactcctgaaatcccagcactttaggaggctgaggcaggtggatcacttgaggtcaggagttcgagaccagcctggccaacatggcaaaacccagtctctactaaaaatacaaaaatttggctgggcatggtggctcacgcctgtaatcccagcactttaggaggcccaggcaggcggatcacaaggtcgggagttccagaccagcctggccaatatggtgaaaccccgtctctactaaaaatacaaaaattagctgggcgtggtagcgggcgcctgtagtcccagctcctcgggaggttgaggcaggagaattgcttgaacccgggaggcggaggttgcagtggaccaagactgcgccattgcactccagcctgggcaacagaatgagagtctgtctccaaaaaaaaaaaaaaaaaaaaagttatctttgataaaagttaataaaagtagtgagtataaaattagagataattggccaggtgcggtggctcatgcctgtaatcacagcactttggaaggccaaggcgggtggatcacctgaggtcaggagttcaagaccagcctggccgacatggtgaaacctcatctctactaaaaataaaaaaaaaattagctgggtgtggtggcatgtgcctgtaatcccagctactccggaggctgaggaaggagaatcacttgaacctgggaggcagaggttgcaytgagctgagattgtgccactgcgcttcggcctgggcgacagagcaagattccatctcaaaaaaataaaataaaatgagagataattatatctttttgagcatattttatataactttctcaagtgctagttcttagtaagaaactgttgccaggcacggtggcwcatgcctgtaatcccagcactttgggaggccgaggcgggtggatcagaaggttaggagttcgagaccagcctgaccaacatgatgaaaccccatctctactaaaaatacaaaaattagctggttgtggtggcgggcgcctgtaatcccagctactcagggggctgaggcaggagaattgcttgaacctgggaggtggaggttgcagtgagctgagattgtgccactgcactccagcctgggtgacagagcaagactctgtctcaaaaaacaaaaaacaaaaaacaaaaaacccttaacgtgatgctctcctcgctctgtacccaaccccggtggcatcccatgctgacaactgtaagccctgcacctgtccccacctcttgtccatggcattggtgttgggtggtgacgggagtcacacagtgaggggatctactctggcaaatagggagcttggcaaatatgggaaggatctaacaacccaattcttgaaacttagaagaacttggatgtacctgtgttttccaggaggaaagacacgctttgggtgaaagggggtgggtttcctgaagattgtgaaggacagagccctaggtgggagctctgtccccttacccatggaatatctcttgggacagcatctgtgttttgtgtgagcctggaccccaagaccaataccttggcagtgaccgggggtgaagakgacaaagccttcgtatggcggctcagcgatggggagctgctctttgagtgtgcaggtgagggggctggggtagaggcctgggagaggtcatattcttttgggagatcttaggaggctgacctgcagaggttgtgcatccaacagccacttagtgacatctcttttgtgccagctctgtgctgggccccagggacacggggcgaatactagtgtgttttgggcacagaggcaggaggcactaattggccaagggaatccaggaaaggccagagaaggccacattggtataggagcaggcgggcagaggtgtaragtggacagaagggggaaggcataggaggctgggacttggtctggttgagtgagggccagcagtgtctcccagcagacatgggagtattggttcctagagtggtggtgagttccagcacctgttctgctcrgtcccgcccctctttttttcctagctggtcctttcagtgggccagataccagaatcacatgcccccagcaccaggtaccctatttttttcctctgttttctgcccacttttctttgaaggccataaagactctgtgacttgtgctggtttcagccatgactccactctagtggccacaggggacatgagtggcctcttgaaagtgtggcaggtggacactaaggaggaggtctggtcctttgaagcgggagacctggaggtaagatcatcagagcgggagtcagctctgtggggccttgggttgttgggggtgcaagcttgggaggccagttctgcctttattgcgccaagccagctctgagccaatgcgccccaaggcacaggaagaatatctacctgctacctggaaagtccccgcggaaccccagaggcaggaaaccttgggtggagctcatggggcaggcttctaggtgggatggggtgacgggcctccctgctgccccttcctccctgtccagtggatggagtggcatcctcgggcacctgtcctgttggcgggcacagctgacggcaacacctggatgtggaaagtcccgaatggtgactgcaagaccttccagggtcccaactgcccagccacctgtggccgagtcctccctgatggtgagagcacctcccttragtgacctttcctgggtgcagaggccgaatcccgggatatacacctcccagagcagccttctgggtcacagccggcaaaatctgaggcctgctgtttgcagtgctgacctcctgggccccaaagttcacagcgcctccttcctgctctgaactcacctgtgattcctggggcagtgtctgggcccttccactcttctttcctctccctctccccattcccttgcttagtgtatgtgagcgtgccctctgccctctcttcatctgtgcctctcttcagggaagagagctgtggtaggctatgaagatgggaccatcaggatttgggacctgaagcagggaagccctntccatgtactgaaaggtatcagaggtgggggaagtgttagcctgggcctttgtagggaggggctgagaacctggggcaggactcagaggggaggtmggacgaagcctgagctgcctccctgctctatgctagggactgagggtcaccagggcccactcacctgtkttgctgccaaccaggatggcagcttgatcctaactggctctgtggactgccaggccaagctggtcagtgccaccaccggcaaggtgagtggacctggagcccggctggggcctccgctttccygactcctctccttccttcctgggtcttcactgtctcctctccccaccgtctttctctccatcaagcacccggattccgtgtcctcctctgatcctctctggctttcaggtggtgggtgtttttagacctgagactgtggcctcccagcccagcctgggagaaggggaggagagtgagtccaactcggtggagtccttgggcttctgcagtgtgtgagtgaggatggggaaaggggtttgtgggaggggcctgggctgggggcccgggaggacggcagggcgtgtgagtccaggccctcatgagtcttcatggtacgctcctctggccaggatgcccctggcagctgttggctacctggatgggaccttggccatctatgacctggctacgcagactcttaggcatcagtgtcagcaccaggtatgggcagctggagctggggtccctgtgggctgtgtccatagtggtggggaagcccaggcctccaggagcatctaccccagatctggctcctgcctggcccttgtgtgtggctgtccctctttgagaattgggagcagatggctctcagctctcctgccaacctccgccctgcctctgtcattcctcggggcagtcgggcatcgtgcagctgctgtgggaggcaggcactgccgtggtatatacctgcagcctggatggcatcgtgcgcctctgggacgcccggaccggccgcctgcttactgactaccggggccacacggctgagatcctggactttgccctcagcaagtaagtgaattggccaagggctgggatctttgtgtatttggaaggtggcagtagtatgtaggggacacaggatccttggggtgtgggaagggattcctaaggcaggaatgcagagaagcctgagggttcacagcccagcccccattccagtggctgacagtgaccctccggggccccacgtctcagtcatgagggagaggctgagactgattttccccatcggagtcagctctgcttctcccgtgctgggggcttcctctaatcccctccatgctggctgcagagatgtcggcccagtgctaggcactagggccctagaactgagggtgtgctggaggagcccaccctagggcccctaggtggtgggcttgggtcccccagtctctgcaatcacatgctttctgtttacagagatgcctccctggtggtgaccacgtcaggagaccacaaagcgaaagtattttgtgtccaaaggcctgaccgttaatggctgcagcccctgcctgtgtgtctggtgttgaggggacgaagggacccctgcccctgtctgccagcagaggcagtagggcacagagggaagaggagggtggggccctggatgaytttccagcctcttcaactgacttgctcccctctccttttcttctctttagagacccagcccagggccctcccacccttgyccagacctggtgggcccttcaragggaggggtggacctgtttctctttcactttcatttgctggtgtgagccatggggtgtgtatttgtatgtggggagtaggtgtttgaggttcccgttctttcccttcccaagtctytgggggtggaaaggaggaaragatactagttaaagattttaaaaatgtaaataaaatatacttcccagagacagagtctgtgtggattttgtgatggctggaccctaggaggagctagcgagggccccgtcagggcaaggctgtcccgcagaatcggctggatgttgagatgtgccagctccccatctccaggggtggtctgtgcgcacgacacttcttgcctgcctggagtcggactctgccttaatccacgcgtatgtctgtaggttctttctattgttggtgtgttgagccatttcctcctgcctcgccctgagatatggaatgagataatcataaacggccagaggagctttattcagtcagtgcggggtcaaacagaggcagggtctctgatccagagaagtggggcccggtagagacaggctggatggctgagctggacggatgctctggtaggagtcagcagaggcccttcctttagttcaagtccaggtcgacactgctttggctgcttgggtggtaggcaatgctggggccgggactgtcccgggaggctcttccccacagcccctgcaggcacctttgggcggctgccctccagggggctgtgtagcgctgatcgcccagccccatggctacgggcactgccgctgcactggcacttcctagggagaggagggacaacagtgtcccaggccccagtggcgggcgctgctcataggccaggactgagaggagcagtgtggccacgtagggcccccagcacagcccgaagagcagcatggctccagcctgtgcccttgcctgcctccaggtaagggcccgggccagggcggagggctcatcgcggcacactgcccgctccagccggcagatgtcctgcagctggcggtgggcagtggccagcacgcggacagagaggaaggcagcagcacccacggcgggcagcaggagcccatagacttcgaggtacaggtagggggctgggaagatagcctgggagctgcagttggcaccaggggtccagtggttccaccccagagcgggcagactggcaaagagcaggggaccagcccaggtgaggagcagggccagccgaatgctcccagggggctggagtggcctcaggactgccatgtagcgctccccgtgcaccagcaagaggttggcaagcagggagaggaaggagaagttgggagccaagtagacgaggaggcaggaccagtaaccccggcgactctggttccacagccctggcaatgtgggcaatgccagacccgtgagcagcccagccagcagtaggctcaggaagaagcagccagcaggtgggctgcgcaggcggcggtcccaggcgatgcccagggctaggagcaggttcgcggtgatgatgaggcttgccagggccagggagagccccaaagcccccttgggaatggggctgggcacctcgccagtgctgttgggcgtcatcttggtcctggggacaggggagtcctggagcggcagccggcatgcctgcaggatggggtggccagagttaggatggggctgcaggtcgtgtcctcctggcagggcagcatgttaatccaggggcgcagacccgcaggctgtgggctgtatcatgttcgctgatacacagaatttttcaattaattgccaattaaacatttatataaaaaactatctttggtttctattgaaaattcaggtctggcaacacatatgtcctgtgtggtagcaaccagccggagctcactgctggctgcccttcggacagtccccacccagccagctttatccatttctggtatctgccttttctgggcagctgtgttgaggtctcttgtttagactgaaaggcgggcccatccagccccaaagcattttgtgtatccctgcctccaccggggaggcctctaaatgagagaatggaccagggctggctggtgtgtagtggtcttccagccagccattaggtgacaggctccagcgggccaggtctcgggcaccctgcacccttccccccatctgtccttgtagccatcacagctcagtgagcagcctccgggtaggacttccagcccataaacttgactcgtctttgctccacactagcaacagggtccttcctgggagctggagggaggagagaagcagctggagggcacgtgtggcagtgaacatggagatgccagcagcaaggagagggactcccccacacccccaggcctgaggctgagcccagaggagagggaagaggagtctgggcagagtctggcttctctgtggctctcatctgtccctgtccttcccgtcattccctggtctcagtcctccagtgtcatggctctgctgccacatcctggggacagggggaggggtcctgggtcctgtgggaactcctgcttctgtcaacaggggagcagctgctgttgctaggatccaagtcaataaggaaaggattcatacctctcccctcctccaggacaggggatcagggccccatggctgccctgagctgagaggaaggaagatgctccccttccttcccaggttcccccagcaccctgagcctgggcctccaaggccttatgccccctttcccctcccctaagcatgttttctctttctcaatctcttccagtgccctccacccaggatgtcttttcctctctagaggccttgcagtttctgttccctttcccagggcatcatcaactctcttaagtcccgtgagactcagggtccattaccccaaacctggcctgagctggagctcccagccctaatcggaatgattccccccaacccacctccactagaacagcgacaaaggcagggagcagcccccaggggtgatttcccagcagggtgcaggctgtaccacctgcacacccccgagggtctggtggcttgggctgggtgtagtagcctctccaggatctggggtttgggggtttgggggagtagctactcacatggctgttgggagcaggtattgcctgcccagcctgggccttcctgagtgtcagggagttgctgcagccagccctgcagcggtttggaccatgtctggtgtcctggctgaagagcacaagtggaccaagtgcatggtgtctccacccagtggggacagcggggccaggctctcctacccaggctctgcccgtctgggttctcagagggatagagaaatgaggctggcaggactcagccctggccccgcctctgggagggtgggacctgacatattccaaactgcagcaactgggaggcctgcctccccctcccacccagttcccctctccccctgccacctaggtggcagtttccctactccagctcggagtaatctgagaaatgcattccagttaatgaataataatgattgacttacccctcccgacttcccgcctcagctgatgcatttacatttaagcccctggactggccagccagctgacagcacaccaggctccctccacacttccgtgtgtgatggtggcagtggcaggtgtttggggcctgaggatcttcactcccccatcccatcacctgatgggcctttcagtttctaaggccagacttgccttcctgaatctggggtcattccacacttttctcaactgctttctgagtcaagttctgaactatgagggacaaatggctctggggatgtgaccatgggtaaggtactactgggcctcggtttttgcctgtgttaaaatgggaacaagaaaaaccacctctaattaaggtcgtggtggggaatatcacaggataacacatatggcggcatataccccagtgcatggcccttgatgggtgggggtttgccccaacaaatggctccctctctttcctcccccatgatgaagaggcatgagctggcgctggaatcagagctgtctggatccttttttaaaaaagccagtgaacttgggcaaatgactaaagttcccttgccttagtttcctcatctgtcaaatggggcccatagttgtactcacctatcgtgagactaaatgaagtcccgtgtgatgaggactcagatcaacacttggcccttcagcactccgcgacaggcagcgatcgctgggaacattattaggatttctgcctttctctgcacctggcccctctaagacagatctgctgagaggggcgcatggggagcttgggaaaagcaagaggggagtgacactcttgctgcacagggaagctgaggaaaccagatacattgagagggaagggcaagttcaaggctgggaagccagaagtggtgctttgatttccaccttgtatcaagtgcggctttggagtgagggggaggagagaagcccagccacactcccttaaggcctgaaatgggagggaacaggcggaaattgcagcaggaaagctgggactgggggtgagacattaggaaacacttgctggctgaagagcgcaagtaaatggagcaaagggactctggtgctctccgggagagctgggcctgaagggctggaagcccgtggagtgtggctgtgccagctctgcacagccagtcagggatcctggagatcagggacttctgttgggacaaaaagtgggaagaggaaagcatccagcctcaagtccatcctcgagggagctggtgggtcggaaggacgcagggttccagggccggtcctcagaaccacgggatctggtcgggcagaagtcacaggctctgggagagttcagcctggggcctggacagaagtgggtgtgggacccttctgatatgtgacttccaggaataaacagacctcctgttcccagccccagcctgctccctgtgggatccaggatgtctgtttcttctctgctgctctgtctaaacactgtgtgtgggatgtgtgtgaagggggacagattaggtagtggcagccagggagcctgggctgtctcctgctcagcctcatttctcccttcctagatcatctagttcctgtctgttccatcaagccctggggctgactcaccccctagcttctcccttcagccacggagggctctggtgcaagccgtcttcagacgctccatccagctgactgtgcccggaccccattctcctttcctcaggcagagcctgaatgggggtgaccaattcagactctggcacggaatcctcctgtgcctcctttgtccgcttccattctcttagctatctgaatttctctctgttgacccacaatgtctgggactgggtgagtgtcatgctggctgcgggtaccagctctggaccaatggaggcagcagggacggggtttgctggaccctggttggcctccctgagccgctgttcaacacttcacactcaatgcctgtaatcctagcactttaagaggctgaggcctgggcaacgtggtgagactccgtctctacaaaaaataaagattagctgggcacagtggtacatgttgtgtggttccagctactcaggaggctgaggtgtgaagattgctcgagtccaggaggttgaggctgccgtgagccttcatggcgccactgcactgcagcctgggcgacagagtgagaccctgcctcaaaataaagatgattaaaaaaaatcagagccaggcgcggtggttcatccttgtaatcccagcactttgggaggccgaggtggacagatcacctgaagtcaggagtttgagagcagtctggccaacatggtgaaaccccatctctactaaaaatacaaaaattagccaggtgtggtggtgagcacctgtaatcctagctgctcaggaggctgaggcaggagaatcgcttgaatccaggagggggaggttgcagtgagccgagattgcgccactgcacaacagagcaagtctccaataataaaaaaaaaaaatcgcctaaccttttaattcgctcatctgttaaaaaaaaaaaaaaaaaaggttagggtgggctgggcacagtggctcacgcctgttttcccagcactttgggaggccaaggtgggtggatcacctgtcaggagttcgagaccagcctggccaatatggaaaaaccccgcctctactaaaaa

SEQ ID NO: 96222 - DNA, 34991 bp, Homo sapiens
  misc_feature (1)...(34991): n = A,T,C or G
gtagctgggattataggtgcgagccaccacgcccagctgatttttgtattttcagtagagacggggtttcaccatgttggccaggctggtctcaaactcatgacctcaagtgatcccgcccgcctcggcctcccaaagtgctgggattacaggcgcgagccaccgtgcctggccagggcatccttatatacacttacatattgcatgcagtttcggggggttcccagatctctagttagacaacccgtgctctgtcccaactcactgctgaaccggtgtccctgtgccctttagtcccagccctctgcagattaggttggctgatgggtcagcaccagggggcatcctgggctgtgacacaggcatatgatttttctcttttttagaaggcagtcggtgtgcagtgtccagtgtgcagagagcccctcgtgtatgatcttgcctcactgaaagcagcccctgaaccccaacagcccatggtaaggagacttttttccaatctgagccaggagtaatggtattttctaaagagtaaggaatggcatcttgtctgtgtcaaatgggatctctgaaattgggcttgaactgcctaggacctctctgcaaagccacatcccccactggcgggagcctaagactctgggagcccagacctgaggggcaaaaccagtgcagatctcctgaggcagcctgggaggagtagaggtttgagtcagccttctgctgttcattatttcctctctgccattcttccttccaggagctgtaccagcccagtgcagagagcttgcgccagcaagaagaacgcaagcggctctaccagaggcagcaggagcgggggggaatcattgaccttgaggctgagcgaaaccgatacttcatcagccttcagcaggtgagggaagggcttcccagttgtcctgtaatgccaccaacctttctacaaaccccaatcagccatggccccagagtgagctttgttctaaccaggaagatgataggctgatcgtggtcagcccagatagtaggagaggggcctgtagttccccaccttgaggaactgcatctccctcactgcatcttgtcacttatttctagcctcctgcccctgcggaacctgagtcagctgtagatgtctccaaaggatcccaaccacccagcacccttgcagcagaactatccacctcaccagccgtccaatccactttgccacctcctctgcctgtggcgacccagcacatatgtgagaagattccagggaccaggtcaaatcagcaaaggttgggcgaaacccagaaagctatgctagatccccccaagcccagtcgaggtccctggcgacagcccgaacggaggcacccaaagggaggggagtgccacgcccctaaaggtacccgtgacacccaggaactgccacctcctgaggggcccctcaaggagcccatggacctaaagccagaaccccatagccaaggagttgaaggtcctccacaagagaaggggcctggcagctggcaggggcccccaccccgcaggactcgggactgtgttcgctgggagcgctctaaaggccggacacccggttcttcctaccctcgcctgcctcggggccagggagcataccggcctggtactcggagggagtccctgggcctggaatctaaggatggttcctagcaggacttggtggggggaacagggaattggggatgggagggaggcaataaagatatttggccttctttggctttctttgcttagcagcgcctagcctgtgaggaatggctctttttctcaattcctaataagattggggtgtggcagagcagcccccaactttgctctgaagtctgttctccgaagagctgggtaaagagggtctgacatctcatcagctagtatagtgagtttcagggaaaactagtgggatgtcagcatgtaagcagagtccttaggacccaccgttaacaactcattgtgtacacacccatgcctgtccattatttatatacatagaatgcctttaggtagaggaatttagtttcctgttttgtgtctcatctctttatcttaggctatgccccatcatttgtatatgtggttgcctgactgacccctgtaggcacctgtgattgcagcccgtcttactcaagtaccaatccagtgatgaagggagatgagagagcagagtagtgtggcagatgtttattgagctagaggaggagagctgagctgagcccagcctgatcacctcctcagagactcagcattgtgaattgcccctacagggtcatttttatacagcatgaagtagccctgcacctgggcaggactgatctggtttgtagctcgaaggacatgttctgcaaagttctcagctaaggaaggtgcctgccctggatagaacctctggaacatctgggtcagctgccagtgtgagcagtagcccacgtactccttcaggtccactcgccccgggcgtatcagggcagggtccagcctgagagaagacagggaaagcaggtcacactagcacccaacagagatggcccctcgacctcctgttcctcccaaggcactaggggaggaggtgggctcttgcctaagtctcaggatgcctggctccttcctacctgtcaacgtggttggtggtcatgaacacgatgcgggcctcggtggaagccacaccatccaaggcattgagcagtccactgaaggtgaggcgacctaggccttggtactttactgggtctggaggaaggcaaagataaggaagcatgagtagtcatagcccagcataaaattagcatgccccactatgttcccctacttatccatgtgtcttgtgggctcttgtcactaacccaggcatcttccaccagccctctggatttctgctttcttcccctgttccacagttacccactccacttcctccagaacccctcacttactctccacagccaagtctcgactgagaaaagcagcatccacatcctccaggagtaccaggctctgctgcggggccacgctcagcaggtggttgagtcggtcatcagagaggctggagtccgtgaggctcagcaggcagatgctgtgctccagttccccagccagggctgtgctatggagcatgggatggcaggaggtagcaggcaacctggaaatgcttcctcaggcccagctactctcctcaccgcctggggacatgtgtctcagaggcctgacttctacctcacaccctgatgttccacacgtttcatgtttatcctggtccccgatccccagattcatttccccttccaaccctatcagcctagtgtttccacaaaggcttcgttttgccaagttgagagaaattttgaatactcacataaaactgctctttccgcaaccagggggcccataaagcaggtagccacgtctgtaaggaatgcctagggatagagccaggatgatcatgtcttttgccccggatatctacgttcattcccagccctgccccctggaagcctgataaccttggtacggaaataaatcattctcatacacaacttttcattcctcttaatctctgggaattggactagagctttatatcaccccatctggctggagaccaacctgtcccttctaaaaatgtcaaaaacagcacagccaagaccccagctgcttctcacctctgtcagtgtaccacttggggttatcgatgaattcctggacgtctctgacaattcggtcagccagaccctgttgtagaaccacagaattcagtggtcgccggcggcgtggatagccaaagggacgccattcagagcccacagctgtgtacatcacggtcttcccttcctcctgctgcaaggctagctctcgagctgggaaggagaagatgagataaagccaataattctcttcaccatggctgattcttcaattaggtggagctgtgccaaacagcttccttctggccccctgttcccatgggctcaccccggcctgcttattccacttctccaaactgctcatctgatgtcaaatgtccccatccctgcaatgtccctagaaagcctgcctgtgccatcccacaccttcctccaggatgttgaagaaaacctttcggtcagtgcccagggccgtgaaggtgacagattcccaaggagtccccgtctgcaagtctatcatctgcatctctcgacttcgttctacccgaatccatttcccccgatacctgaataagaacgatcaaaactgagtgagtgaatgggtcaaacccagctcccatcattcttttctactctcacagccctccctagctccccaccttaccagataaaatggtttccagggctggggacaaattcaaacttagtggaaatgcggccactctcatgctgaaggtacgaagtctcgacactgaggtgctgagtacgggtactgtggcgggtgagccagctaagcaaccaggcatagctcctgtctcgagcagggacttccagtgtgatcatgtaatggcgccggaatgccaccaggcccagttggacacccttccgggccagggccagggctgtgcccacacccaccagcccaaatccagccccaaagtagggattgtccttcagagccagaataaagtctgaaagtggcatcttgaaagggaaacaccaaaccttacaggccctggggtgttacgaaaacctaggggtggggaacagtggagatgggacaaagcacagattagaaattggacctccccagccctggccacaggtcagcactactgtgtgggtcaataccctccttttgtggggtaagggtggtattggaatgcaagggtggaggctccaggtccctcatcccattttgtccttcattagtctactcatacctgtttcctaccagaggaccatgtctggagatgccttaaaccaaaaagagctatataaacaggcttcacatcagggtaatggatggacaggatttttgtggtccctgggaccagctatgataaaaaggggtccattagctgcagtcagcaagggagaagcgtccgttgacttgtcagtaaccctatgtcttgttatgagtaatgtccttcaaatatcctcccccttacgtccccaatatttaacgtcttgtttagacctttattacctcccacctaaactgtctttaaaatcgtagttcttgaaatggcattttaataggtcttcacctcctgcttcacggaacatctacacaagggtccagatctttcatcatagggatcagctccaataccatatctctctctgctccagcaccttcaatggctggctcccagcagacccctgaattgggtataaactcagcctggtactcaaggctctctacaatacggcgcccacctacctttcatggattagctcctaacactacctgtttagcaaatatgcaaatacgcaacaaatatgttcaacaagtaagcaacctcccaactccttgctcatgcagtgctcttggctcggaatgcccgttcttttctccctcattctccccaaatgaaaatctgcccatctgctactttctccacggatcgtcacatcgtagacaataagatcctgagggacaagagcaaagttgtttctagtacacctctcctccaaccccgaaccccggccactttgccctgcgcctggcatgcagggaggtgagctgacagcagtgacctcggctgagcctcagaactgggatccagaattccaaaacacctatgcatggaaggccacagacaaagctctcccgtccccggcccctccgcgacacccaggaaccccctcctgaacctcgcccacaccccagctcgcgcctccagccacatggtttggggtaacccgtcactcagccctctcaccgccgtgactctctggccctccgtctcgatggtttcaccgcgcctgcaccttggggaagctgcgttcggccccgccccgggtcctttcatctacttcccgccacacccacagagaagcccacgccactctaccccagagctctcgatggtgcttctccggyttcagggctggagtgggggtggagggcgggaaaaaccacagagacaaaacatagagtaccccggcagccggcaagaggaagagagagtggcttccacatccccaatatcctagaggcggctgagccggaggcggtcgcacaaagcgggccccgggggccgttccagccgcggccgaccatagagatgcggctcccgccggctctgggtctggaggtragtgagcggctgcggggcggaactgggaagggaatgcgggtggagcgagctggaggcaaagtttttcgagccccgggatcagggtgggcctgggcgctgggaactctcggaaggaggtactgaagggagcacccagacgagctgggccccggcgctgcagtcgcgtcacggttctggaccccgcccgggtacctgctgctctcaggacaaaatcatgacgatgctccatcccaagccttccaggttacaaaccgcctttccagttcgctggctcttatgatccagctcctgcccgacgatgtggacactgtcatcacctccattttacagataggaaagctgaggcccagagaagcgaagcgactgtgtctgtccaagaccacgcggtgagtcagagccagaggcaggtgggaacctgggtcgctaggccggggcccgttgtttctccaggccttctctctgccttagtctgtcctttctcttcctcagccctcctgcccggaagataagcgtatttcttctctggtgcccacctgtctcctacctcaccctgccctcccgcaggtgaaggttcttaatcttgacggctcagcgtcctccttggctccccccggaggccatgtatggtcaagcttgaagattccccagaacarcgmtaatattcagtaagtggaggctgcagtttccagagaatccctctgaccacgggagtgcactttccagccaccttgtgaatccctgtgatctgttgttttgagtccatgggattctggaaatagggactatcagattgcaggatcttggtttttgtttgttttttttttgagacggagtttcgctcttgttgcccaagctggggtgcaatggtgcgatctcggctcactgcaacctccgcctcccgggttccagcgattctcctgcctcagcctcccgagtagctgggattacaggcgtgtgccaccacaccctgctgattttttgtatttttagtagaaacagggtttcacaatgttcgccaggctggtctcgaacttctgacctcaggtgatcggcccgccttggcctcccaaagtgctgggattacaggcctgagccaccgcgcccggcctggtttcttcttctttttttctttttgcatcttgtctgtgactcaatttcatgaagtgattcccatcattcttattaattactaattattcagcttaaactcattttagccatgtataacagggtatgcaattcaattgtcattcattcctcagttatgttcccatatttagtttgaggccatagtcagttaatgagtttgaaatttctccaaatgtgttacgttataggtgaggaaccactggttttgtacaagatacctagctttactccaatgcagctccatatctgtggttcttcactggaatcttcgattgtgggtgatttgtgttcgttgaagtgataatgtcagtatcacaaagtaatatcattgaagtgataatgtcaacaaattactaaaaaagctatacatctagggagagagactgacaggtaaacaacagtgcagtgtgacctcgtttctgatagggctgtgtacagagtgcccttaggacgccagaagagagaagataagagtttcgggaagccaggcccrgcgcggtgcctcacgcctgtaatcccagcactttgggaggccgaggcaggtggatcacctgagttctggagttcaagaccagcccaaccaacatggagaaaccccatctctactaaaaatacaaaatagtagccaggcgtggtggtacatgcctgtaatcccagctactcaggaggctgaggcaggagaatcgcttgaacccaggaggcagaggttgtagtgagctgagatcgtgccactgccctccagcctaggtgacagactaagactgtctcaaaaaaaagaatgtcaggaggccttcatggtggaagtgacatttgtgcagcttcttcaaggatagttaattggttagccagataagagagagagattgagaaggggaaaaggcatatcaagccaagagacgcaaaaggctgtgagggtatgaaagcaaaagagaatgtggtgggtctggagaatggcacatcatctggttcagagatctgctgaggggagaagtgggagatgagtcaggggaggtcagcaggagccagatgatgaaggaagggccttccttataatccatgctgaggaatagtgagattatcaaaggttaagagggaaagggaccaggcaaggtggctcacgcctataatcccagcactttgggaggccaaaacgggcagatcacccaaggtcagaagttcgagaccagcctggccaacatggtgaaactccatcgctgttaaaaatacaaaatttacctgggcgtgtgtggcacatgcctgtagtccagctattggggaggctgagacaggagaattgcttgaacccaggaggcggaggttgcagtgagccaagatcacgccactgcactccagcctgggtgacagagcgagactctgtctcaaaaaaaaaaaaaaaaaggacttctgagatatttgggccccacctaattttgttgcagataagaaatctgagacccaaattgcttaatgacttggctaagggcacttagctagcagaagacaacctgcagtcattaatatattggccaatacttgttggctgtctcctaatattctgttatcatttttatactttttgttctgaacattatcataaaagaaagcctctatttagtctcatatggtatatatggcatattgccatgcaagaaaatgcctaagtgggtgggcactgggctgtgtacccacgccagccaggaagaaagtaagaactctaaccttactttgtttttcttctggttggcttgtcagcatttaagaagccaaaacacacaagtcggtggtgatgacagacccccttttggactcacagccagccagtagcaccrgggagatggatggactgtgccctgagctattgctgatccccccgcctctctstaaccgtggaatcctggggcctgtccagagcccctgtccttcccgggaccctgcacctatacctactgagccaggctgcctgctggtagaggccacagcaactgaagagggaccagggaacatggagatcattgtggagacagtagctggaaccctgaccccrggtgctcctggagagaccccaggtacaaacacagttgcaagcaggccagtgggacaagcagctctgaggttttgtctgggttatttttgattctrtataaatatgatgagaacacaaggtagcatcctatttttatacttggagatgttgtcatttggtttgcagttggtgcatgttgattgaaggctggcgaagtggtgcacagccttctaccaagcttttggcagtctgtcctgcaagggcttcatgtgtgctaggcagtaatccagaaagtaagacctttctgacacctccgcccaatcctggcttgtccctactcttacagtccttggagattctttcctccatattgaccctcctacccaggaactgcagccagggattaagcaaaaaccctgtctctaccaccctgggcttggcagggctttccagaagtgatctggtatttccctgccctagttttttgtgtataacatactttactcatccaaggcatgttgttaagaataagagttgaggcctggtacagtggcatgcacctgtagtctcagctacttgggaggctgaggcaggaagattgcttgagcccaggagttagaggctgccgtatgttatgatcatacctgtgaatagccactgcactccagcctgggcaatatagtgagacccccatctctttaaaaaaacaaaacaaaacaaaaaagtaggagttgagcatttgtatttatctcagatgaaagattctccctttattcatcccattatcctcacctcttatttttaggaagcttccctgttttttaattaccgtcctccagccatagttgtcaccacttcagttggcactgtagtatagtgacaaagaatattgggaaagattagctaatttgaccatataatatttccaaacttccatatggtgaaagaaatttaaaaaaataaaaagcctaggaaaaacattcgcaatatgtaagaaagagttaatatctttaaaattcaaagagccacagtaagaaaaagaaaccatcttttttgttgtttgctttgctttttttgttttcttttggttttgggggttttgttgagacagggtcttgctctgccacccaggctagagtgcagtggcacagttacggctcactgcagccttgacctcctgggcttaagcaatcctcttgcctcagcttcccatgtagctggggccacaggtgtataccacccacactcagctagtttttaaattttctttggtagaaacgaggtctcaccttgttgcccaggctagtcttgaactcctgggctcaagcaatcttcccacctcggcctcctaaagttttgggattacagacatgagccatcgcacccagcagaaacctttttttttttttaaatgggaaaaagaaatctatgtgcaatgctctaaagaagaaataaaagtagtaaccatatggaaggatgcttaatctcactagcaaagaaataaattccagttaaaaataagagatgtggctgggcatggtggctcatgcctataatcctagcactttgggaggccgagacaggcagttgcctgagctcaggagtttgagaccagcctgggcaagatggtgaaaccccacctctgctaagatacaaaaaatcagctggcatggtggtgggcacctgtaatcccagctactcaggaggctgaggcaggagaattgcttgaacccgagaggcggaggttgcagtgagccaagatcgcaccactgaaccctagcctggacaacaaagcgagattctgtctcaaaaaaaaaaaaggagatgcattttggcataaattaaacatttttaataatacctagtgttgatgaggctataggaaacactatgttacagcttatggagatacaaattagtataatcttttgaaggtcaatttagctacatagcaaattttacaatttgcatactctgaccactaattccactgtaggaatgcacaaagacaccggaattacagtggccagagcaaggatgaggatatataggggtgctttatttgtaatggttggaaacagcccaaatgtccatcagtaacggcacaatttattttttaaaattatttttagaatgggcaacatagggagaccccatctctacaaaaaaatttaaaattagccaggaatggtgatgcctgtagtcccacctactcaggaggctgaggtgggagaatcacttgagcccagcaggtcaaggctgcagtgagctgtgatcacaccaccactgcactgcagcctgggtgacagagagagaccttgtttcccccaccaccagccaaaaaaattatttttatttttttggtccccagggaagcaagggcagaatttcgttttgatttgttcatgctctggaaaaaacatgaactggataagaaagtacaaactagatgtaaatgtactcaaagataaaaatatctttgatatatagcaagtggaaagaaaagggtcaaaaagaaacacaccaaattgtgcgtgtgaaggtgctgggtggttattcttcctttgtatacttatgtatcattttagatgttgcactgaaatttttttttttttttgagatagagtttcactcttgtcacccaggctgcagtgcaatggcgtgatcttggctcgctgcaacccacctcccaggttcaagcgattctcctgcctcagcctcctgagtaactgggattacaggcatgcgccaccatgcccagctaattttgtatttttagtagagacggggtttcgccatgttggtcaggctggtctcaaactcccaacctcaggtgatccacccacctcgtccttccaaaatgctgggattacaggtgtgagccactaggcccggcctgaaattttttttttttttgagacagagtctctctcttggccaggctggagtgcagtgggcaatctcggctcactgcaacctccacctctcatgttcaagcgattctcctgcctcagcctcctgagtagctgggactacaggtgcgtgccaccacgcctggctaattttttgtatttttagtagagacgggttttcaccatgttagccaggatggtctcgatctcctgacctcatgatcctcctgtctcagcctcccaaagtgccaagattacaggcgtgagccactgcacctggccctgaaatttttttttttaacaacaaaaaaaacaataaagagcaaacagaccagcagaataaatgtaggacaaacctggccttgagtcatggctctaccactaataaacatagtagtcttaatctcgtagaatctcaggaccttgttgtcatagggctgttggaggaccaaatgagagcgtttattaagcctttctttatcaaagtcttgcccattgcttttaaaacggcagcaattattatggagaataataattattttcagaaaggatattctccattttatccattcctgtgcctttgtaaagctctttacagaatttgaaagtaaagctcttaaccatttatattgcagatattatccctagtttgtcattttcytttggaagtttctggttttcacttgggcaaaatatactgtcttaatgctttctggatttgcttgcttgttcactcatttaacaaatatttattaagcacctatcttgtgccaagtattgtgctaggaatccaaacacacgtgccagatagatggtccctgaccttatggggcctacagtccaggtgtaggaccagacttaaagtccatctgtactctacgaatattaaaagattcacctacattttctactagtarctaactcctatgagtcttgttccatctgattctatgcctttctctgtcggtcctctgcctgcaggtgtcctggtaaaggtggtggaggtgtacttctgtgagcgctgtgaacagagcttcgcagagcccactctgctggccctgcaccagtgcagtgagacccatatacagcctgtgcagggcctctctagccccccatgctctgtagagctgcctcccagcaacccaaccctccctggccctctgcagggccagagcccgccagttagccccctatcatgccctgtgtgtagacaggagtttgcccaaccccaggccctgaagagccacttcaagattcaccggggcactcctgacaccttctcctgcccagaatctggctgtgtgttctctgctgaagatcgcaagggtctgcagcaccacctgaggcagactcacagagcagttcctgtgccctgttctttccggggctgccccctgcttttcgggagccagcagggcatggagctgcaccggcaggcgcattaccctttccactgcagccactgcagcttcataggctccaacgtcaaactcttccggcagcatcagcggagccatggtgctgggacacagggagaactttctgccgttcagggccttccatcccaggagctgctgccaggtatgaggccaagggccaagcagttcctctcctggagttcagccacagttgatcttataggagaggcagttgtttccaaggccatgaatgtacatgaatataagagaatctagacagtggctcaggaggatggagttactggatgacatgggaaggcatcttgaaacagttggaatatatgggacaaagaggaagtctttgtttgtgacaatgagtgaaagttggcttaggctacgtgtggcctgaagttacttaaccaatattctctaatgatccatttcacaactttctgagagctaaagtgaaaatgaccatcattggctatggccactgatagaatgcctgtagactttcctttagagcaactggggattgggcagtagaagccagggttattttaaaaaggaaataaccctttgggctgggcactgtggcacatgcctgtgatcccaacaatttgagaggccaaggtggatggatcccttgagcccaggagttcaagaccagcctgggcaatgtggtgaaatgctgtctctacaaaaaatacaaaaattgggtgtggtggtacatgtctgtagtcccagttactcgggaggttgaggtgggggatcacttgagctcaggaggtggaggttgcagtgagccaagattgcagcactgcacttcagtctggatgacagagtaagaccctgtctcaaaaaaaaaaaaaaaaagaagtaaagaaaggaacttaggaactttcaagggagacggcgttttagtagttgtcattcttcttggtcccaaaaaagcatgagagagcagaggagcaggaggaaacagagaaaacgggccaggagaggccagaattctgataagagaaggaattgcagtctacccattctctactttcagccccctatgacctcaatgacctcgctgctgtcagcttcatggagtctgaaagtggtgctctctgaggtttgagttactttagactggaacattgctaataacttagctcttcgtcctcctattttcatcttgagtggaaatacatttatacataaaacccaagatctccttatgctaaaagtgggagagggtgattatttcagccagtaggtagagaagtataagcatttagtgctgttattggctcctgtagactttatcaagttttatgtatctccagctcccaaactgcctccaggagagagagaaccttcacaggaagcaggtacacccttgcctgggcaggagacagctgaagaggagaatgtagagaaagaagagaagagtgacacccagaaggactcccaaaaggctgtggatmaaggccaaggggctcagcggctggaaggtaatgacattctgaggcttgaagcccttggtggtggggaagaatggattgttgaaaccctgccattgaggctctggggtttgttttctgagctttggttcggatccttttattctgttctaccttgactcaaaagtcaaggtctagtgggaaaatgataaatgagtgaatggtaaagactttagtaatatagcattggggtaaatcgagtttgcttcactgggctggttttcctcaggcagaaaactctagcagggaagcaggaggtgatcttcatcatatagagatgccagaagttattgatgatcagcagcctattttgyctggcactgagccctcaaatacttttttctgaatctttgcttcccagtttttcacctcagtagaatatttgaaagtcatcccacaaggagcatagttatcaagtgaataagaaagattkggttgtatttattaccaacttcattattatctagagcctgtgagccagtaagagtactgtaccttcttttggctcacccccttgggggctcttttccttctaactaatcttgccgatgcttctgcctgcccccatagaacaaggcaggaaagaacaagaatgctccattcagattattttaagcagctctaaacaaaggctcaagaagagcaggtagctgagtaaagcacttcaaacaggctgtcacagcaaggcctgagaagcccttgtgattttgcttctcttaaaacttgagtttctcacccttttttgagactacagtatttgagacccttttgcttggtttcctgcagagaggccacacatcgtttgtgtctgagcaaattgtggttctcccattatctggctttccccagaaaaatctcactctctcaactctctgtattccctttcccaggggatgtggtctctggcaccgagtccctcttcaagacccatatgtgtccagagtgtaagcgctgctttaagaagcggactcatctggtggagcacctgcatctccacttcccagaccccagcctccagtgccctaactgccagaagttcttcaccagtaagagcaagctcaagacccatctgctgcgggagctgggtgaaaaggcccaccactgcccactgtgccactacagtgcrgtggagaggaatgcactcaaccgccacatggccagcatgcatgaagatatttccaacttctactcagacacctatgcctgtcctgtctgccgtgaggaattccgcctcagccaggccctaaaggagcacctcaagagccacacggcagcagccgcagcagagccrttaccccttcgctgctttcaggagggctgcagctatgcagcacccgaccgcaaggccttcattaagcacctgaaggagacccatggggtgcgggctgtggagtgccgccatcactcatgtcccatgctctttgccacagccgaagccatggaggcccaccacaagagtcactacgccttccactgcccccactgtgattttgcttgttccaataagcacctattccgtaaacacaagaagcagggccaccctggcagtgaagagctgcgctgcaccttctgcccctttgccaccttcaacccagtggcttaccaggatcatgtaggcaagatgcmtgctcatgaaaagatccaccagtgtcctgagtgcaactttgccactgcccacaagagggtgctcatccgacacatgcttctacatacgggtaggatggtttccatccttaaaataatgttgtaataatgatggtggtgatactggctacaaagggtcttgcataygttttctcatttgacccaaaattcctagagatagatctagcattccaagtttacaaatgagccttaagttgrgtgtcatttagctagtaaagtagtagagctaggatttgaatccatgcagtctgattccagagcctgtgctctaaccactgtggtgytgtrcctcgctcttaagcccttgtccagttctgcccacccctagtcaggcttgagtgggttaacaccaagcctgaagaaacctaaaccaggacaaataccttactttgcaattcatgttttgggatatgctaagagagacgggcgaggggactgagccgtccacacgcatatggccttctataacttgggcatccatgacactgaaaaagatcacctccagtgacctggaagttgcagatgtttaactcgcactcgtaactgtcttctagcattcttgatgctttaggtaacaaccaaaccaagcttcctgctacagcatcatcccatttgtgatctctatatcaacatcagtggattgacaggacatttttagaattttcatcaaagacactggtttgggagaaaaaattktaggcagcctgggacaaagccattctcactgaactcattcctgtacatgctttagtcacaaaatctcatgtttctgaggtctttccaaaaggcttaatcttttaagtaaggcagataaagatgagaaaagagacaaactctgagacctactttaagatcacacagatagtgttagaaccagaataccacattgctagccttttcaccatagggaaggggtctgggtgagtgggcagggacaacaaggaggggtcttgaaggaacctggcccccagcctgtcagtgccaggtcttgaccatcaatatggacagctcacctttgagttctcactgagtatcactgacagctttgggacatttcatataatctttataccaaccttttggaggcaaggaaacagactgytcaaacccacatggtagtcaactaggatttaaactaccacttaatggctctatgatttctctgtgcctctgtttccctatctgtaaaatgagggtgataatagcacctgcctcttaaggatgttctgaaaatttgaggggaggaggctttttttttttttgagatggagtctggctctgttgctcaggctggagtaaagtggcccaatctcggctcactgcaagctccacctcctgggttcacgccattctcctgcctcagcctcccgagtagctgggactacaggcatctaccaccatgcccagctaattttttgtatttttagtagagacagggtttcaccgtgttagccaggatggtctcgatctcctgacctcatgatccacctgcctcgacctcccaaaatgctgggattacaggcgtgagccaccatgcccggccgagaggaggaatttttttacaaagtgctcagaagagtgctagtcacataataagaactttgttcatgttggctgttaatatttttattactgtgttggacttcagatcagaattcttgaccattctgttctgttgtctcatttatttttccttttgttctagaaaacagaaaaattaggctgagtagttgaccatagtgacagcaagctgtaaaacaaatcaagagtggactttaagctagttttgaaaagcttggggtgggcacggtggctcacgcctgtaatcccaacactttaggaggccaaggcgggcggatcacctaaggtcaggagttcgagaacagcctggctaacatggtgaaaccccatctctactaaaaatacaaaaaaattagttgggcgtggtggcgggcacctgtaatcccagctactcgagaggctaaggcacaagaattgcttgaacccgggcagccgagcttggcagtgagctgaggtagygtcactgcactccagcctgggcgacagattgagactctgtctcaatttaaaaaaaaaaaagaaaagcttggtctttactttcttcccatcttcactggtgtgggagttgggggagtagttgtctgagagggccctgaagcagccctttattattgtgaggttttcaccatctcaggtagcacatgaagctgttgttcctccctggcatcagggcaggcttgctggaagaaatggtctgtccacttgatctgtatctgacctgtgttctctcccttcatccgcatyccccatataaggtgagaagccccacaagtgtgagctgtgtgacttcacatgccgagacgtgagctacctatccaagcacatgctgacccactccaacaccaaggattacatgtgcactgaatgtggctatgtcaccaagtggaagcactacctccgtgtgcacatgcgaaaacatgcaggggacctcaggtacaacacacacataggcctccgtcccaatcccaagaatcttagcsaagctagcttcctctcggatctaacttctggccctatttctttctccggtccctggagagtctcctcctaaggccgggygcaatggctcacacctgtaatcccagcactttgagaggccggggcgggcaaattgcttgagcttgggagttcaaggccatctgggcaacaccccatctctactaaaactacaaaaattagctgggcatggtagcagacgcctgtaatgccagcttcttgggaggctgaagcactagaatcgcttgagccrgggggtggaggttgcaatgagccaagattgcaccactgtactccagcctgggtgacagagtaagactctgtttcaaaaaagaaaaggaaagaaaaaagagagtcttttcctaacacccttctctgttcccactgtctcaactccattgcctacagctggcctctgtgactgtggctcagtcacatagcgagcactctctgggctctgggaagggagtatagacctacagtataggcctagagactaaggtgtcacttragttctcagagtttggccctgggaaagtggatagacactatattcatgccccaatcttgccacttccaaatccaggcaagttctctgacctatggcacagctggctaaggggtttctagacctgtcatgcctctgtgggagaagggaaatgaggcacagaaacctgccctgtggagttgtagccacgtcagttccttggaagtctacagtgggtcatgctgattcatgattactttcttttaggaaggcagtacagaatagggcttagaacacaggccctgaagctaggctgtctctgctcctggcttactttgtaaccaaccttaggcaaattattaacttctgtgatttagtttttctcacttggaaaatagagataccagtttcatagggtagtgaaaaggagggttacatcaggtgacacatgtatgatactgagtgcagagcctggcccacagtaagtatttactgactgattcttagttgttgtgattaattattgtgattgcctccccctttccctccttgccaggtatcagtgcaaccagtgctcctatcgctgtcaccgggctgatcagctgagcagccacaagctgcggcatcagggcaagtctctgatgtgtgaggtgtgtgccttcgcctgcaagcggaagtatgagctgcagaagcacatggcttcccagcaccaccctggcacaccgnccccactctacccttgccactactgcagttaccagagccgccacaagcaggctgtgctgagccatgagaactgcaagcatacccgcctccgtgagttccactgtgccctctgtgactaccgcaccttcagcaacaccacactcttgttccataaacgcaaggcccatggctatgtacctggagaccaggcctggcagctccgctatgcaagccaggagccagaaggggccatgcagggcccaacacccccaccagattcagagccctcaaaccagctgtcagcccgacctgaggggccaggtcacgaacctgggactgtggtggaccccagcttggaccaggccctgccagagatgagtgaggaggtcaacactggaagacaggagggcagtgaggctccccatgggggtgacctgggtggcagtcccagcccagcagaggtggaggagggcagctgcacactacacctagaggccctgggagtagagctggagtctgtgactgagccaccccttgaggaggtcactgaaacagcccctatggagttcaggcccctgggactggaagggccagatggactggaaggaccagagctatctagctttgaaggtattgggacttctgacttgrgtgctgaagaaaatccccttctggaaaagccagtgtctgagccctccacaaatcctccatccttagaggaggctcctaacaactgggtaggaaccttcaagacaactccacctgctgagacagcacccttgcccccattacctgagtcagagtcattactcaaggccctaaggagacaggacaaagaacaagcagaggcattggtgctagaggggcgggtgcagatggtagtgatccagggagaggggcgagccttccgctgcccacactgcccttttatcactcgccgggagaaggccctgaatctgcactccaggactgggtgccaaggccgccgagagcccctgctgtgccccgagtgtggggctagcttcaagcaacaacgcggcctcagcacccacctgctgaagaagtgccctgttctactcagaaagaacaagggcttgcccagaccagattcacccatccctctgcaacctgtgctcccaggtacccaggcctcagaggacacagaaagtgggaagcccccacctgcatcacaagaagcagagctactgcttccaaaagatgctcctttggagcttcccagggagccagaagaaacagaagagcctcwtgccacagtctctggttccccagtccctcctgcaggaaactccttgcccacagaggcccctaagaagcactgctttgacccagtycctcctgcaggaaactcctcaccmacggaggcccctaagaagcaccaccttgacccagtccctcctgcaggaaacycctcacccacagaggccctgaagaagcaccgctttgagcagggcaagtttcactgcaactcctgcccattcctttgttcccggctctcctctattacctctcacgtggctgaaggctgcagrgggggacgtggcgggggaggaaaacgagggaccccccagacccagcctgatgtgtccccgttgagcaatggggactctgctcccccgaagaatgggagtacagagtccagctctggtgatggggatacagttctggttcaaaagcagaagggggctcgcttctcctgccctacatgtccctttagctgccagcaggaacgggctctgaggactcaccagatccggggctgccccctcgaggagtctggagagctgcactgcagcctctgcccattcactgctcctgctgccactgccttaaggctccaccagaagcggaggcaccccactgcagccccagcccgtgggccccggccccatctacagtgtggggactgtggcttcacctgtaaacagagccgttgcatgcagcagcaccggcgrctcaagcacgagggggtgaagccccatcagtgccccttctgtgacttttcgaccaccagacggtaccggttagaggctcaccagtcccgacacacaggcattggccgcatcccctgcagctcttgcccccagacgtttggtaccaactcgaaactgcgcttgcaccggttaagggtacatgacaaaacacctacccacttctgtccactttgtgactatagtggctaccttcgccatgacatcactcgtcatgtcaacagctgccaccaaggcaccccagcctttgcctgctcccagtgtgaagcccagttcagctcagagacagcacttaagcagcatgctctgcgccgacaccccgagcctrcacagcctgcccctggctctcctgcagagaccactgagggccccctgcactgttcccgctgtgggttgctgtgccccagccctgccagcttacgaggacacacccgtaaacagcacccacggcttgagtgtggggcctgccaggaggccttccctagccgactggctctggatgagcaccggaggcagcagcatttcagccaccgctgtcagctctgtgactttgctgcccgggagcgggtgggcctggtaaagcactacctggaacagcatgaggagacttcagcagccgtggcagcctcagatggggatggggatgctggccagcccccgctacactgscccttttgtgacttcacatgccgccatcagctggtactagatcaccatgtgaaagggcatgggggcactcgtctctacaagtgcaccgattgtgcttacagcaccaagaaccgacagaagatcacctggcacagccgcatccacactggggaaaagccttaccactgtcacctctgcccctatgcctgtgctgatccctctcgtctcaaggtaatgtcagaggatatggggcaggaagtggaaggagcacaggctctggagttaaactgccttggttctctatagctgactcctccagatattagctctgtgactttgggaaagttcctttaccaagcctcagattcttcatctgttaaaaatgagataataccaacttcatagggttgttgtaaagataaagttccataatgtggctcacgcctgtaatcttaacactttgagataccaagttaggaggattgcttgaagccaagagttgaagaccactcggcagcagagcgagatcccattacaaaaactttttcttaatcagctgggcatggtggcaagtacctgtagtcccagctactcaggaggctgaggtgggaggattgcttgagcctaggaatttgaggctgcagtgagctatgatcatgccactgcaccccagcctgagtgacagagcaagactccatttaaaaaaaaaaattgaggctgggtgyggtggctcacgcctgtaatcccagcactttgggaggccaaggtgggcggatcatgaggtcaggagatcgagaccatcctggctaacactgtgaaaccccgtctctactaaaaatacaaaaaattagccgggtgtggtggcgggcacctgtagtcccagctactcgaggctgaggcaggtgaatggcgtgaacctgggaggcagaacttgcagtgagccgagatcgcgccactgcactccagcctgggcgacacagcgagactccatctcaaaaaaaaaaaaaaaaaaaaattatcggccaggtgaggtggctcacgcctgtaatcctagcactttgggaggccaaggccagaggattgcttgatcccaggagtttgagaccagccagggcaacatatggagactctgtctttacaaaaataaatttttttaattagctggacattgtggcgcatgcctgtattcccagctacttgggaggctgaggtgggaggatcgctttmgcccaggaggttaaggctgcagagagctgtgatcacaccagttcactccagcctgggcaacagagtgagaccctgtctctttaaaaaaaaaaaaaaaaaaatccctagcaagtaaactgaagattaagaaaaacaaagttccataatgtctgcttgccatatgataaaggcatagaacagggcaagaataacctggataataacagctaacatttattgagcacttactatattttctgctttttgctcttgcctcttccagtaccacatgcggatccacaaggaggaacggaagtacctgtgccctgagtgtggctacaagtgcaagtgggtcaaccagctgaaataccacatgaccaagcatacaggtgagtctgtgtggtttcgacaggcctgaagggttcctttgttccctggcaaacctaaccttaccaaggttggtccttgttccaattcagggccaacatcaatttcacattgggagtagacagcagggtggggttgtatgtgccagaatggctccccaacccactgaagacctgtcagaatcagaagggtaaacctgagagcctgggcatatgtactttccaaaagcttcccaggtgactgtgttacgaagtcagtcatttttcccctcttgagaacccccaactcaaacttgtatgactaagggyagatttgcttggctcttacacagacatgatggaactatcatgagttaaaaaggagaaagtgaaggattctcctsttctagtctgtccttttcttctcctgggtgtggatggaatccacaaacccgrttcttgaaagcacacaatcgtgtgcctgtgcttattgcatctgatccccctatgtggaggaattgattaggagcatttcaaggccctctgcttttatgaatgccacttatttcacctctacctcttccctcctaagtatttcttttttttttttttttttttttttttttgagacagagtctcgctctgttgcccagcctggagtgcagtggcgcaatctaagctcactgcaagttctgcctctgccttccgggttcacaccattctcctgccttagcctcccgagtagctgggactacaggcacccgccaccacgcccggctaagtttttgtatttttagtagagatgggggtttcaccgtgttagccagaatggtctcaatctcctgacctcatgatccgcccgcctcggcctcccaaagtgctgggattacaggcatgagccaccatgctcggcccctcctaagtatttcttttactttttttttttttttttttcagtgacagggtcttgctctgctgcccatgctggagtgcagtggtgcagtcatagctcactacaatctcaaactcctgggtgcacatcatcttcttgccttagcctcccaattagctgggtctacaagtgcacgccaccacgcccacctaatttttttgtagacagggtctcactttgttgcccaggctgggtctttgactttttgagttgaacaagccgttgtgtttaaatgaattgtcgaattccatgagtactctgtgaccaaaagagggttataatttcccatggggaaacccttccatatttgagtatycattactgtcaggtagctagttggttagaggtcccgttaatcatcagcatccattgggcacccacaacattgattgctgggactacaacattgagttcttgttgatgtacaaggacgctgtgttggaaaggcacagaaatgtcagacagggccaggcgcggtggctcatgcctgtaatcccagcactttgggaggccaaggagggcacatcactggaggtccagagttcaagaccagcctggccaacatggtgaaaccctgtcttcactaaaaatacaaaattagccaggtgtggtggcccatgcctgttattccagctacttgggaaactgaggcaggaggatcacttgaacctgggaggcggaggttgtagtgagccgagattgcaccattgcactccagcctgggcaacaagagcgaaactccgtctcaaagaaaaataaaagaaaaaagaaatgtcagacaggactggaggactggagcattccaaagagatggtcattagtcaacttgctgcttgcattctttatatccactgattgcagtaactccatggcccagtaaaccttgctccaccgcctttcaatggtgatttgttccctgtcctgtaggactgaagccataccagtgtcccgagtgtgagtactgcaccaaccgggctgatgcactgcgtgtgcaccaggagacccggcatcgagaagcacgggctttcatgtgtgagcagtgtggcaaggccttcaagacgcgcttcctgctgcgcacccaccttcgcaagcacagtgaggccaaaccctatgtgtgcaatgtgtgccaccgtgctttccgctgggctgctggcctgcgccatcatgccctcacccacaccgaccgccaccccttcttttgccgcctctgcaactacaaggccaagcaaaagttccaggtggtcaagcacgtacgcaggcaccaccctgaccaagccgacccaaaccagggtgtgggcaaagaccccaccacccccmcagtgcacctgcatgatgtgcagctggargatcccagccctcctgctcctgccgctccccacactggacctgagggctgaaagcctgccccacctcctgtataggaagagggtatggtctgagatgtgcagactgggaccagcgctagcctgaggagctcagagcctaaggaaagactggcttttggggtacaagggtgactagaaccttcctgggactctggctatagtactttgaaattatcacccatataaaagagggacatggactataacgttgatttcttattgctgtacattgcgtttttaacctgcaagttctcagtttcttcaccatcactccatcaaagtccctggctataagatctggattttacccactccatcttctctttccttcttactgtgtcaattcctattttctttcagaatcttctaaaaacagttgtatctaaccgcatgtgctgttgtgcctaatgctctataaagcatgttaaacagaaagtggttactacattatagattcatccaaatccctgtcttaacatttccaggctgtcatcttgatcaactctgtcccctctcagacctctgcctcccttttgtcccttccatcttcactcagtattgatactgaaacaggcctaggtctgccttctccctgtccttgagccatcttgacccttgacctgctccctacttccaagctcctttgtctacctgtatctatagagggaggattgctacccactaagcctcctcctagaagcaactttagctcatcatcaatcctcagactggctcagcagctacactaaggtgttaaagcacaaggatactatggaaaggcagatgactagagaggaaaatctccaattcagaattctataactgcttcacagtataattctgtagtgccttactatataattgatcatctaaactgagacacactgggaaaacttaaagagggtactattaataattaygctgggacaacagacataaacyaggatggttccagccagactcttcaggaaggckgggaccacataaccttttgtctgcttttgccctgattcttaaaagccatactctgtgtccttcctatgtagcacatgcaagaggtctcctgggaacctctttctctaccttttccttgtctcacctgactacccagatgtccccacaacccttgtacctccccttcttgcccaacaatgacagaccatattgaagccaaattggagagagatgtatttataccagtggggctaaggaggaagcagtccagtgggggactttgagtgctgtgcagtgttctcttaagagtcgtagtacagtcctggggtcaagtctctttccctaatctttgctggggaagccttgagccttgatttatccttcccttggctttgggctttgaggaagttggggatggaggggatgatgcttctttaggtttctctattccaagcccctctgaatttctagttgcaacctgccttcacacagagttgatgggaaagattagttgtagatgtcggtatgggattgagcctacagcaagaggaagaagggaactccagtatagagtacacaaaggaaaagggcaggaaagataccaaaggcttatgaaaacaaaggaagggaagaaaagagaaaaaaggtggaaaatcaggtcccagattgcttgttaggaagaatgaggtaattttgtgcctaggaatgcacaatccaaagcttgattttcaccacctccatttgttctctcgagcatccttccagatgtttctccccgtctaaagccagcacaccaacccttcccgtgaaatgcccacctcaggactcatccccctccaggccttcctggatgcagatatacacaaagatggaagctgggcggaggctgatgccatctttggacagcaggtgaatgtggcggtaacctggaaggggcaggaggacagcattaggaaggcagccagagctggggtattggccaggggccaaaggggctggctcaccttgttgcatgcaggtccaaggcagggtgtactgaccaataaagtcatttcgggatttccagtcataatccattaccacaaaacgcagcatggcaagttcaggcaccagcacccggaaacatagtgtctgcccccagtatggattaaaacctgagttggtggacagaaagaaataagaagacattatgacagttttcttgactgggttgcttttcttgtgttctcatttaatctagatggcaatcagcattttacaggtaaggaaaaaggctcagagtaagcaagtaatttgcccaggtcactggagcttttaagtgaagagccaggattctttgtactgttccacactgcctcccatgtggggacatgcaataacagatgctatacttaatggaagacagactagaaggaaaactaatcatgctcctacccccacctccccagcactgccagtttctcaccattgttctccacatagttggtctcctgccgtgctgtgtctagacgaacgccaaagatctgcactttcaccagtggatccacaatggacccctctttggtcttgtccactttggggagttgctgaccgctgatcacctgtagtcagggctctggaatctcacaagttcctgctcagcccagccccacccgaccctactcccaaccccaggggagaagaagctttttggtttgtaaaacatcctccatgggtaatatattttcttctagtattctatctgcaatttaaaatgcacccaaaggccgggcacggtggctcacacctgtaatcccaacacttcaggaggccgaggtgggcagatcacttgaaaccaggagaccagcctggccaacatggtgaaaccctatctctactaaaaatacaaaaattagccaggcatggtggcgggcgcctgtagtcccagctactcggaaggctcagatgggagaatcacttgaacccaggaggcggaggttgcagtgagccaagatcatgccactgcactccagcctgcagcagagcaagactctgtctcagaataaacaaataaattaaatggatccaggtagaaattcaacagtttgaaagtaggcatgctaatgacagcagccactttttttttttcaaagagacacgatcatactcttgaccaagctggaatgcagtggggcagtcatagctcactgcaacctccatctcctgggctaaagtgaccctccagccttagcctcctgagtagccaggactatctatagtcatgtgccaccatgccaggctaatttttaaattttttgtagagacgggagtctctacaaaatttttaaattttttgttgagaccagtttcagactggtctcaaactcctgggctcaagcagtcctcctgccttggcctccagagcgctgggattacaggtgtaagctatcgctcccagccagcctcttttatagcacttcctgtgtgccaggaattgtaagaactttatattaactgttatactccttataaccctgtgaggcaggtggtagtgttacccctattttgcaggtgagcagactgaggtatggagaggttaaggaacttgcccaacattacccaattaggaagttgtggtttgaagctaggcagctggctccaaaagctaaaactagacactgttaataggctatccggcctctacattccggtcaggcctagccacctcttccctcacttctatcccagttatctcagtttcttcccaacagtttatttccactgtacctggattaagagagtctgggctttgaaagggctgatgggcttctcagggtggaaagaactctggatatcacgcaggaagtctggcttcagcacatagccacagccgccattctggcggaaatgcccatcacagatgtccatttcaagccctgcagtctgcatattcatggccactgagggccccaggagaaaagaagagcaagattcaccatggaggccttccagcccctctttcagggagttaagaagataggtactgggtgcacggtacctgctggtaatatccactgatagcatttctcagcctagcaattttcttgagcattccccaaccctaccatcactagagaacttatttcccacctgctgctcctccactccctcttcccagtccctgctgcctcctcacccatctggcagcctgcattccagagttcctgggggttgtagttggaagagtctgtcctcaggccgctgggatacacacggcttaactgccaagtattgtgctgcacaaactcattgcctgtaaaagggtatagagagggagatggaagtggggtggaatctcccacttccctagtcccaaggaccctgcctactcttcacccttctctccagcatctgaagctggctccagaaagtttcactgtgcctctctactctgtccatccagaccagctttcctgcccctagacccttgagccactattcataactcctctgcccttgtctgctctaaggagtttctgaactccttcatctctccttagctaccttgtcttttttcttgggacttacctgccagtccatcaggcctgaacctatccatcccacttccctccccatccctccattttggtcctgaccagcctccttgatgaggcgcttggccttggtttcagagaaagatgatatctcgtagaagtggtagtgctcctttgaatgtgtgaagctgcggaatgagacagacttcaagtagataaccagggaagagagggctggacacaagatgggcttggatttctggagaaggtggaaaagaagatggaattgaaccctcagcagtctgagagagaagaagataatggccatccaacctaaacctctgcccactgcctccccactgtattctccctcctgcctcacctgccgggacaagagaagggactcaggcttggaaataggagcctgggccacaatctgacaacagatagacggacaaaacagcgggcacgtcacaacctgggggtgggaatgggaataaaggcggtctgcatgtactgctgggatcagtgtcaacctctgggcttgtgtttgctctatgttatatcctgggtgacaggttttaaatttattattatatttaaacagagaggcattatcctccctccctctcatttaaaacaaaggaacaataacctttggtcaaaatgtacatgaatccagacagatatgtcaaggtatgcaaatggtcatgtaagtcacacctggaaggatgtgagagtcccagagtaatatctttggatttgtctcctgaattcccatttccatccctggacatggcagcaggttagacaccacagccccagaaagcacaggataagctaggagtcagtcagctgagtgagccacgcaagtacacaagagaaaggcagacttcaaaccaggatcttggaggccccaccaatggcatcccttctccctctgcctcccttccccatagggagatggaccactctagcacagccttctcagagccttcacgttccccacctcaaaatgctctccttcctgctcctctggctactgctggcccttcctaaaactcatcctttccaaaaagctttctctatgcccactttggttgagatcacaacaatcattccagtaacccctacttacccaatataataatgttacacatacaaacacacacccgctcatcactggttttcaagctggcctttaagaagaccaagaagtacaaaaatgtctcaggagtcactagggcacccaggagagagccaaatgggtgcttcaactaggatggttctgcgtttatctattttgcgtaagatttcattttaaaaaaaaagatgtggcccaaagaagttggaaagccactgcaacatacctacatatggcagtatataatatatattgatgccatgtatgcggtcttaaatctccttcattgggaggaagggtcattgctccttggccctgcatcttgcacggctctagtcttcatgaacaggccttcagcttgcataagttgactaaataccacagcagaaagaccactcctggcttaccttctttttgtccttattctgaaggttctgctcctggggctcaggctcagtctcaaactgggactccagcgccaattctgactcttccaactcaggttctgcttcctcttcctcatattccaggtcttcctcaagtgttaacttcttccccttcaccaggatcttcctccgaagctcctaggggacaaaaatgaaggggcctgtctacctgtctgctcttgggtccttctgggaatcatgccagtctcattgttctcaaaggcagaggaagtgagtgagtggtcggaagttcccgagggaagagattagctgcttgatacatacaattggaattcccatattgttaagcaaacttttaatatctctatccatatggaaaataatatatatggtctcctgccacacatttgacacagtaaatactcgttatagattagagatttacatgtcaatataaagaacataagaatacaagaaggaaatagagaacctttttgaataatccttttttttttttttttgagacggagtctcgcactgtcgcccgggctggagtgcagtggcgcaatctcagctcactgcaccaccaccttccaggttcaagcaattctcctgcctcagcttcccaagtagctgggattacaggtgcccaccatcatgcccagctaatttgtatttttagtagagatgggttttcactatgttggccaggctagtcttgaacacctgacttcatgatccacctgcctcagcctcccaaagtgctgggattagaggcatgaaccaacgtgcctggcctgaataatcttaccgtgggaaagcctttagaaacataacttgaaaactcagggccaggcgcagtagctcacgcctgtaatcacagcactttgggaggctgaggagggtggatcacgtgaggtcagggattcaagaccagcctggctaacatagtgaaatctcatctctactaaaatacaaaaactagccaggtgtggtggtgcacacctataatccaagctactcaggaggctgaggcaggagaatcgcttgaacccgggaggcagaggttgtagtgagctgagatcgcaccattgcactccagcctgggcgacaagagcgaaactctgtctcaaaaaaaacaaaaaaatctatcgatagctgcttgttatgggagaggttgggattatgataggaggggagatttccctttatattgtttgtatagtccacaacaactatgaactaccagaaaaaaatcaagatacttccactgagaaaagaaataatgtaaattgttgatttaaaacttagagagctataaatagaattctgtgttcagttagattttgtttaagttaaaattgtctccaaggatccaaggacattaaagagcaagatggtccatccgaggatagaaagaagggaacaaagaggggcatagaggaaggagcccaggtggcggaatccagaagccacagcagagcctgggctggaggaacagtgtccctacctcaggcgagggcagctgagtgggcagcaccccatccaaggtggtgctcagcagctgctcccccaggatctcagtcagatgacgggccatggtctgctgctgctcccagctgcagtgggtctccagggacaagatgactgggtagtctgatgtctggtgg

SEQ ID NO: 96223 - DNA, 30387 bp, Homo sapiens
gaacattttaactctgccccaagcatttgacaactgctatttttcattcttacaactaccctatattattaccaccctttttatagataaggtgccaaggctcacagcagttaagtaatatgcctaaggtcacaaagccaccaaagacatttgaacttggattcaaacccaggactgtctatcaccaaagcttgctggtgtggctggcgattcacctggggagcgtttgtttatgcttccactgaagattctgattcacaggtctggaaagaagtatccccaagggaacgtgcatgttttcacaagcagctcaggtgactctgagggtcagggaagaatggaaagcatttcgctggccctgcctgcagcatggtggatgccaggctggttccgtggcctggcttcctcatggtgccacccacttccagttacagcagtttcagtcaccatcaacatccgccatgtgcctttctcactgcctttcacctagatgacctcaactgaggaaggcgccagaagtcacaggaggtagagaaatgcagtatgatttctctctctctttttttttttttttgagatggagtctccctctgttgcccaggctggagtgcagtggcgtgatctcggctcactgcaagctccgcctcccgggttcatgccattctcctgcctcagcctcctgagtagctgggaccacaggcgcctgccatcacgtccagctaatttttctatttttagtagagacggggtttcactatgttagccaggatggtctcgatctcctgaccttgtgatctgcccgcctcggcctctcaaagtgctgggattacaagcgtgagccactgtgatttcttttcttctctctttttttttttttttttttttttgagacggagtctttttctgttgcccaggctggagagcagtggcatgatctcggctcactgcaacctctgtctcccaggttcaagcgattctcctgcctcagcctccggtgtagctgggactacaggcatgcgccaccacacttggctaattgtttgtatttttagtagagatggggtttcactatatgttagccaggccggtctctaactcctgacctcaggtgatccaccccctgacctcccacagtgctgggattacaggcatgaaccactgtgaccagccacagtgtgatttctaagtagagagatgggcccccggcctcacagtcctttagtgccaaagctggaacaaaacttcacttctgagacatccaaatccaccattctttccactctctatttccttaggaaagtgttaaataatgtttatgaataataaggccaattttaagggggaggagcccccataccccacccctaccttatctatcccccacacatctatcattcaagcctgagaggctccctccatcccactttggaacattggcattcaattcaacagatgctgggtcagggccgtgcccaggcctaggggtgaatgagacattgtctctgccctccagtggggagaaacaggcactttcacctcaggctgggttcaatgcctcaattcagtaaatacgtcctctgaaaacaagcaacttcgggcggcgcggtagctcttgcctgtaatcccagcactttgggaggccaaggcaggtggatgacctgaggccaggagttcaagaccagcctggccaacgtggcaaaaccctgtttctactaaaaatacaaaaattagctgggcattgtggtgggcgcctgtaatctcagctactcaggaggccaagcaggagaatcgcttgaacccaggaggcggaggttgcagggagccgagatcatgctactgcaccccagccgtggtgacagagtgagactccatctcaaaaagaaagaaagaaagaaagaaaaagaaaaacagaaaaaaggcaacttctttcagaaagttagtgatcaatgcatgggtagagtaacacattaaatgctaggtaaccaggcagctatgagaagggtttggaggaccaattagtggagtcctggggctgggctggagggtggcaacagagaaagttctctggatccaccgctccaattaagtttttcctgcccatgtccttcaggttccacctgggcccaccccttccaggctgccaccaccccctcccaccaatcactaagctttagctagtcctaaaatacctaaaataacatccagtcctaaaataaacatcagtctaatccctttcactcctccacccctcttcctgcagccatggacttgactccactttcctcctaggtagtgttgctggaaaaatacaaccaaccagttaaatgtgaatttcagataagcaatgagtacttttttttagtacaagtatttccaaatattatatggggcagtgggatatgcttatatgaaaaaatattgtttggccgggcgcagcggctcatgcctgtagtcccagcactttgggagggtgaggcggatggattgcttgagctcatgagttcaagaccagcctgggcaacatggcaaaaccctgtctccacagaaaatacaaaaattagccgggcgtggtggtgctcatgtctgtagtcccagctacttgagaggctgaggtgggaggatggcttgagcctgggaggtggaggttgccgcgagccaagatcgcactactgtactccagcctgggagtgcagagccagaccttgtcttgaaaaaaaaaaaaaaaaaggtttgttgtttatctgaagctcaaactggttgccttgcatctttatttgctaaagctggaaccctaccccaggggcaccaccagagcctccccaaccctcccaaactccctctaggtggttattttctggctccccattgctttcagggtaaaatctcaatttctggccccctgcctccttggccagccctatttcctaccccttctaccccactgcaccctccaccccccatcctagcttgctggggcaactggccctaagtcccttgccctctgcctggagaaccttctcccctcctccgaataggctggttcctaacacctcctaacactctactcaggtgtcacctcctctgaactcctttcccgaacccccaccccattccccacactgggttaggagctttctctgggatctggaggaaccaagtgaatatttctttatctgccagcacttgtcaaactgtcaacattgtaataatctgtcattttactggctcccttagactgtgagtttcttgagagcaggggctgtgttctttcagccttctcatttctagaaccggaaattcctgtctggttggcagacaataaaagcttacttaataattttgcagataaggcccaagagaaaaaaacatcatttatcgaatgcctattgccagcgaagcactgctgctctgggccaggcgcttcaggtgttatttttgaccctatagtcagaaaaagggctctggagaaaaagcacgcagcaaggcttgtgtgggcttgcctcgtgtgccccatgtcccactcccccagtcgggcagatgtgagtcgctggtgattgctggttggaaatggaatctccttggatattaaccatcctggtggttctagaaagtggagggtgttttctggagaaggggcctgctatggtgggaatgttgttgtccccactccattcatttgttgaaacttaatcctcaatgttatagtattaaaaggtgaggcctttaggaagtgattaggtcatgaaggcggaaccctctggaatggaattcatgctcttagaaaagaagctggtggccaggtgcagtggctcacgcctataatcccagcactttgggaggtggaggagggcaaattgcttgagcccaggagttcaagaccagcgtgggcaacatagtgagaccctgtctctacaaaaaatacaaaaattagccaggtgtggtggtgcatgtgtgtagtcccagctactcaggaggctgagttggaaggattgcttgtacatgggaggtcaaggctgcagtgagctgcaattgtgccattgcacagagtgagattccatctcaaaaaaaaggaaggctggtgggggggcggtgtctgtttgttccttccttggccatatgaggactcagacgatatctgtgaagcagagggagccttcatcagacacctaacctgctggtgccttgatgttgcgtttcccaccctccagaactgtgagcaatacatttctgctgtttctaaattacccactctaaggtatttttgttgtagcagcccagatggactaagacagcacaagtgtagagagcatgaaaaaatgtcagggatctggacagattccatgggccatgcatttcacctagggcgctactccttgagcaagggggagacagacactgagcagaactgtacttgctctggtgagatcacaccttgggtggggacttcctaaaatgaggttcttggcctgtaggaactggaagtacactgaagggttggggtgtctggggagctagcccaccataacggccactagtccccctaagtaactcctacttaaactatatttacagaaataaacatacatagtgtgtgtatggggggcagtttttaaaaatctgtcttttttttttttttttttttttaaatctctgttttggggctggacgtggtggctcatgtctgtaatcctagcactttgggaggccaaagtgggctgactgctttgagctcaggggtttgagaccagcctatgcaacaacgtgaaaacccatctctacaaaacaaacaaaccaaacaaaacaaacaagcaaacaaacaaaattagctgggtgtagtggcacacacttgtaatcccagctactcaggaggctgaggccggagaatcacttgaaaccaggaggaggatgcagtgagccgagatggcgccactgcactccagcctgggtgacagagcgagaccctgtctggaaaaaaaaaaaaaaaaaaaaaaggacattcagtggtggtgtggtgctgacctatagctattaacatgagataagcactttaaacagagttggtcaactactggcagccttggtgtcatggaaagaacttggactttggaaccacagaaactcaggcaaggctcggtaatgtttctctttttaaattgagacaaggtctctctatgttgcctaggctgggtctccaactcctgggctcaagccatcctctggccttggcctcccaaaagtgctaggatcgcaggtgtgagtcaccatgcccaggctccagtaatatttcagaacttcctcaaaactgtttcctcctttgctactgcattcttcactgagatgagggttaagacctacctaacagtagtaatctacatctcaatgtaggacttctgaattctgacttgaggaaagcacctgctttcctggttgagtaattataaacagagattctaggtttgcatgtttgcagttttaaactcgaaaagtgcatttatctcaaaaacacagaattatcaaggattttaattactgatttatttgtaatgtaaaaatgggaaacaaacggcctccagtaggaaattaatttaatccgcatagccatgcaatggaatacttcacggcattaagattgtgcttttgaagactatttagtgagaagaaaaatgttcatcataaaacagtaaaaagaagggcagtaaacaaaacaccatacaatataccccactgtagaaaaacaaaatacatacagaaatgtaatagccaaagaaggacccaaagcgaacgcttccccctgggaactaggaggggtggagagaaattactttcttccctgcatttctgtgtcttttctagcttcctatcagtatcatgtattgcctttaaatccgaaaatacccctgtgttattagtgaggcgtcgtcggggctctgagaggcgcgcgcgcccgggacagacccctgcgccccctggcggcgccctgaggccccgccccacgaggccggcgcgacggggcggggcgcggagccccagccgagcctagccctgcccggccccggaggacttgcaacactccgaggccaggaacgctccgtctggaacggcgcaggcaagccagggggccggggccggcgccgttggggactgtgggcggtggggactggtccagggctggggcggccatgcgccggggcgcctaaacttttcggagcgcgctcccggcttgcccgctcctgggcccaaggagcccgttccagatggggatctcccctcctggcccttggcgtttcgctctccctgggcgcgcgggtgggcggcygggtctgtggcacctggttagccttgggagcccagcagcgtgttgtgggcactggtgagcggagccagggtctgggggtgtcctcgtgttccctctttcgggcacgagtggcctctctgtcgcagggcctatccaccatgccagcccgagtggccagctgtgtgggatgagggctttcatggccctcagctggtgagaagagggaagagggaggggagacagccagggcctggcacggaccccaggttgcccccacacgcgctgaggccagtctcggtgtagacaggtgaatatttaaggggtggggaagggggggtcctagcttgcagctggggcagaagccaatgagcagctcaagtgtttggcatggggaagtggccacctctatcaccatgactttgccctctgccagtcccacttccagccactgtttcccggctgggttcacagaactacaggggagtaacatcctcctcgtgacttctttgggttagagtgaaaacaaaacagagaaacgggaaaagggaaagcaagtggagagactggggcaggagccagggaccagtgggaggaagcagagggaggctgctgggaggccaggccctggccttgtggggtcggcaccaattcttgtcctatggggtctccatctcctctccctcctctgtggcctctacgtggtacccaggagtttggggttctacctgagcaccctggacatgggataagtaggcctgggaacgcaggtcagagccagatgtcatggaagggccctcaggtgtccagttctctgggctctgaaatattcatctcattagtgagctttggtttccaagctggcgactttgggctggccagtggtggcaggggagccaggtgcctcctggggctgctttattggcgcaaagggggagccatacttccttctcacctgcctcctctctctgtctctccagtcatgaggatccagagaaccagtttatagcttaaatggaagaggcaggaccacagtgtcaggggccctgtctttctgtgctatgacctcaaggcctcacttgtaaaaatgagcmcwtcagagaggtaatgatgggttatcctgtaagtgttgggagagcctcatgtcatgagctggggtaatagccacctgggctcagcctcctcccctgggaatgggtgcctcagccagacgctgtctacctcagagcacctccaaccgcaggcctcaccctgggcctttcagaaaaagcagaagccacagagaagggaaacacacatacttgtgtgttttcagagggctgaactgggacgaccagagagtggaagctcatacaattctctgggaagaagttctgctaacaacatgtctgatcatgacatgggccttctggacctattctgttggggacacagtggaagggatgaccttgacagaatcttccaaccctaagattctgggattctaggccaaaacctgggtcttgttttgaagtagaaatgatatccagaagtcgacaggctacagtggcaggtacctccattggtgggaagggagatattaatgagctcccacttttgtctgtaatgatttgtgctttgccccgttgcacagaggtgaggttaggggtgcccgtttcctggttctgtggtagctggatatgtcccccggcccttggcagtaaatcccacggtgggatagcagctgtgtggaatgggggaaggggaggaccctcgccagagatcctggcactgggctgaccccctgagagtgagagggcatgtctagtacttcatgtgactgctctgaggggcagctgggtgtacgcacagaggttataagagacgaggagttaggatatgaatgattctcagggttgggtgtctgtaatacaaaggtggcctgggtcagcatcccacagggtgttaataggtttgcctcgataaaagtggctcaggcttaagggagtttgaaggaacactgggttaaacaaagctgaacagggttgcttactgcaggacttctcaggggcagaatatgccattgtgaatttccaagaagggggtgtggattgtttctcaagagtcatctgtttccagcactcattcattaacgtctcctggggygtgttctttaraacagtctgggaaatgcctggctaggtgattctgtttctccactgtggctcccataaacaagtccytactcctttcccccacgtgggctgatttagggataaaaggaggccaggggaggtcatttgcctggattcctgcagctagttcatgaacccaggtcagtggacttcctgcctcctactctttctttcctagagtgttatatactgtttagctcgggcgtaactgatcacccaggaagagctggccgtagggtccagacagcattatggggacagtttgggagggtgtggacagccccatactgagaacatgccatgtacttctgcctctgaagatgtccttggaaacagttgcacatcagtagtgaccccctggtgtaggttcttggggagccatgccattctgccctgaagcctcctgttaggctgttcattcagaatcagaaactggcagagtggactttgatctttcagttttttttttttttttttttttctgtcgcccaggctggagtgcagtggcatggtctcggctcactgcaacctacatctcctgggttcaagtgattctcctgcctcagcctcccgagaagctgggattataggcatgtgccaccatgcccggctaatttttgtatttttagtagagacgaggtttcaccatgttggccaggctggtctcgaacacctgacctcaagtgatccgcctggctcggcctcccaaagtgctgggattacaggcatgagccaccgcgcctggccattctttcatttgaggggaattgtcttactgatgttaaaactgggtctagagatgtggctctcacagtggagtgagtcccaaagccaggacaagaactcrggtccccacctcctagcccaggacccaggcttcagatcaactttccgcaggggaaagaaataatggtagcaacaacagcttgctcagctcctttctatctatcgttttgatctttactgccttggccccaccctggtgctgcctattcacgcaggtgcgtgctacagatgcctcaggggcttctactcctgcctgatataaaagcaaagaggctgaattttaaatcaggtgtgagatctatgcttaaactcatctctgctgtttgcctgctgtgggaccctagatctctttttttctgaatttcagttatctcatctatagagtgggatgagggtaagaatacctcacagcactgttgcaaggatcagatgtgccttagttactataggttgagtgtctcttatccaaaatgggaccattttgacaatttccttccctcccttttcttttacccaccccaactcccttccacccccaagaaaacactttactctcctactcgagcatatagtcacgatagccatgggggcagacatctacagtggcagaagcacatggattttggattttttcggatttggggctatgtatattatacttactggttgagcgtccctaatctgaaaatccgaaatcagaaatgctccagtgagcattcctttgagtgtcatcttggtgctcaaaatgttttagattgtggagcattttggattttggaaatgagggatattcaacctgtacttccttagttatatagtaagtactggaagtggttcaactactctaagtggttcccttccttccctagttattttatttatttattttttgagacagagtctccctctgttgcccaggctggagtgcagtggcgccattttgactcactgcaagctccgcctcccgggttcatgccattcttctgcctcagcctcccgagtagctgggactacaggcgtccgccaccacatccagctaattttttgtattttttagtagagatggggtttcaccatgttagccaggatggtctcgatctcctgamctcgtgatccgcccgccttggcctcccaaagtgctgggattacaggcgtgagccgccatgcctggccccttccctagttcttttttggggttagttatcagtctcctttgtctgtctctttcccctcctaatcttgaagttcaatgaaaagacaggagatgaaacaaagaaggaagtgaacagggactgtgctcagaagtattatagcatcagcctgctaatggcttcctcttcccttatctgtactcccaggccatcctgacttgggtggggtaacccgagattaccattctgatcacaggattctgctccagacaagggtggcggagctgcggtgcctgggtcctctcgtgatccccaggacagcctctccctcctgggagcttggagccacccctcggtctccatgggtccagagagaggccaccctggctagagagggggctgggaggggtggcctcgagttgggggccagaagtcgagggctggctgtctttttttttgagatggggtttcactcttgttgcccaggctggagtgcaatggcatgttcttggctcactgcaacctctgcctctcgggttcgagcgatccccctgcctcagcctcccgagtagctgggacttcaggtgtgggatatcacgcccagctaattttttgtattttttagtagacatggggtttgaccatgttggccacgatggtcttgatctcctgacctcgtgatccacctgcctcggcctcccaaagtgctgggattacaggcatgagccactgcacccggcccggtcttaactgtttctgagctgagaggtcactagagaactgagagaatggtagcttgttctggcccctccttgggagagggtgtgtgctggtgtctatcactcagagagtgggcggggctgggaagggaagttccaaacccatgacgaagaagagggctgttctggggtggagcaggaactttcttggctctggggtttccttgtctgtcaaatgaccaggtgagatccaaagtctaagccagctctgatattttagtgtttagatccctgtggcttcatcctcttagtcccaaagtccaggctgatggaaggatatttagttgattctgggcccccttggtgcagaatcaggcctggtgacttgcccagacactcctgggtatatctttttactcatttgctctcgtggctatgaggtcagctgtgccctggggtaggaggataaagtgttttcttgtgggggcagataaaggaaaagggaggggaacaaatcgtcagatctgggctgtgctcctgcgcctgctgggtggggtttcctgagatgtgcattctgagctattttttccactctgggcatccgtctctggcagggaggagggcaggctgcctggaccagtcagctgctcctttccatccctccctccagtacacatactctcctcttgctgtaaccccagtagctcaggcctcctctgcagattccggagccttaacccttcaaatacccccaggagagccccagccggggcctcagtaggcagacagcaggattaccacactgagagggctccaggggaggaggtgcttccgcctctgcatctgaaaaccttgacacccagcaagtcctgctgtctgagctcacccacttgtgccgctgctgtggtagaaagcaggggctctggttccttcctaatgggggactggggccckgagagaggagcaaacttagatctataatgggcaaggatagggcacagtctgaatgccttgataacaggcattgtgaggcaaggaagaatgttctaatcgagctgtctgcagacaaggggcttgctccatgttgctggagttccttcaagcagaaggtgggccagacacagtggctcatgcctgtaatcccagcactttgggaggcctcggtgggtggatcacttgaggccaggagtttgccagcctggccaacatggtgaaaccccgtttctaccaaaacaaaaagaaaaacaaaaacaagcagaaggtgaatgcctactgtattttgggaaaattcaggcttccagtggggaccttaaagtccctgcagactgtgagcccctctagtagctgctggcagaacccagatctgatttctagtcctcactctgtgtcagtctcgtgatctctctccccttctccctccttcccttaccctccattcttctctagcctccacccttagacatagctacgaaagtaaacactgaccctttccccctttgctgctacctaggcagatgccagccccaaacctcatccctagtggaggccttgctgatgtggaagtggccagggccctcatggaggctgggcagaagcccaagagcaggctctaaagctgccaaacccggcagccctggtccccggaggctcttgccagtctgacagtgttcttggcactgctcagaggtgagtgtggctgagtttagcaactcccctggctagcgttaatgctggggtttcctctcctgtgcccaggtctctctatgtagacagctaggatctcgtcctgtccccaggaccagctcggtaaccaaggacaggttcctgtgctgtggctgtctagttggtaaagtgaggggttggccgtccttgggtgagtttctttccagctctgacctttatgtatctccaagcctgggccaccctcttctccyggggccgttggccaggctgtgagcccygtggtggtgtggagggcctgagtagtttggcttccacttgtgtcagcctcctgttgaggctaaaacccatgagagggttttagatggaagctatggcagaagtgatgagaaggttggatagacagggtgttttcaggttagggattaagagcaggggcttgggagtcagtcttggggctcattttgacttcatcacactctagctaggttatcttggccaagtgatttaattcttctgtgcctcaatctcttcatttgtaaatgggaataataataacagtattaacttgctggactgttgtaaggatttaatgaaaataaccaacctttatccccattgatcaggggtcgggtttcattctaagcactttatgtgtattttcttttttattttcttcgagacaaagtctcactctgtcacccaggctggagtgcagtggcacgattgtggctcactggaatctccgcctcccaggttgaatcgattctcctgcctcagcctcccgagtaactgggattctaggcgcctgctgccatgcccagctaatttttatatttttagtagagacggagtttcaccatttggccaggctggtctcgaactcctgatctcaggtgatccacctgcctcggcctctcaaagtgttgagattacaggcgtgagccactgtgcccagccttctatgtgtattttctcacttaatttttatagcaaccccgtggagggtactattactagtgtgagacccattttccaggtgaagaaactgaggcatagtgagttgaaatggtcatggtagtttctggtgtggatgggctggtggctgaggtacccgaaggactggcctggaaactgctgtgtgcagtgcaggcaggcctactagcacatgcttctgaaaccaaaagcctgaaagggaggggcaagagaggcaggagtgaagctctgagtcagcacccgctgagctgcaccagaaccttggagtccccgtggcccatccgaggctgacccttctctctgaggcacctttcacccggtggctgccacagccccttggtctggaaagttagctgtttgccctgcttggctcagaggagggagcaggggcagctctctggccgagcaaaggtcaggccctgcagagccgagttcccagaatcatagtctgttgttagagggggcagtgggcttagaggtcgtgtcgcccccaccttatttcacagaggtgcaccctgaggaggtgctgggacacgtcatggtgacatcacggttggggtttctgcccacagagcctttccggccagtgctttttttttttttttttttttgagatggagtctcactctgttgcccaggctggagtacggtggcgcgatctcagctcaccacaacctctgcctcccaggttcaagtgattctcctgcctcggcctcctgagtaactgggactacaggtacatgccaccatgcctggctaatttttgcatttttagtagagcaggttttcactatgttggccaggctggtctcgaactcctgacctcatgatctgcccacttcagccttctaaagtgctgggattacaggcgtgagttaccgcaccctgccagctttgtatttctgacctgacattcttgccctggttctatcccagcccctctagggagatgaagaacagctttcctcaaaataacccacttagagacctggacttttattcaattccccctcctcaaccctccctgccaccttcccctctctgaattatcccagttgtcataaaagagaagagataagacagtcctttatttgatccccgaactatgcaatgtgccctaaaaagagatgctggtctctcttgcttccagcagagcctctgagagcctctggtgtctgctgacctgcatctgggggtgtcctccttggggatcctaaagccccctgtagatgctctagaagaggtggtggccctgtcgagcccagactgccagggcttgtccttactggggatgcaggggccctctaggggcttccttagctcctcctaagcctgcatctctgctacctcagaggggaccaccaggcccagaggacagtaactggcagaggaggcataagagcaccgcataacatgaaggacctggacccaggatctggaaggcctccgtcctggttatgccactgacctgcgagttctggggttctggggaatcacttccctgttcagggcctgcattctctcatctgaagtgagcatttggggcttatggccctgaggtcccttccaactccagtttggggttccctccccctggtttcttggccctcccctggctatggggctcttcctgctgcagggaaggcattcccttgaccttgtggcctgactcctcagctctttgtcctccctgctagcactgcacctggaagacaggtagaactcacagagagcctgggattcagaacatctgtctccccctccagggtgggggtaagggggagggcgaggggccgtgcactcactctctcttccctagcaaggccagagagcagctgtggtcgcaggctgccgcatgcctttctgacacgccaccgctgttatttgaaggaaccagaaagtcctgtctcaagctggccctttggcacagcctccctgcccccagcccctgtaccacccactcctgcttctcaggcttcctgactcagcctgccactggcccccgggtccctggatcccttcctcctcggggcctggcagctctggcactggggctagcttgttttcctccacttcttcccccggctctccactttgagccttggctccaacccagctctggcttccaggcctggcatccccgtcagctgtggcaggggcagagctgaccctttcagagggtcccagctggccctgtgagtcgccaggaggctgtgcctggcccatctggcttcttcgctggttctgccatcmagccaccaaaactggaaggttttcttaaaccacaacagggagttcccaggctccctggttccctctctcctcagcgaatccttcctcctgctttcctatggctggggagctgcacagtgagaggcctgtggacaagaagcaggcgcaaaggcaggagggacaggagcccagttggtggggaggtggcctgtggacagcaaatcacacgctgccctctaaggagaaaataggtggtgttcctctccacggaggcagcytggacaaggctggaagtgggcccatgaggctgagtgagctgggcctgggcattcacgattgcttttctcctctcccatttcaggtcccagcagctggggttccccstcagcccgtgagcrgccatgtccaaccccagcgccccaccaccatatgaagaccgcaaccccctgtacccaggccctcygccccctgggggctatgggcagccatctgtcctgccaggagggtatcctgcctaccctggctaccygcagcctggctacggtcaccctgctggctacccacagcccatgccccccacccacccgatgcccatgaactacggtgagtcctggaagggcagatggaaggtgggtgggagggacagcacttggagcagrtgaggccaccgcctcctgccccttttctcttctagtttcccttaaatccctttctcatcttctctgttgagatctctccctctgtttctgtctttgttaccctccactttttgcctcagcaactggcccccagccacttgctgccccctttgttcaaggagatccatgaggcatgtcccagaacgtacacaccacaggagaatggggctgggccaagtaatgactcctgaggggttacctcagggcaccagctctgtttcccaacaagcggccaacaagctgctgccacctcccagacctgtcgacttccttaggaactcctttgggaacctgaaccactttcctcatcctttaaagtgaaatctgacttttgcaaaagacatttggagccaagtttggtaaacatcwtggcagggacatgcttgtgtttggtcagaaatgaggtgaggccggccgcggtggctcacgcctgtaatcccagcactctgggaggctgaggcgagcagatcacctgaggtcaggaattcgagaccagcctggccaacatggcaaaaccccatctccactaaaaatacaaaaacttagccgggtgtggtggcgtgcacctgtaatcccagctactcaggaggctgaggcaggagaatcgcttgcaatcccaggaggtggaggttgcagtgagccaggatcgcactactgcacttcagcctgagcaacagagcaagactctgtctcaaaaaaaaaaccaaaaaaaaacaaaaaaaaaacaaaaaacaaaacaaaacaaaaaaagaggccgggtacggtggctcatgcctgtaatctcaacactttgggaggctgagatgggcggatcacgagtttgagaccagcctggccaacatggtgaaaccctgtctctaccaaaaatacaaaaaatgagccgggcgtggtggcatgcgtctgtaatcccagctactcaggaggctaaggcaggagaattgcttgaacccgggaggtggaggttgcggtgagccgagatcacgcctttgcactccagcttgggcaacaagaccgaaactccatctcaaaaaaaaaaaaaaaaaaaaaaaggaaatgaggtgaagttagagtgcagtgagtcttcctgggtggctcaagcgtggattttaaaagtagttcccaaagaggcattcaggcattcaggcattcagggaatgtttgcagccctgcagcatctctgaaccccagaggggtgtcagccagctctcacctggacatgtgcgctggtgcggatctgcgcatgggtcctgcacagtcacgcacaccctttgcacacctgcctctgtgaggctgatgcagatccctgtcttcacctctatccctgctgctgcacaaactgcgctctgccgccctccttttctcctaccctctgtccccatcccctgttctgccctggctggctgccccagtggatgcccatacctgctcctgcctggcttccccactacatcgtgaccccccagtgaacccccagtggcgtgggctgggcacacaggagccctccacagatgcacgtgaggaacgtttcccacctaagccccctcgtgacaggccggctctgggtcactctgagggtgtctagaagaccccagcttgggagaagagttcctgttataacacttgtcttttggctggagatccctgagactttgagattgtcagggaggctttgggattgacgccacatgtctcaggtccccagctgagtcaagtgtcatctgtccctaggcccaggccatggctatgatggggaggagagagcrgtgagtgatagcttcgggcctggagagtgggatgaccggaaagtgcgacacacttttatccgaaaggtaagatacgcgctgggaggtgggtgtacctggggcccctcaggctgtgggaatgggaagtgggtaggccacagtagccccagggcatcaattccatgaaatacactggctgcctgtcttctctagccttgtctgcttctcagaggggcacctggcttctctaaccccagggttccctctttttgcacctctcttcttgaccatgttttgggaggacacattcagtctgggagaatctcctaggtgggytctgccacagcgcccgccttccccagacatctttctccctttagactataggcagcttggagccagaaatgatcctactcgcttgtaacccaccctctccatctcacagctgcatagagcgtgcagactgagctgctgggagtgcagaggccatactggtagagtatggtggccaggcagggcaagtcagtagtcaccgaggctggtgttggacaggaggggagatggcagggagcatgggagyggggctgaggaagaagtgcacatwgcctctgagccaggcatctcactggggtcgcctctgggccaggctgcagctagggagggttcttgagtgggaggaaagtaytgggggctggcagcttcctggggcaggccaggggtgccggatggtgacccatgcccggcygtctgtgtccaggtttactccatcatctccgtgcagctgctcatcactgtggccatcattgctatcttcacctttgtgtaagtctctaggctttgccacccactcctactgccctgggggttcagggtcacctgctgggggtgtgggtggcggtgggccctgctcwcagggtgaccatgggcaattagagaaggtgaagccagggctgcctggctggcctgggtggggcagacaagcctcagggtgactactcctgtcctcctgtgccccacagggaacctgtcagcgcctttgtgaggagaaatgtggctgtctactacgtgtcctagtgagtgtgtgctcctctgtggttgggcagggaggcaggggtggcagcttctgtttctaggtgaccagctttgctcagggcaggatcaaaatgctttttgagagggcccccaagttggtgccagtttcccgtgccagagggtgtgggtgtgcgtgcccagatgagtagcagacccctagaactcgagagcaagagtgggacctgctggtggtggcgtgcacgctgcgctgcagcccccatgtcctctcagcccgtcagctgcagcctccccagacctccttcctggccggagcctggtgcttcagagcatctcagtgaccctggctgggggtaatctcgttcttgcttcctgttgagttgcttcccctcagacttccaaacggctatttgggccccaaatcactggcctggtgtgtgctgccaagcggggcagrtttgggcctgaactgcttccccatctctttgtccctagtgctgtcttcgttgtcacctacctgatccttgcctgctgccagggacccaggtgagtccyagagacttaacacagtgagaggggtgacagggattgggatgggggccgagtattttggaaagaaggattcctttatagcagctgaatggaaacttacaagaaatgaggaggaggatgacgatgacagctactgttcaggtgtatacaaaggaccatgtgtgtttaggagctaactagctgtcactcttatagtaaccctgcaagacaggtagcattttagccagttaacaaataggaagaacccgaggctcaaagaggctgagtaactttctccccatcacacaggcagtcagtttaagagttgcaaaccaatccaggtgtttctggcgccacaacacaggtctgtctcattggcccatgttgtccctgcgtaccacacctgaacaggtgccaaaggccatgccaacctccctccttggagtcaaggcttaatcctccaggcacaggagccaagcrcttccttctgctgtaggagcctctgacgcctgaggggccccaagtcatttaatcaaggcttctctttcccttcagacgccgtttcccatggaacatcattctgctgaccctttttgtaagtctagaagggtggcaggagggtgtggagatgctgtgagggagactgctcccagggaagrgatggggacccatttcagaaggatgtcctggctgtctcctccaccttatctgggccgcctgttctgatctcctctgtggctgcctctttccaacttggtggyrttccccagctctggcagaggccaccatggccactcccccagcaccctgccttccttcctttttaagtgtttcattcttgtctctctccttcccttagacttttgccatgggcttcatgacgggcaccatttccaggtacattcagggataaagcaccactcttgggaaatgtgtattgtggggagtggggtgttcctgggccggcagccagctgcgtgggtggattctgggcaggtcccctctggaagtggtgattttgaagtcattcatacgtggcttaatgcctcttgtctgtaactcctgcttctccccagtatgtaccaaaccaaagccgtcatcattgcaatgatcatcactgcggtggtatccatttcagtcaccatcttctgctttcagaccaaggtgagggcatggagggcccttccctggccccccgactcccctttcttatcaggcccggaccccggyacactagggatgttccctagagacctgatccccttctcctcatccgcacctacaaaactgtgtcctgtttctgtccttagaatgttgtggacattcccataccccctaggaggcagcactgggactccctggcagggccagtctgactgggctggttgtcacagccatctgacaggtgcctctttcttgcttcctggcaggtggacttcacctcgtgcacaggcctcttctgtgtcctgggaattgtgctcctggtgactgggattgtcactagcattgtgctctacttccaatacgtgagtgtcccaggagagctggggtcagggaacccagtgctcagggcagacttcctatatagcatggtctcgcaggccccaaaggtccccggggcaggctctgacctccagaacctctcgactggctagcaaaggcaccaacgtggaggcagcatccttctgggtgagggtagactctctrtgtggagatgggcggccttggagccagagcacctgaagccctggactgcatcactgcactcctaggggaaggggtgggttcaatctgsctggcagctgagaatcaggttctcggaggcagactgggagaggaacccagaggactgagatgatgggcctaggtggaagggaccttgcgggggtctctggatccaattatttcctttattctgttcagctgggggagaacagtgccgaaggggaaggatggggacacgagggctgcctgcccatgggccagctctgtccttctgtggacggccacctgtgggcatgtcatgtgggctgtcctgtgggtgctcccggattttgatactcaccagaggggttggggggcctcccttcttccttagtctacccctcccaggctgggctgtaggaactggtctattgaatgctgggtctgcccctttcagagctgtaactcaactgctttttttctagaagtatagtagacacttgtgtaccttgactggctttggagattggttttatacagccattgcaggatggcctctgctttctctgctggatatatcaccagtcttaatttcctccaagatctggaaaggcagtagcctttcatggagagctagcttcccagctctacccactctcatgccactatcccgggggaagctggggcctgtgggcctgtggtttgctgaggtttctaatgccattctctgtccccttcttctccaggtttactggctccacatgctctatgctgctctgggggccatttgtttcaccctggtaagtcccagccccactctaggaaggggagctgaggggatgaggggaggaatctagggaagggggcatgaatttagactgcctgggaggcagggaatggggccatagcaggccattcctctcacyactgtccagagattccattgatttttgtgggcactcttgccatctcttgttcaagctgcctgctattagaacactagtcagccatattgagaacggtgtgtctgcctcctttcctagactgtgagcagctacagtatagagcccatatgttatgctgtgcgttaatgtggccctaagcactgtgtggcgcataggcccccaagacaaatctgctgaccaaaaatgagctctggacacygatgcctgagttctcacttctggcttccctatccttgcagttcctggcttacgacacacagctggtcctggggaaccggaagcacaccatcagcccsgaggactacatcactggcgccctgcagatttacacagacatcatctacatcttcacctttgtgctgcagctgatgggggatcgcaattaaggagcaagcccccattttcacccgatcctgggctctcccttccaagctagagggctgggccctatgactgtggtctgggctttaggcccctttccttccccttgagtaacatgcccagtttcctttctgtcctggagacaggtggcctctctggctatggatgtgtgggtacttggtggggayggaggagctagggactaactgttgctcttggtgggcttggcagggactaggctgaagatgtgtcttctccccgccacctactgtatgacaccacattcttcctaacagctggggttgtgaggaatatgaaaagagcctattcgatagctagaagggaatatgaaaggtagaagtgacttcaaggtcacgaggttcccctcccacctctgtcacaggcttcttgactacgtagttggagctatttcttcccccagcaaagccagagagctttgtccccggcctcctggacacataggccattatcctgtattcctttggcttggcatcttttagctcaggaaggtagaagagatctgtgcccatgggtctccttgcttcaatcccttcttgtttcagtgacatatgtattgtttatctgggttagggatgggggacagataatagaacgagcaaagtaacctatacaggccagcatggaacagcatctcccctgggcttgctcctggcttgtgacgctataagacagagcaggccacatgtggccatctgctccccattcttgaaagctgctggggcctccttgcaggcttctggatctctggtcagagtgaactcttgcttcctgtattcaggcagctcagagcagaaagtaaggggcagagtcatacgtgtggccaggaagtagccagggtgaagagagactcrgtgcgggcagggagaatgcctgggggtccctcacctggctagggagataccgaagcctactgtggtactgaagacttctgggttctttccttctgctaacccagggagggtcctaagaggaaggtgacttctctctgtttgtcttaagttgcactgggggatttctgacttgaggcccatctctccagccagccactgccttctttgtaatattaagtgccttgagctggaatggggaagggggacaagggtcagtctgtcgggtgggggcagaaatcaaatcagcccaaggatatagttaggattaattacttaatagagaaatcctaactatatcacmcaaagggatacaactataaatgtaataaartttatgtctagaagttaaaaccctgtatggctccaggagtatgtgtggctctgcccaaagtatccacttcttccttctgcattctggcttgggctgtcccaccttttccaaggtaatcaaatacactttactgcagcagtttccggggacggatgcaatagactagtgaaggctcaggagttgggtggggaaagggagagctcaaccctatcacactggatcactggatatggaagagacctcttggctgtagtgcttgaccttttctgcaccatggaccctttccaaaagctcatgagagctaactctcttccccaaagagctgtatgtatacctacagttttgcagatggaggaggggatggactgcaggttcagtccatgtcaactccagtcccatcttacaaaatgaggaaactgggcctggtgcggtggctcacacctgtaactccagcactttgggaggccgagggcggtgggggggaatcacctgaggtcaggagtttgagaccagccagaccaaacatggtgaaaccccatctctactaaaagtacaaaaaaaaaaaaattaactgggagtggcggtgagtgcctgtaatcccagctactctggaggctgaagcaggagaatcacttgaacccagaaggtggaggttgcagtgagctgagatcatgccattgtactccagcctgggcaacaagagtgaaactctgtctcaaaaaaaaaaaaataaataagtaaaaaaaaatccaaaaaaaaaaaaaaacacaaaaagtaactgggcatggtggcactcacctggggtcccagctactcaggaggctgaggtaggaggatcacttgagcccaggaggtggaggttgcagtgagctgacgatcacaacactgcactccagcctgggtaacagagcgagactccgtctcaaaaaacaaaaaacaaaaaacaaaacaaatgaggaaactgaggcccagagtcgagtcatttggactcagtaaagagcagtgcttttttttgcctccacaccctgaataccttctttgattctctttattgtttcaaggctgagcgggaccccaccctcctggccggcagctctgagggcttggtcccgagggcccggggcctaggctggttgcacttaagtctctgggtttgccccaccatccagctgggaacactgagctctgtgagagggagcacacatgagtaaccagccccaccctctgcccctcccatcccaagggactcacaaacccagacctggttcctttctactaaacactcaataactttatttgcctttggctggctccttggtgtggggcagggtagggtttggcaacagcctgggcttcatgcgccctctggtggacctcagaggcacgaactggaatctgggccaaacctgaggacttaacagtcaatagcctaggagggtcgcagcgctcctcaggtctgcaccccagacccaacatcaggggacggggcactctgggaggaagccctgaacctctggctctcatactcgcccgtgttggacaaccgcatgttctgccgagccttcatctgcttcacacggtccttgtccacttcccgcttggtgaggatgaagaggaggataccacaagggaagccgatggccctacgggtggggagatgtgcacggggtttggggaggggccaagcctgagccagaggagctggggggagtcattctagcttcatcagttgcatgaatgctgcaatacctcttatagtctattcatcctctgtgctggctgctggagggacccacacaaatcagatcctgtcacttccctgcttaaaaccccgtaactccatcacttcctggccaagtccaaacatggcacaaaaggcccagtgtggctgggtctctgcctgcctctttcctcctcccgcctagagcctgatcctcagcacgagccctgcattcctgcaacagcacctgtgcaggattttccaggcagccctgacgctttccctctctgagacttggccaaggtaccctcccagttttcccctcttaagctaagtaaccactgcttgggaggcactttggtatgggggaaagagcatggagtcacagactaggtgagaatcctagctcagtctcagttccttcctctgtgaaatggggatgtaatacttatctcaaacactaaaacattacatggcaaagtactggcacacctcacatgcagaaaaaaatgttgatttcttcctcctttccctttaatattggtcaataatatgtattaaggtcagagtcagagcccaatcacaatgttcataacgccttctgagtactactatacaactagtacaagctcacatgatctcaacgaactacttacttaaacttgggtctcactccaagctcccaaaagggaggatgaggccagggacccaagtctgaatcagatcaactcagcttactccacagtaaacccactgtcttctcaattccacatactttcccacctccactgccccacccctctgagattccaatcgaacccaacaattctgttcccacaactttggattcagctcgccacctgaaacttggagaagtttctaagtcctgccctcccctacaagccacgccccgttggtgggcaaaggggtggttaaaactcaccaggccagtcccacagctttcatggggttcttgcccctctttctgggaatgtattccagctccggggataggggttcaggttcctccttgccctctggggagctgtggctttgcagggcccgggtcctgttatgagaagccttgttagctgtggctcctgcgagaatccctgtggatggaggtaaggaaggtcagtaagaagagatgagaagaaagcaagcggggaggtggggggcagtaagggcttgggaggagcggctgagatctggggaaggggagtgactgcagtctgaagtaagaagtgccaaggagaatccaaagggaaatgggaaaatcgccaccgaggtggcacctttggaagccacttccacgtcactgcgggctcatcaccctggtgccaggacgaaaagcttcgctgttcttcctcagacgacagcatgggaaggactgcagtgggactcacataagacgtatgaaggaaatccgggaaaaggttttgaaactgcaaatgttagcactggaagggaccttaaagatagtctactccatcccttgcactgtacggaagaggaaactgaagccctgagagaaaaactgctttgcccaaggtcaaactgctaattatccggggctggaactcaaacctccagaagcccggggctctttcctctgcactgcggtgagtgtgaaacacctggagcgcgggagtccaacaggcttcctaggagctccctcttgcagcaagaccccggaggtgtcgagcaacccgaaggcggggggatgcactgggtgacctctaaagagcatctctgcacccccagactctaagatcttgcagaaaagtgtggggaggaaccaagagccctgacctcctgctatcgtcgggctggacgtgaaagaaaagggatcttctgcagtcctgccctccccggggtccctctccttaccccggaggacgcgggcatttctcgccccccggcccttcagcgccgtagcagctaccaccgccgccatgttcagatcccacccccgcttcaccgcgctccccgccgggaattgtagtttgcgtaaggggcctcccccgctccttccgtcctgcctacagaccagaaactacatctcccagaagcccgcagagcggacccaggagaactactcttcccaggagaccccggaggcgcgcgcgctcgcttgtttccctccagttgggggcggagtcaggtggggcggagtttgggttctctccgccacgccccggccccatcttccaatgccgctctgtgattggtgaggcggccagccaaccttcgtagctattggccgaacggccgtcgctcttcctgccggggagtcgcctacgcctacttcctgccgggaggaggggctcgagttccgcgtcgtcgcgcagagctgactctgggaggcgtttgggcccagagaagtggatccgccgcttgcgccgcatggagtccgaatcggaaagcggggctgctgctgacacccccccactggagaccctaagcttccatggtgatgaagagattatcgaggtggtagaacttgatcccggtccgccggacccaggtgagaactgccgctcctcaggccatgggacaggagacgctcacccctggcctctgactcctgcttttccccgctcccctccacacccgactggtcattcctaccgatatccctcttcccctcctcccccactcccaccctcacacttagttctcaggcctggctggggtgggggttccctgacgcctcctctggcccttcccctcacacacccccttcccatcatccccttggccctcccttaccgcacggtctctggccagccgtggcctcccgtcctgtgtcccgcgcgcccccgcggaccccggtgtgtctgactccaccttcccttctcgccacatgacccgccccagcctcaggcctcctcatgcttctctccgtacctcttaccgcctcccgagccccatcttctaaccctctccccaaagcagatgacctggcccaggagatggaagatgtggactttgaggaagaagaggaggaagagggcaacgaagagggctgggttctagaaccccaggaaggggtggtcggcagcatggagggccccgacgatagcgaggtcacctttgcattgcactcaggtaggtctttgaggcgatccacctcaaatcagtttaggtgggcgtgtaagcattaaacatcagccatggacagaacgttatgggggacacagagatgggcaagatgctggccttgcgctggaggagcccacaggtgggaaagtgtggcagaatggatgattgcttggcttctggcatcagtcgagacaccctctactttgccagttaaccttgattaacctcttagttttcttttaaaaagttatctttggccgggcgtggtggctcactcctgaaatcccagcactttaggaggctgaggcaggtggatcacttgaggtcaggagttcgagaccagcctggccaacatggcaaaacccagtctctactaaaaatacaaaaatttggctgggcatggtggctcacgcctgtaatcccagcactttaggaggcccaggcaggcggatcacaaggtcgggagttccagaccagcctggccaatatggtgaaaccccgtctctactaaaaatacaaaaattagctgggcgtggtagcgggcgcctgtagtcccagctcctcgggaggttgaggcaggagaattgcttgaacccgggaggcggaggttgcagtggaccaagactgcgccattgcactccagcctgggcaacagaatgagagtctgtctccaaaaaaaaaaaaaaaaaaaaagttatctttgataaaagttaataaaagtagtgagtataaaattagagataattggccaggtgcggtggctcatgcctgtaatcacagcactttggaaggccaaggcgggtggatcacctgaggtcaggagttcaagaccagcctggccgacatggtgaaacctcatctctactaaaaataaaaaaaaaattagctgggtgtggtggcatgtgcctgtaatcccagctactccggaggctgaggaaggagaatcacttgaacctgggaggcagaggttgcactgagctgagattgtgccactgcgcttcggcctgggcgacagagcaagattccatctcaaaaaaataaaataaaatgagagataattatatctttttgagcatattttatataactttctcaagtgctagttcttagtaagaaactgttgccaggcacggtggctcatgcctgtaatcccagcactttgggaggccgaggcgggtggatcagaaggttaggagtt

SEQ ID NO: 96224 - DNA, 41735 bp, Homo sapiens
ggtatttgtttttcaacagttgatcccaaccataacatcgtggagggttttaattttggtggtagccctcacccaattctgtgtggctttctttgcagaggtaaagtaatctctatattttttctaggaagataaacaaattaaggatctcattttcagcaggtgcttattttctagagcaaccactttgatcccccaaaatgacagttattaagggtttattaaaatggtacatattcttttggaggaaaattttggggggaatgatttaaaattatttgaagtctgcatagaaatgttcttgatatcttatgcatagaaagcaaaacatgtatgaactctaattttgcttccatgaatgcactgtattgcacttttctaatattttcaacaatctagtaaagactagaccaggtgaccttccaaccctaaaacccaaagagactttttagagtgaagaactgccttccgcagggtttccataagaaagaggagaagccgttgcttattctagtcaattccttttcttgaaggtcttcctcttacggtgtttcttttctactcagtgtcactaaatgactttacccacttagtaagaggctcaagtattatctttgtaaaaggagagttcttttttgtaaaaggagagttttattttaactcatgtgctttaagactttttggaaaagggatcaaccaaattttaaaatatatatacacctcattatatatgtttaaaggggattccatttttgagactatgttttaataacccaaaagaagagaaaaatactacatgtatgaaggcacttatcataatattatctacagtggcaaaatattacattcaacttaagtgttgttgagatgctgtttttttaaatagctatacagcgatttgaggaaatgctagtcactaaaaatcattattaatcatattgtacctacgttcttcccataataaaataaaaatttttaaaggctaaagctacataaaaattgtttaccacagaaagtttagcataaataaaactgggatgcaaaatttgaccaatttcattactataaatggataaaaactgtgtgggcatgtgaacaaaagaaaactctcaaaaaatgaaaaccaataaacatttgatttctagagctcaacactttattcaacaaacgcttagacaccttttacatggcaggtggcaggtagcaaggctaatggtgatttttcttttcttcattttgagcacgttattgctgttaccatttcagtctgaggggaaaatcattctaagaaaatccctagccaggacttaaccaggaaatgtgtgaaaaggaaatgctggaagcttctggcagatttccgtgaaaacaagcaccctctagcttcttaagggcagaattccagaacttgggaaaggagaggtagatgcaacagcaatgagcacacctcagaggaaggcctggggaaaggaggtggctgtggtggccagcggcctggctgcagggggacctgcgcaataaattgattgttttcccatctgatttttcaggattccatccttcaaaatcatgaactctggctgttgatcaaaagagaatttggattctactctaaaagtcaatataggacttggcaaaagaagctagcagaagactcaacctggcctcccataaacaggacagattattcaggtgatggcaaaaatggattctacatcaacggaggctatgaaagccatgaacagattccaaaaagaaaactcaaattgggaggccaacccacagaacagcatttctgggccaggctgtaatcagaattgtcgtcgtacatgctcaacagcattgcttttttccccaaaattaacacattgtggagaagtgatgatactctccccttacctttcctctctccattcaagcattcaaagtatattttcaatgaattaaaccttgcagcaagggaccttagataggcttattctgactgtatgctttaccaatgagagaaaaaaatgcatttcctgtatcatccttttcaataaactgtattcattttgcatagcattattttgtttaaaatgagcagctgtcatggtactgtagtcaaattagtagtatgaacatcaatggaaaaaagaaaaattgaggcaacatttggtctttgaaagttttactattagttgtcacaagtttacttaaatctttgtgaagaacatttacatatatatcttttcccaaggtcacagttcctctttttgtttcactggtatgcttttcatagagaaacaaggaccaacatttacttcagaaattcaaccctttcggaaattcaaccctaactataataagccagaattgtgtggaagtggtagaatgaaggagatgtttgttaattccatataatcttggcatgggcacagttaatatataagcaaattccaccaaagtttggcatcactcagtgtatagtgtttaggggccagtgaacaggaaagtttagagtagatcacaaaggtaatgaaataaactgtaaaaagatacttttacttaaagaagcatagcaacatttactgcttgttactgacacatgaaaacctcaagcttttttttgagatggtgtctcgctctgtcacccaggctggagtgcagtggcacaattttggctcactgcaacctccgcctcccagattcaagcaattcccctgcctcagcctctcgagtagctgggatacaggcacccgctaccatgcccagataatgtttgtatttttagtaaagatggcgtttcaccatgttgtccaggctggtctcaaactcctgacctcaagtgattcacccacctcagcctcccaaagtgctaggattacacacgtgagccactgcacccagcctcaagctctaactttaaaagtcgtccagaactcaacattactcatcttaaaaacaatgctagaaaagggacttatatttgtaactgcagcatgacagttctcaggctactaaacaatcttaagttctatttcatcttttaattatctaaatcatcttactagatgcatattaaatagcacatgaaagggtgcatcctttacaaatatattctgtacactattaccttttatatatcaccctcaccataaacttgagagaaaatttatttctagtgaacattttaaattacctactggtctttccttataacgataaatctgattttgctaatttaacagaccataggcaattagttaaccagtttcattacatgagtgccaattatgtacctaataccatgatgtacggattcaatatatgatagccttgagtttacaattctgaaatctttaggaatgataaatgtttcaacatgaaattcgctactgtaaatcatattataaatgttacacaaaccaccagcataaatgcaaattcctataaaaacaatccctctgtgtttacattttgtttgctttttaaccttttcttgtattcacagctctctggagagtaataatttctacaatgtgtataatttagcagctactggtaacaagacaaaagttttaaaaagaagagatttttagtttatgattataaactatgtatcaaactaaaaaaatggtagttcaggttccttgagctgacatctgcatttagtaatttgacttttagaatgaaaagattcaattgatacactgtataatatttcaatagcataaaaagattttttaaaaaatagattcaataaagttataggctttttctccccccaggttttcctacaacctataaggtttctggtggataacgatctttatttcataatttttattcttagaatgtgataaagttgaactccattcctgactgttaaaaatatgctcagagaaaggtttaatagtcttgggaaaatcatttcataaaagcacaatgagcatgatatcaaataatcacctataggaaaaacaagctggacagtcttaagctggccatcatcaagagtaaccagttttatgggaaactgatggctaactttgtgagctaacctctaagggtgaaaactaccacaccctcaaacactaccaatgtgaacatgaatccatgaatttaatttaaaagtgcatttatgacattatctagcacagacaggactgtcttctggagtggagacatccagaattctccagaaaggctgcacttgaggctcttaggaggttcttgacttcaaattttgctccttctcccactggtgggtgtagtaattcccctgcttcgggttaagatttgccccgtgtaggcatcctttactgaaaagggtaccttgggaaaggtaacacattatgctactgccaggctcatcttaacttgacaatactagaaaactgggtttttttgttttgttttgttttgtttttgaggtggagtctcgctctgtcgtcgcccaggctggagtgcagtggagtgatctcggctcactgcaacctccgctcctgggttcacgccattctcctgcctcagcctcctgagtagctgggactgtaggcgcccgccaccacgcctggctaattttttgtatttttagtagagacggggtttcaccatgttaaccaggatggtcttgatctcctgacctcatgatccacctgcctcggcctcccaaagtgctgggattacaggtgtgagccaccgcacctggcctgttattgtggtttttaactattacttgggaacaaggcataaaaggaacagagacttgaatttagagtaaaaatgaaagagaaattttctctcattagttcctggtaggagacactcacacccccacagaagaccagtggaagaagagagtctttgagggttactggagacagagttgatgccataagaaagggagggaattattgaaaaagaagggacgagatatagggtctctgtggcctggactgcagcacacaactccttccattaccattattattaaccctgcagttagcttgttgagtatttctggccctggggtaaaatctaaatcagtttaataggtacaagactttcaccgagtcctctgttcagttacattatgtactgtattcctagctttctcactgtatcaaccccctaatattaacttgaacatttcctttatttaatgccaagcttttgatgatagcataagacggatgtcattggctggtggtgtagtttatggggtcatgttacaatgtctgatgtaatcctaggttagagagagctgcactccccctttctccacctgctgcaaccaagaatttcactggagcagcataaaaagcagtgtctttaattcaacacataataaaatgagagaataaaattatgacattccttggcttgtaaaaaagtcttaaaaatatgagatattgttttccaaatatggcattttaaacaaacatttaatgattgcttctcaaggttaaaaggtcaaatccctgaaacacttcaaaatccaaagggaataatatgtaacactgtagaaataacagcccactcttacttgtcatgtcctcctgacaagcaagtagattccacacaaatcaccggaactgaaaccctggagcaaacagcctctcctcttcccatccaccctcatctacacaggcaggaagaagatgagggtgcattccccaaaaggcttgtaaattagagtccctcaaactgcctaaccaaaatgctaaatttcccagtttcttttccaacaagaaaagaaacatgaatttggatgtcaactcttaacaatctggggttcttaaaatttctttcaaaaccatatataaatagtctttcatgcctctggcaaaatggccacccttggggaaaaggaaaataatatttatagtagaaataaaatgtgatgagattttgttaagatcttctgctggctcactcaaaagactactgcttctccgttcaagctgccacagtacatctatgctagcaggggaaaaaaatttcattggctcaatgataagataatatcagtaagcaatttattaaagagtctgccatccatcataggaatctggaacagtaatgatgcactgaaaataagtattcaccccaggtttcttttcctcctcccaaattccttcaatatcaatatctctttggtaaattgttaatagtattttgctctttgtccttttggaaacaagcccaggaatgagaagacaccaacagcagctgtcacaaactcaacggtacttatcgctcggttggcctataaggaaacaagaagtaaacaaaaaacacatcatattctaaagacatctgtgtcctaaatgaagctttagcctgtttcctaaactgaacacctgttttaatgtacaatggatacatctaaagtacaatgcaaaattaaaattctgcataaagatgaagaaataaatttataatttgtataattatgtcaaagatgtagatacgtacacatgggtatatattcctcatatttttaaagcactctgacagtttataaactaattatgaacacagttcccattcatcataatagtacactggtgaaagaggttaatataccactcttgttttgcaaaacttgggatatcataagtagtttgcctgagatcattccacgaagatgtttaaagataggctgagtcttctgaaacacacgttcttctcctatgcagctcctgccccttaaataaacactttggattggttgggtctacaccaaagtaagtatcgtgtaagagtgtgtgtgtgtgtgtgtgtgtgtgtgtgtgtgtgtttcagggatgtcaaatagcaaataattcagggatgtcatctgagctaaatacacataagctcttatttggtagacacaatttcttttctgataaacaaatttcaaaaaaagccaatactgatgttaactatcatgtcaaaaattaatttctcatgtagacaaaccactctcaagatcaactgtccataaaggaattcagacatttatagctttaagggtattaatcatcatgatgatgagagaactaatgaatattcatggtattcttggcactcaactaatattgccttccattcaaatgggtttgagtgcaatttgatgacccaaaggtcacattcggacacttcagaattatcaagtactctgaaaacatatttgttctctctgggattgaagaatcaggtctttcaaataaagcaaaatatttttcccaaatgactctggggaaccagtctaagagctggaaagcctaacccaggtcatatttgagcatgccctctgtctaaccacagccttccaccgtggaacctgccacccacgtattactgcaacacaatgctacctccctaactgcagcttccctgttaggaacaggcacaagggccagggccaggaaagagggacacaacagaastcttggctccatgtgtttgcagcatgtgttcattccactacaccatcctgtggtgggcagagactaggcctgtaattgtggcccactgtctctgctccaacccccagatgccagggagaatggtaagggcaaacaacttggcactaaccctgaaaaatcctgttttactttataattttgattttatttgatttcttatctattttatttatattttaatccttacctaaactatttcctaagagataatcagaattcactgtagcacagagccacccatatgccatattgggggagcgggggagaagaggcagggagatgcaggatataagataaaatcccaaagaagaggaagagtcactaattagacagggatcaagcccaaccctagtacaattccagcagatagtgagatcccaagaaggtctaatagagagaaatggggtagtcaataaaaaaaaaatgaaggtgcaatcagtgtctttaaacagaggtgtcaaatggtagcagggtacggcccttggaaaatggcaggatcctatagatggtgtggccccagctagatgcagacctaactgactaggtatctttcagccactagaaacacaagatgttaatgaaagctgacaaatttaagaggcctggttgggggatgggcaacctgatcccaaaccaaaatccctagagatgacaaaggycagatatcatgatcataaagccactttaagcagtgccactttaagacagcttccccaattccaaatgttcatttatttcaagtctcattctagataatgaatctcatgtaattgggacaacccactggagttaggagtaatgggatgtgatgtgcaagattacaacatctcaggatgttcttggtgaaccaacatgaacaagaacttttacttcacggcttactttggattataaggtcaccaaatccaactctgcattctttatcctttagagggctttctgtccatgggccataataaaggcctcgttctggggatctgtacctggcctaatgaaacattagctgaacctggagtggctgtgtctagacagcagtatagcggggacacagacgtgtggcaggtttatcaaaacgctctttcctaaggcctcgtaaggctgcagtcatatgcaccgaagcaccatcaggatgtgttcctgtgttgccttgtccaggcctactgaagagtgtgggccatctttgacaaagatagagatattttcataatttggtctatgagagtaaagtatgttcttagaaattttgaaaaatacataaaagataagacacaaactgagagaaaacaactgtaaaagacaaatctgataaaagtgttttctaaaatatataaagaactcttgaaattcaacaataggaaaatgaacagctgaattaaaaagtaggcaaggtcatcaagagatacatcatcaaagatgatatgcaaagaagcatataaaagatgctcaaaattacatgtaactaggcaactgcaaactgaaacaagatgcctattaaaatggttaaaattcaaaatactgataacatcaaatgctggcaaggatgtggaacaagaactctcattgctgagagtgcaaaatgtgaaaagatacattcattcaggaagatagtttggcagtgtcttacaaaactaagaatattctaaccatatgatctagcaatcatgctccttggtacttacccaaaggagctgaatacttatgtccacataaaaacctgcacatggaggtttatagaggctttattcataattgccaaaacttcgaagcaaccaagacgtccttcagtgggtgaatggataaataaggtgtggtaaatcaaggaaatggaatatcattcagtgctaaaaagaaatgaggaatcaagccacaaaagtacatgaagaaaccttaaatacatattattacatgaaagaagccaatctgaaaaaagccacatactacatgatttcagcaacatgatattctgcaaatgggaaaactatggagatggtaaaaaaaaaatcaatggttgtcagggatttgcagggaaggaaggatgaataggtggagcacaggagttttagggcaggaaaattattatttataatactataataatggattgtgtcattttaaatttgtccaaaccatagaattcgtaacataaccagcgaaccctaatgtaaactatggactttrgttgataatgatgtattaatgttggttcatcaattttcacaatggtatggtaatgatgtgacatattgatgaaggagatggctatactgggtggggaaggaggagagagttctatactttcagcttaattttgctatgaagctaaaaactgctctagaaaattgaatctattatttttttcaaatacagaaaagcacaaagaagaaaaaaagatgaaatcataatcctacccttctcaccttttttatgcattactagtttttaaacttgggaaatacatagccattcccaagaaaacatttctaagctcaagggccctaagcttaaagggattcaaaaaactaatctaatattagctattattagtagtaatactattagttattkatagtaatatataatccagttgctgctagatcaagattttattgactatgctaacaacgatctataaaattcccggatactgttatgaaaagtaatatccactatgggcatgctatttattgggatggataatacataatacagtatgctgagagacctcaaatatctccataatctttcaaacgatctgtgttgattagaagactgataaacagtgggttcaaggacactccactaataatggtgatgatggcattctcactgaggtctgtgaacacgaaagcttaggtagactcttaaggctgtcactgcatcatcttcatcagaacctgccagagacaggttcttactatttgttgaagaaaaattaatttttcatgggtcttgggtctagatgtgaaaggtgaaatgatgatagattgcaaattatagtcaaataagaagatggctctaatctctttttatttaacattttaaaaaatttgcttatttgtaaccactttactgaagactgacatgcaaaaagctgtagatatttaatgtgttcaacttgatgtatttggagataagcatacccccatgaaaccatcattacaatcaatgccataaacttatccatcacctccaccatgaaaccatcatcacaatcaatgccataaacttatccatcacctccaaaagcttccgcccactccctttgttggtttgtgctaagaatacttaacataagatctaacctcttagcaaattttaaagtaggcaacatagtatcattaatcataggccctatgttgtacagcacatcttcagaacttgtcttgcgtaactgaaattttctaccctttgactaacatctcctcatttccaaaaataaaataagtaaacaaataaaaattgcttggttagtgcagtgaacaacttygtcattaacaaagaagaagaggaatggaacctatttcctatctacaccactaattttcaacgcaaaagtgagcaggaatttgtgtgtaccctctatgttctagctcaaaagcaatttattgttacatgtgagcagaacattcattatgttaatacatttcctaatgagaatgaatttccaattatttcctaatgaaaataaatatatcctttcattatgttctatctcccattttcccaaacctttttatttaaaaaaaaattttgagatctaattagcacaccatatatttacccactgaaataatgtagttcaatgttttttagtatattcatagacttgtgcaacaatcacaattttgaaacayttcatcattccaaaaagatacctcttaccctttagcagtctcccctgatttacctcaaccacctcagccccaggcaaccastaatttattttgtctctatagatttccctattctaggcatctcatatcgatgaaataatataatatgtagtctcttgtgattggctaagtaggcaacttggcataatgttttcaaggtccatactgtagcatgtatgagtacttcatttctttttattattgaaagatattacattgtatggatataccccattttgtctatccattgcccattagatggatatttgagttatttctacaatgctgctataaacattcatgtgcaggtttccacgtggacatgtgtttcatttatcttggatatatacctaggattacaatagctgagtcatacagtaattctacatttaattttagaggaattgccagaatggtttccaaagcagttatatcattttacatgcctaccagaagggcaagagagttccaatttcttcacttccttgccaacacttactatcttttgtattatagcaatcrtattgagtgtgaagcgaaatctcattgtggctttgatttgcatttccctgatgaaaaatatgtattctagatacgtatctaaaaagagtccagtatccaaagtacataaagaaaacttactactgaacaatraaaaggcaaataatccaatttaaaaacgggcaaataggctgggcacggtggctcacgcctgtaatcccagcgctgtgggaggccaaggcgggtggatcacgaggtcaggagtttgagaccagcctggccaacatgagaccagcctagccaacatagtctctactaaaaatacaaaaaattagctaggcatagtggcagatgcctgtaatcccagctacttgggaggctgaagcaggagaatagcctgaacccaggaggcggaggttgcagtgagctgagatcgtgccactgcactccagcctggacaacagagcaaggctccatctaaaaaaaaaaagaagaagaagaagaaacaaccaacaacaacaaaaaaatgggcaaataatcttaataggcatttctccaaaggtgatatacgaatggccaataagcacataaattgatgcccaacatcattagccatcaggaaaatgcaaatcaaaaccacaataaatttgaatcttgggtatagggcasgataagtaggattttgaaaaattaggctcaagaggtgcagcgtttaaataacacgaggctttgctagccttcttatagatgacatttttccaagcttttgtgagaagaattataacctcatttcttacttaggatagaaatgtataactgatccaccatttcaaaatactggaagtcttcaataaatgtgaattattaaaatattatggtattatccttcaaatttttagttgccttttaaaaagttttcataggtaacaactccctggagttcaatctattaaattatttttcatattttaatattttaaatgaacacttttatatgtattttggatgaagaggactttcttttgataatagttttatatatccattctcttttatcaccttaatattcatttttagtttactggactggtgggacaacaggacaacaggtagggaaaagacgaacatgctgttagctagaaatctgtcatactacaaaacaatggtagtaactgacaaaaattgtaaagtactttaaaaataaagtcaattaatctatcaaaagtcatccaaaagctcagtgaatcaaaggatctacttaaaggcacaaaatttcattgaaattagcaattgcaaggaaaaagaaaacattcacaagcccactaagatatgtcattagttagcctctgtccaccaatgaaaaataatttaagaataaccatttgtgatactggtaaataaactcccattcaaaaagctcaacatcctttctagcatattcttttcagtatatgagatcaccaatttgaaactgctgtatggtgaagtaacaggaaaaaaagactaaaggcagtaagattgacagaatgctattgtcttgattctacttcaagtcccttatagctcaaaattcataatattcatgttttagtctcagtttggttattaacttgttgcaggaccttggacaactcaagtccattctctatccttcagtattctcgtattttctggttcttttcatttggtttgaggcctgggaaccttatcatagccaatagttattcttttctcaatgtaagaatatctcctaaagaaaacttacctgctctgaaactccttctccatagcgaagcaatgtcacaaaatgttcacagttgttgacaagtaagttataggccacctcctgtccaattacaaactctgaycgctttatgatttcttccacagggagaggggggtacgtttcatcgtatttattgtttattctgtatgtgtcatttcccacaacatccttcaagagctgcattttcaccagggccttactgctgaatacagacttggcrcttgtaaaggacgcaggaatgccatctataaagtagaattctggttagtaaggtatagtgacccagtccaatgaactctactgccatctaaagactttggaaatgctggcatgtctaaacctagccctgttcctaacttattatcaaaccaaagtcatttaatctcatcagccttaagcagttattctataacttagcagtaacacttactattgtatgagtgagaatataagaaaaactttttgaaaatgtttgatgttcccatagaacaaattggatgagaatacgctactcatccttggaaaataaattctctgtagattggtattatattattagagatgttggtatgtgtgtctaacatagatacagataagattattgtccactttttctataaggcagttttttgctgagcatctgaacccttccaaattaatactgtagggtacactgttattagtaggctcatcctagtatctaagctccctaagcgtctgaaacttgtttttcaactaggcatcaatttggggtccaatttcctattccgaaacccgcatggtacctcagtcctgtgataggatggctgaagtcaggctggggccctgcttttttcctgccagttcctttggccagaaaaaaaaaaaaaaaaagccccctaagtcctgagcctgaagctaacttggtaggcactgtctaccagacatggccccaggcagtgacctacccacttacgacaatgccccatgccctaccactccaccttggctgcctctgctcataagcatttgcctagtctgccaggaactactatatctttggcctgacaatgtcagtacttgaggttggacagatgattcctcagggtacaggtctaaagccaggctccagtccttgtcaaactgcccacaactgctgtgcttggccatgttcaggtcaatcatgagagagagtctccacataactagtgtttagaaactttctcttttagtaatgactgaaagcaaaacttattttccactatccttctgtccgtcctccttctcacggaatgtgagatgttccagtgaacatcttacacattgcaagttctcacacattacaagtcctcagagcatatatatcccagttagacttactaaacatatttttaataaccccatgcaaaaattagaaaattaaaatttggagaggtaaactggcttggaaaatgtatcacagtagttaacaacataattgaatatcaatctacaggatcaaacctgaacgctcaaaccacaataatatggaatttaaggcatgataataagaaaacagcatgaaaatctcatattattttccaggtatgaaaactgcagagataatgtagatgtagagggttgcttagtattaaccactagactctggaagctctgaatcataaatatcattttatttgtcattttcacttatartattctaaaacaagaggcaaatactttaaaatgttgcaaaaaaccacttcattaaaaagtctcagaagttcccaagataataaaacttaggtctataaatacttctctttaaacataacctgaggaaaatactccaggttatttatttgttatctgcatacactttttttttttttatggagtcttgctttgttgcccaggctggagtgtagtggcccaatctcagctcactgcaacctccacctcctaggctcaagtgattctcctgcctcagcctcctgagtagctagaattgcaggtgcctgccaccacacctggctaatttttgtattttttgtagagacagggtttcgtcatgttggccaggctggtcttgaactcctgacctcaactgatctgcctgccttggcctaccaaagtactggattacaggcgtgacccagcacgcctggtctgcatacactttttgttaataaattaatttgtgctcatttttaaacatttataaaatacagaaaaacaaagcatttaaatgtatacaggaatcacccattatcccaccacccagaagtaactgctagtaatattttgaataagactgattctatgtccttcctatgcaaataatgctgtgatgaacattcaagtacatgtgtcttcttggtagaataatttattttcctttggatatatatgcagtaataggattgctggatcaaatggtagttctcttttaagctctttgataaatctccaatctgctttccacagtggctgaactaatttacattcccaccaacagtgtataaacatttccttttctctgcaacatcaccagcatctgtttttttttttgactttttaataatcaccattctgactgatgtgagatggtatctcattgtggttttgatttgcatttctatgattagtgatgatgagcattgtttcataggtttgttggttgcctgaatgtcttcttttcagaagtgtctgttcctgtctttgcccattttttaattagattattttttacatgttgattaatttaaattccttgtaaattctgggcactagacttttgtcagatgcacagtttatgaatattttctcccattctgtagactatttactctgttgataatttcttttgctgtgcagaagctcttttgtttacttaggtctcactcgtcatttttgttcttgttgcaattcattttggagacttagacataaattatttgccaaagctgaggtcaagaagagtgtttcctaggttttcttctgggacttttatagtttgagttcttcatttaaacttttagtccatcttgagtaaatttttgtacatagtgaaaggcagaggtccagttttttttcttatgcatatggctagccagttattccagcaccatttattgaataggaagacctttccccattgcttatttttgttgaatttgttgaagatcagatggttttatgtgcttggctttatttctgggttctctattctgttcccttggtctgtgtgtctgtttttgtaccagtactatgatgttttggttactatagccttctagtagagtttgaagttgggtaatgtgcctgcagcttttttttagtttttgctacttgggctcttttttggttccatacaaattttagaatattttttctaattctgtgaagaatggcattggtagcttgatagaaatagtgttgaatctgtagattgctttgggcaatatgaacattttaatattatttcttccaatccgtgagcatggaatgtttttccatctatttgtctcatctctgatttcttttagcagtgttttatagttctccttgtagagatctttcaccttcttggttggatgtattcctaggtattttatttatttgtggctattgtaaatgaattgtgtttttaatatggctctcagctagaatgttactggtgtataaaaatgctactgatttttgtacactgattttgtatcctaaaaatttactgaagttgtttatcagttccaggaggcttctggtggagtctgtagggctttctaggtacagaatgaaatattcagcaaaaagaggtaatttgacttactcttttcctatttggatgccttttatttctttctcttgcctcactgctctggctagaacttccagtactatgttgaacaggaatagtgtgagtgaacacccttatcttgcttcagttctgaaggggaatggcccattcagtatgatgttggctgtgggtgtctcataaatgattcattattttgaggttatgttccttcaatgcctattctcttcagggtttttaacatgaagggatgttgtgtttaatcaaatgcatctattgagatgatcatatggtttttggttttcacttggtttatgtggtgaatcatatttatggatttgtgtatgtcgaaccaatcttgtacctcaggaataaagccttcttgattatgaattaactttttgatgtgcrccaaatttggtttgttggtcttttgttgaggatttttgcatctatgttcatcaggaatactggcctgaagttttctttttttgtgtgtctctccgattttggtatcaggatgatgctagtttcatagaatgagttaggaaggagcccctcctcctggggtttttggagtagtttcagtaggattggtaccagttctttgtacacctcctggaatttggctgtgaatccatctgctccagggcttttttcggttggtagtttttttattattattattgttactgattcaattttggaacttgttattggtcttctcaggttttcacttttttcctggttcaatgttgaaaggttgtatgtttcaaaatttgtccatttcctctaaattttctaaattgtattatagaagtgttcataatagtctctagggaccttctgtatttctgtaggactggttataatgtcatttttgtcatttccgattgtacttctttggatcttttttcctttgttaatttagatagcaatctatcaatcttgtttatcctttcaaaaaacaaattctttgttttgttaattttgcatggatttttgtatctccatttctttcagtttttctccaattttagatttattttgtcctgctagcttggggttggtctgttcttttcttcctagttccactatgtgcaatattaggctgttaatctgagctccttctaacttcttaatgacagtgcttagtgctataaactttccttttaacattgatttaggcgcatcccaaagattttggtaagttgtgtctctattttcattaatttcaaataactttttgatttctgccctcatttcattttccacctgtattcttcaggggtctctagaggggcaggactaataggatagatgtatatatgaaagggagtttattaaggagtattgactcacacgatcacaaggtgaagtcccacaataggccatctgcaagtggagcagcaaggaagccagtccgagtcccaaaatctcaaaagtaggtaagctgacagtgaagccttcagtctgtggccaaaggcctgagagtccctggcaaaccactggtgtaggtccaagaatccaaaagcttaagaacttggagtcggatgttcaagggcaggaagcatccagcatgggagaaagatggaggccagaagacttagccagtgtaatttttccacgttcctctgcctgcttttatcctagcctcactggcagctgattagatggtgcccacccagattgagggtgggtctgtctctcctagcccactgactcaaatgttagtctcctttggcaacaccctcacagacacacccaggaacaatactttgcatccttcaatccaatcatgttgacactagatattaagcatcactcatcgatattgaggaccaagctgtttaatttccatgtttttgtatagttttgagaaatcttctttgtattcatttctgtttttattgcactgtggttcaagagtgtgcttggtatgatttcagtttttttgactttattgagacttgctttatgactaagcatgtggttaatctttttcaaataaatatcatattaagaccatcttccctgcaataaaacatgtccagatataagacttttaatggctgttatggatgctgttatttatatctatccagcaccaaatcccaccattgcctatttattcctggaaacaattgtgtctgagccaatcacagtattccattctcttgggcacagtgatagtccagcgatgaacatggggctcacactggaatgattggagtctgtctccgtgattctttaactgtaacaggtagttacagttagctctttcgtgttggatcaaaagaacctaagagtcagaacctaaagctgcttatggtcatcagtttagttttttaaagagacatagtccgggaaaatgaagacagcacatagaaaaaaatgcagatgtgtgacagagagtctaaatagtggttaaacccctaaatataggcatctctgaggccggcaccacctcagctctttctgcagtttccctccatgatgcaaygaagatttctcagtaaagaatatttgataactaatatcatatggctaaatcttaattcatttaaccattcccctattgaaaatatgccattgtctactttaaccattataaatgacacagaagtgaatatccttayacagaaatgcttgtctacatctctaaatatttccccagaatagattcctagaagtacaattacagggtcagaggatacgaacccttttaaggtcctagcccttatcaatttatattaccatcaacaatacctttatgttcatttcactatattcttatcaacactgatcgttatcacttarcctttgctaatgagataggtatgaaatattttattggtttattttacaattcctaggccagaaagttgaaattttttcaaaaggtgtattagcttttgcttttcttcttttacaaactrttcctaattctttatccatttgtttgttgaggttttagtgtctgctgtccccttgacctgggatactatatctctagagagcatctgaccggtttctttacctcttttacatttttcctcaaatgtcactttcttaagaaattttcctgaccacttcatttaaaatcacagcatctgcacccaccaccttctgccctcagcrcttctcatcctaccttcttattttttctgtatcacttatcacaattttaacatttctgtaacttgctcatggtctgtccctgcttactaaaatgtaaactccaccatgcagggagacgtctgtatacccccagcacttagaatagcattcagaacatactaggtgatctataaataggtgttgaataaattgaaataacctatttgtgtgaaacataaagacactgaaccttgccatgtttgtggcaaatattttccccagctggttatttactttttaattgtgattttttaaatccagaggttttaaaatttcatgtgaattggcctttgtgatttcttcaatgctgctttggttttagaatatccttctctaaacctagattagttggatttatctgctttctatattttatttcgattttgttttgtttattatttcacccatgattacttcctgtaacaagaacactaaaactttgctcccaggagccactggaaataaacctcacctacaggtgctatgttgataacgtaaccatcacccaagtacagggcccagtgctgatagccaggacggaacacttcgatcaagtcccctgggcaggggttgccagggtagttcaaactgaagcaatcattaaacgccatctgcaatgacaaatacaaagaagagctagctaatacaacttgccaaaagaaaatcagtttaagacatccataaaagcagaatgatacagaatttattgagactgcattctatattaaagacttagaatcacgaccctgtccttttctttgaatgattccaacactgatgtgtgcacaaggggacaagtagagaaataatttgtcttgtattacttaattttctatagtaatgcttctcatcccgatcaatttcagagcccctttataataacaagcattctgtaattttctctttaaatctagaaatccctggataatataacttacacagattttaaaaatatcaaggattaaatattaaaaaatggtctatttaggataaaaaggggaaataggaaagtaaayatataatatctgtttactaagtaaatgttcagtctatgactatactaaaggatataaaaaagggtttatatgcttgcacttatttagcatgaaaaagtcagaattcaggagcaataaaatcagatcagaagtctttcaaccttttatacagcagtatagtaaaatcaagaagcagaggtaggggtggatgctaacatttaatattttgtgagtactaaaactctgcaaaaatgccatatattacaaaacctactctgtcatttcatttaagcaaagttgggttccaggctcagatggatgtccagccagatgttcaaattaatgtaggacatggaacatttctttcttgtttaaaactatactgtgtagtgtagcatgtataggtactctggtttgcacccactaaatatcagtaaatgccctttgtcattgtaacaatcataaatgccatcacagattttcatgactctccttcctgccccatttattgtcagattcctcacttaccgattccagaagccatgctaggtggtcaacagcagacgcaggacaacttggaaagctggggagttcatcacattgatgaacatgtttgaaattctaagtttggtaattttttttaagtcaatactttttagaaagaacacataagtatctgacagttgattcttatgaaaggttatattttctatgtatggaatagaagtagaatgactcagcaagaggagattatgtacatctatcaacaaacaaaggaggatttaaatgctgtatctatgttgaatctctaattgacaacagggtgttcctcatcatttcactctaatgcagatatatatgctcatttatgaaacaaatccacatgccagaaatagaaacttccaaatcatctaaattataatagcagagactaaggacttgggaatacagactatcatttttctggcactctaaaagtcttttttataacaattaatgttagaagggtgttttcccaagtgtttgtatgccatctgttgaaaagttcaatcatcacactgtcacagaaacgtggccaaatgtaagctgyccatctgttgaaaaacaactattaaaacaactttatgaaaacgattaagtctaaccaccctctcaaatatgtttgcatcttattaatatggcagttcgtaatttggccacatgggtattaaaaggaaaaatagataatacactgtgatataaacaaacacatttcccatgaataggaatcagcaaacacacaaagctgcctgctatgattccgagatgcagccaaagtataaaataataaccaccatttgaacggggagcactttctagtgcaattttttttcaaatgcactatctctaccctatttaattgaaaaaaagaaaaaacatgcaactatttgagtgtgttatgttatcatcccactttatagataaaaagctaaagtagcaaatatcaacttttggaaaatacccactgaaaccctaatatataaaacaaagggaaaataacttgactaggtgttactgatgtgagctcttctcttagtcttctacttgatacttgttagttctctaactttgggcaggtcactggaacttagtctgtttcctcatgttgaaaataggtatgggcatataagcctgattttgtttatctcaaaaagctgctgcaagtaacccttagggagctggtaaaaagctgtcgcaagtaaccctttgggagctgataaaaaaactgttgcaaatgccctgtgaattggcaagagccagacaggtggatgataagagagacattgagattggtacatggtttatgtaggattttagttccttatgctctcttccaggcatgataattctgtgaaataaatgattcaactgtaaaattctaatatatttaacaaattttcaatttgacatataaattgattcataaactgttaagttaattgatttcataaagtctatcatatttataaagagaaataagatttcataagagtaacccctcaagatactaacagaggaagctgaaggctaatatgcaacttaaaaagtgagttatgatactgaacacttagaatcatagcaagggactacagaaaggtacttcagatattatctaatctaatggtctccaaacttgtttgcagcagtgggtaccatgtcaaaacacatatcaaatagaaccataaaaatataaaacctaaaaagcagcactgccctgaatgaagtcagggacaacatgagagccctactcaccgctcacccacattgctgctcctattaggcttcctgggaccccagaacttccaggaatgcagcttaaatgatacccatctagtcctagtccaatctcctcatttttagacaaaggaaacaaaaccaggcaggtagtttaactggtcaaggtcatacactattatataaaagatttttgacaattggtgctgaaacaattagacatccatagacaaacaaataaacaaaccttgacctaaatttcatacttcatacaaaaattatttcaaaatggataacagacttatatgtaaaactataaaatatagagaaaaacataggagaaaaatttttagggtctagggtagacaaagagttcccagacttgataccaaaagtatgatccttaccaggaaaaattggtaaattgattgtccttaagattaaaaacttttgtactacaaaagatcctgttaagatgaaaagacagactacagagtgggcgaaaatatttgcaaaccacatatctgtgaaaggactagtatctagaacatataaaggactcctcaaactcaacaataaaaaagcaaacaatacaattagaatgtaggttatatggtttggatatttatcactgccaaatatcatgttgaaatgtaatccccagtgttggaggtggggtctggtgggaagcatgtggatcatgggagtggatccctcatgaatggctaatgccaaccccttggtgatgactgagttcacaagagatctggttgtttaaaagagtgtggtgcctcccaccgccccttgttcccattctcatcgagtacacctggtcccccattgcattccaccatgattgtaagcttcctgagaccctcaccagaagcagataccagcaccatgcatcctgtacgccctatggagctgtgagccaattaaatctcttttccttatacattacgcagtctcaaatattcctttatagtaatgcaaacagactaatttcaccaaagaaaatacatagatgtcaaggaagccattagtcattaggaaaatgcaaaattaaaaccacaataaggggacctcagcaaaatggtgtaataggaggctccctaactatcccttctcctacaaacacactaaggaaacacctacacacagatcaattatctccaaaagaaaggcagaatccagctgaaagactcctacacactagacaaagaagaaaatatccacatcaaaattggtagaaaaagtggagatacactcatttacaaaccccaccctatgcacagagccttataatcaggaagggaacccaactcctagcatggtcccaaggagtgaggggcttctgtcttacacctaatgttcaacttttaccatccctttaaaagggcttggctcttaaatcactgtgtctgaaaaatagtatggaaaaggcattggaggatttccctcaagcacgaaaaacaaagtgaggtttcacaccttgcaagctctgtcagctgctgtagtgcccagaatcagcccagcttccaatctctccctggaaagggtttggctatgttcttttccagtagttcagtgtggttctggtctgtaatacaccggtatctgggagcctatatagcaaaaaaagaataaacctcttcaagcctaaacaaggacaacattcccaccttctttccttagtttgttctagtgacaattccagccctacaatttctcaaggaaaagaggctggaggcctctgccagcaagaacatgctttcttgcctggtttgctcctgagataaatttctgcaatctctcatgagagtgaagctgggggatctctccatgcctgagaagcaaaaagggcattcctgtatctttttccctggcttgcttctgtgataactccagactagaagactccacctgcaaaaaagatcgagacttcttgcttgaacaggagataggcactcactgcacttctttcccctgctcgctccagcaacaatccagcccagagatctctctgttgaaagaaactgggagacctctgccaacaagaatgggagggatggcactcycaaacctttycccttgacttgccctggaaataaactcctttaatctccaattggaaaaaggtgcgggggtgggggggatagggcagggcaggggcttcttcatgtctgaaagggaaagtgggcactccttgcaccttcccctatggcttgctttagtaataactctagaccagaagtttctccctgccaggagggtgtgagatttctgcttgttcagacaggagagcagtcactccctctacacctttttctctggcttgtgccagcaagaaatccagatctgcagactttctccagaagtagtytccatacacacggagtgctcttttatagccttcacccaagagacaggctcctagtctgggagttgacagagttcttcatttttgagtctcgtagacaacaaagaacaaaaacgtggctttttaacttgaaaatgttcagcagcaatctctccaggtccaatgtgagcagtctatcaagagtataagcatccgcctcagacattctccttggtatagggcagaatgagtgggagattaaactctgctcaaagcttctctgcaaagaaaaaagaaactggaacacacaactaacacctcagtctctccagcttcatttcaagggactggcttctatcccacctctcataggcaatgacttgaaactttaatttgggttggcggtgggggacaataagaataaaaaatagcagattttacaagcacaaagaggttagtggattctaacaatctttgaagaggctgattggaaaggaacatctcctacacaagaccagtctagcaagactgagaaaggtggttcttttatctaatgtgcagaaaacaacatagggaacggaggaaaatgaagaaacatagaaatatgttccaaataaaataacaagataaattaaatctccagaaagtgactctaatgaaatgtaaatatgtgatttatctgacagggaattcaaaagggcagtcataacaatttttattgaggtagggaaagcaatgcatgaaaaaactgggaacttcaacgatgagacagaaaatattaaaaagtaccaaacaaaccatcaagctgaataataatataactgaaatgaaaaaaccaataaggaggttcaacagtagaataaatcaagcagaagtaagaattagcaaacttgaatacgggtcattggtaaatcataatttgaggatttttaaagaaaaaagaatgaaaaagagtgaaacagcctaacagccttagtggacagcattaaacagaatatgtgaattattgttgtacaagaaagggaagagagaaagggacagaaaatatattcaaagacatatagcaagtcctcatttaatgtcactgatagatccttggaaactgacttaaagcaaaacaacatataatgaaaggaatttttttctcatcaacataatgaaatgacattgagtaaaatgatgttattcaaaagctgctataaatcattttggttaaagttgcagtttccaagaacctatgaacattaaacaagaatctactgcaattgcgaaaaccttcctaagtgtagggaaggaaacagaaatccagaagcttgacaaacatctaacaggatgaatccaaggcaaaccaaatcaagatacattataatcaaattgtggaaagttaaagacaaagagaagataggaaagctgtaagggaaaagcaacttgttacataaaaggggacccccatcagatctttcaacagaaaccctgcagggtagaagggaataagatatggtcaaagagctaaaagaaaaaaaaccctgccaaccaagaatactacactcagcaatcctgtccttcaaaaaggaagagaagaaggggagctttaaaaaaaactttctcagataaacaaaagctgagggaatttatcacaactagacctgccttacaagaaatactaaaatgggcacttcacattgaaggaaaatatcactaagtagcaacatggaaatacataaaaataaaaactcactggtaaaagtaagtatatagtcaaacacagaacacttgtactgtaattgtagtatgaaaataaattatatctctaatataaaggttaaaagaagaaaaactattcaaaacacatatagcaactatactttgctaatggacatgccaaaaactatttaaaaattgtcaataaaaacaaattgttggaggggatagtaaaagtttagagtttgtacaagtgatcaaagtgaagtaattataagcttaaaatagcttgtcattagtataagacgttttatgtaagcctcctagtaaccacaaaggaaaaattcttagtagatacacaaaagataaaaagaaagaattcaaagcataccactacaaaaaatcattaaattgcaaaggaagcaagcaagagaggaaaacagaaaacaaaagatctacaaattaaccagaaaacaacaaaacaccaatagtaagttcttacctaccaataattactttgaatgtaagtgtattaaattctccagtcaaaacatattgaatggttcaatggattaaaaaaaaagacccaactatatgctgcctacaatagattaacttcacctctcttaacctttaagaacacatataagctgataatgaagggatgaaaaaagatattccacacaaatggaaaccaacacaaagtgggagtagctatacttctatcagacaaaatagactgtaagtgaaaaactgcagaaagatatgaaaagttattatataatgatgaaggggtcaattcataaagaaaatataacaattatatatgcacccaatatcaaagcaccgaatacataaagcaaatattaatagatctgatgagagacatggactgcaatacaataatgtcccgctttcaacattggacagatctagaccaaaaatcaacaaggaaatattgaacttgaactatactttaagccaaatggacctaacaaatatttacagaaaacttcatccaacaacaattgaatatacatttttctcaattgcacatggagtattctccagggtagatcatatgrtatatcacaaagcaaatctcaacaaatttaagaagactgaaatcttatcaagtatttcttctgaccacaatggcacaaacctagaaatcaataacaggaggaatcttggaaaactctatgtggaaattaaataacatgcccttcaacaaccaatgagtcaaataaaaaattaaaaggaaaatttaaaaatatcttgagacaaaaaaaagaggaaactgatattgatgcaggattttttactccttagctcagctaggtctgggctcttgtctcatgaccaggaataattaggcacgcagacacttgaagagtgactggagtagaatttattaagcaaaaggaatgttctcagcaaagagaggggtcctgaaagcaggttagtcattgccccctcagagctgaatacaagggctttatatataacctgatgaggctgagctccctatctgtataaggcgtgaatttctggtggctccacatattcctccagtgtgcatgtgggcccttagtgtgctgtgggcatgtttaggcaagccccctgtgcaagttcccttatctgcacaaaatatctggtgtaagcacctgtggggtgggtcagaggttctctggggatcctttacttactgtctgcctaaagcaagctaactaactcctttcaacatcccagaaatacaaaggatcatagaagactactatgaacagctaaataccaagaaattggataacacagaagaaatggatgaattcctagaaacatgcaacccaagactgaatcaggaagaaacagaaaatctgagtagaccaataataaataaggaaattgaattgtaataaacaatctcccaccaaaggaaagcccaggacctgatggcttcacaggtgaatcccattaagtgctcaagaagaaataccaatccttctcaagctcttccaaaaaattataaaacagggactacctcagagcttattttatgaggccagtattaccctgacaccaaagccaggcaagaacaccccaagaaaactacaggccaatatccctgatgaacacaaatgcaaagatctttaacaaaatactagcaaactgcattcaacagtaaatttaaacgatcactcaccataatcaagtgggacttatcccagggatgcaaggatgggtgaacatatataaatcaataaatatgggccaggcactgtggctcaygcttgtaatcccagcactttgggaggccgaggcagatggatatcttgagcccaggagttctagaccagcctaggaaacatggctaaacctcatctctacaaaaataccaaaagctaacatggtggcatgtgcctgtggtcctaactacttgagaggctgaggtgagaggacagcttgagctcgatgcgggtggaggttgcagtgagycaagatcacaccactgcactccagcttgggtgacagagtgagactctgtctcaaaaataaataaataaatacattaataaataaatataccatattaacaaaatgaacgacaaaaagcacacaagtatctcagtagatgcagaaaaaacatttgacaaaatccaacacccattcacgctacaaaactctcaaaaaataggcatagaaagaatgtaccttaacacaataaaggccatatatgacaagcccacagacaccatcatgctcgatggtaaaaagttgaaagwttttcctgtaagattagaaagacaacagtgattcccactctcacagctattcaacatagtctggaagtcctagctagagcaattaggcaagaagaagaaataaaaggcattcatataggaatggaagaagtgtatttctgtttgttgatgacattaggattctccttgcacatgaaatgggagaaaacatttgtaaactgcacatttgctatggggctaacatgaaaaatatataaggaatccatacaactcaatagcaagaaaacaagtcaattaaaaacttggcaaagtatctaaacagacattttacaaaagaagagacacaaatagccaaaaggtagatggaaaaaatactcaacatctctaatcatcagggaaatgcaaattaaagccacaatgtggtatctcctcatgcttgttagaagggctgttaccaaaaatgataagaagtgttggtgaggatgtggagaaaaggaaacccttgtatatcgttggtgggaatgcaaattcgtttagccattttggaaaatagtatggaagtttcctaaaaaactaaaagtagaattaccatatgatccagaaatcatccttctgggtatataaccaaatgaactgaagccattacgttgaagagatatctgcaccctcatgttcattttagcattgttcataatagccaagatacagaagcaacctaagtgtctattaatggataaacggataaaaatgtggtacatatacacattgaaataactatacagccttttaaaaaaggaaatttcgtcattagtgacaacatggatggaactgaggaacactgtgctaagtgaaataagccagaaacgtaagagaaatacagtatgatctcacgtgtgaaatctaaaaacgctgacctcatagaaatagagtacagaggtcattaccagaggctaaagggaagagagagaaatgaggaaagggaagaagtggatcaaagggtaaaaagtttcagttagactgaagaagtaggttttagtgatttattgcactgcatgttgaccacacataataatgtactgcatatttcaagactgttaaaacagatttttaacattctcaccaccacaaaaaataataaattggtgagatgatgtatatgtgctatggtttgaatgtttgtctcctccaaaatgcatgttgaaactgaatgtctaatgtggtagtattgagaagtggggcaggccttgaagaggtggttggatcaggagagctctgtcctcatgaatggattaatctattcatggattactggattaaggagttcatggattaaaggattatcatgggaagggaactagtggctttatcacaggaagagagacctaagctagcaaggtagcatactcagcccccttaccatgtgatactctgtaccaccttgggactctgcagagtctccaccaacaagaaggctctcacaagaagtggtcccttgaccttggatttctcagcctccataactataagaaatacattaattttctttataaattacttagtttttggcattctgttataaatctgttataacagaaaatgaactaatacattagtttgattatttctataatgtatggatagattaaaacatcacgttgtaccccataaatataaatcattgtcaatttaaaaaaaaaaaacaaaatgagatatcattatacatctaacagaatagctaaaataaaaaacagtgacaacatcaaatgttgacaatgatgcagagtcatcattgtcattaactggatcactcattcactgctggtgggaatgtgtagctactctggaagcagtctggcaacttccttaaaagtttagcttgtaactactatataatccagcaactgtacttctaggcatttacccctgagaataaagacaatgaagatttatagccacccaaaaacctgcacacaaaagcttatagcagctttattcatcatatcccaaaagtggaaacaaccaagatgaccttcaaagggtggttaaaaaaattaaaaaataaaaaactgtgtgcaggcctaccatggaatactacttaggaataaaggaaaaaactattgacatatgcgacaacctgaatgtacctctagagaattatacttagtggaaaaaataaaaacacacaatgccaaagggtcacacactatatcattccatttttataacattcttgaaatgatacaattatttaaaaagatagtgaacacacagtggttgctatgagttaaggaagtggaggaggcagtgggagggaagtaggtgtggctataaaaggccaacaagtgggattctagtggtgacaggttgttctgttagactgcgagctgattattgtggtgaccattttacagatgaggaaactgagactcagatgagttaagtgccagacctaaagtcgcacaggtagtaagcgacacaactggaattcaatttcaggtgtcccttcttattccagagttcatgctccttttttataccattgattaacatcattaaccaaaggaatttctactaagcaacatttcattttttccccttctcaaatactattagatggagcagctgcaaaagcatgcaaatacatatttcatataacaccacaggaagtttttaaatattcatatgcagaaccagaagataatgtgaagtggaacctcgctccagaatccctgcacctttccagttgcggagtttccgggtgaggttagaatatctctaaggtgcccaggctcagattttaggcaaatatctgtaacctgtctgattgggtaagttttacatggaccacatctaccaatttcattcagacaaattgtgtaatgcagtgcttcataagtatgagaaaacacagaaccaattaaagacacatttataacatcctctactacaatctttaaggtaaaaaaatgcttcattttgagtccatctgcaaagaactgtatgaacagtttataataaagagtggcatgaaggttaagtctgtaatctttgtataagaaatttcccatttcaactggccaactggcaaaacaggctgctgtctttatagctctctgttggtccctggggatgcatcaaaataaataaatgttccctgccgatagggacaggctgaacgtctgctcatgcctaagaggccacccaagttacagaaacacgaagagcacttttttaacaactactcccaagaatgttactggaagtctgaaacacaatcgcaggtgatcacaggctacccctggcccaaggcttctaattaggtttcgaccttttcccattccagctgcactttccatccataatcctcctacactgtkatgtttccatgaagccctgtattcccagattggctaattcatagactctcagtgctgcaaagatccttggtccaacactctcacgctacaaaggagggttccactccttggccaaattaactatccgctgccacagcactgtcatgccttgcttggaatcttccagggcttcccaccactgactccccatcttggtcccccgccctagaatcctggcatccttattaatctctacattctaggcaaatcaaactatccattattcttcccactcaagagtattgttttgtttttgttaatactgaaccttctacccagaatgcccatttccaagtgccccaaatgactcaatcttaaaaaatccaagtcgatgccaccttctccccctctctcctccactccccaggtcggattgtcttcctccgatccgccttctttagcttccacaggcatccatctaatggcccattcacttcctacacctgcctcagctactggtctctgggaaattgtctcttgtggggcatacgctatggagggatgcttcttgtttttctctataccatgcgtccgatcttttggcttccctgagccacactgggagaactgtcttgggccacacataaaatacactaactctaatgatagctgatgagaaaaaaaaaaaaagcgcaaaaaaaaaacctctcataatgttttaagaacatttacaaatttgtgttgggcggcattcaaagctgtcctgggccgcacgcggttagtgagccacgggttggacaagcttgctctataccttcagtctccggtgagagtgcctcgcacaagtaactgcggagcaaatgttcattgaatgaaggaatgaggaatccaagcccagagaaaacatgagtgactttttccagcacgagtcatattaatagtctcgcatgccaaaggaatatcaccatccaactttccaaaatccaatacgataataattacttgtattattattcatattcacttcagtgaggacagtaggcttaaaaagccttaaacaggttgggtttctagtcccagctctgccacttaatagctgtgtaacctagggaagaaagtctcttgccctgtggactgagttccccagtctgtgaaaaagaggagggtggataagctccgttgttctctagtcatgtcaacttttcccacttgccagttggttagaacacggttggttgccggggcgcctcgaggtcctcccccactccgcccagcacacctcactctcaagccggggtcttcttctcgcaccgggaggcagctgtgtgtgtcctggggtctctcttggcctcgcagctgccgaccttgccgccggcggccgcgggacgactccatctgtacccgggagacacccgggaggcaggcgccagccatcactcggggccgtcctccagggccaacgccagcaccagcgccgccacgctgaaacggtcccggcggcccctccgcggctctgagacgcccgcacgccggggggccgacgcgctgggctcggcgtccgggcgctgccgagccggcacgaggctctgaccatggggagccgcccgctccgcccaggaggcggggcacagtcgctccggctagacctcgcttggccccgagcccagcttcgcccgcccgcccgcccgccggggaactgcaccttctcgcgccccgacgcagccgcctccgcgcgcgcacgcaacgcacgcgctccagcgcctacggtcaaagcgccgcgcaaccagttattccgcccccggctccgcacccgcgtctcggacgttcccgcagccaacgtttagggcaccaggcgctgtgctaggcgccgcggttataaagataatcggttttgttgagcccaggaatgttcgggtacacccatcatgagtacacccactcttctagcctaacaaaaattcccttagggcccaaggaatcatggtacctgcaccccaagaaagcctctgggtctttgagtcagcaaagtggcggaggaaggactggccctaaaacaacctcactgcttacacacaccacaccacacacacacacacgccagatagccagcagagacctccaaccacacacacacacacacacacacacacacacgccagatagccagcacagacctccagaccccgccccgcccccctcccccggcccccctccgcccccacgcgccaaatagccagcagagacctccaggatatggctgtgagtttaaaaataaagctggggcagggagagtatcctttttctcactgctaaaaaaagaggccaggaatactaacctagctaagtaaggaacccttgaagactaagtgaactttatggagcgctgcacaggacgttgcttcaacctagtcataacttagatttttattctgatgtaaatggaatctcagctaaaaggattttttcccacttatttgaaggctaaaaaatatctcgctaattttatgtattttgtcataatgggataacaactacctaaatatgcaacttttttcgtaaagctattgggttgtgttatgaaggttaagggtgaatctgagtgatctgaaactttgggtctggattggcacctttggaaacagtccacagaaggacattgaaaacgtaattattgacaaagtggaaactagaacacttgagaagttgtagctttttttatgcattaatattttcttacatgttccttaatatatatccagagttataagctgaatcagatatgcctttcaatacccttttaatgtctcaaagagaaagccataaacatgcatttgctttatgtttctcaactatttcgatggagtcatcactgtaggaagtggttcatgattttatacaggagaggtattgtgagcatttataaagccatcctgcttatgagccaaatttattatgtttgctaggttaatctgttttctctaatcaaacacttaatcatccagtctcctctctgcgttatggattcatgaatgtgaagtgaggagagttgctcagtcaaggtaaaatgataaattatcttttcattttcagggtatttgtgattaaatgcttcataatagaattaaaatgaaataaatcttgtaatttcacttctagattcctgccaggtatagataaaacgcatttggttaagaacaaattcaattcaatgcctgcgtggaatttataggagaaatgtagaaagcgttgtagttcaggagagccctgagttctctcttcatttctatggattggagagagagttgatcaatcggtggtactctacggatgagcagtggaaaattaaaatttccattaagaaagaatgaggacttagccttgggcagtaataggcaaagtttgtcttaatctagagttgtaatctggggctatgattggagcagatgttaaattacacttaaataaacagttcctattattttggccattataagtgaagccctgtgtggctggcattctctgttgctgcctaattttatagtaagagttgaaacatattgaaaaaagcataatggagatgacttagtcctgtttgttgttgagtgaataaagttcacattccagaaaaagccctataaggtaacaaaaattacaattggctttttaacacatggaaactcaaaccaattggcattgtgtgatattagacagaggcctcaaacaaccctatatgttttgtgcatattttacaattagcaaagcgctttgattctgttgtctcatttgatcctctcagcaaacttgtgactgctcagtcctggcagttggtgtgaggcctgagatgtggagctctgtattccagttctcctggggtagaactgaagtcaggcctcttaggcaagagctcttcccctacccagactccctcttttatcagacagcaaaagaaaaaccttttttttaataggttttcaaaaccacaaaaataaaagagctgcacaaataactgaaatatttgccaagataatgcagagatggttggctacgttttatgtgagctagtaagagttgagacaatcattccaatagttccaacctcagcccctaaaatctatgctgtaaaagtaaaagcttttttcttgacttgaatgtccaggccacctgcctgctcagactggatttttttcctgtacaaattacttaaccctctaattcaatctgctttgtgtatttctggtcaatatcattgcaactgaaaatctgtttgcttacaggtttttcacgtactgcacatccaagctaggtaatgtctctgcaactgctgcttcctgatgattatattcatctgaaatgactaagcttggtaaattaggctaagtcaagtctgtggagcagtcaagggacgaatgaagaaaagaataatgtaatggaggctacaccagagacatgggaatctatcagcatgtggcaaggaaggaagaacatagctatgtcttctatataaagagttgcctgcattcttctcagaaaaaaaaagacaatggaaaggcaatgagtcatgagtcttgggttctaagcctggttctaccatttgctagctgtatgataagaagcatgtttgttaaacctctgagcctcagcttatatatatacgaaacaggaaaaatagtaacatagcctgccatcttcacagatttgtgaaaaggtcttttaaatatccaaaaagcttagtatgtataagaaagattaaattggctgggcgcggtggctcacgcctgtaatcccagcactttgggaggccgaggcgggcggatcacaaggtcaggagatcgagaccatcttggctaacacggtgaaaccccgtctctactaaaaatacaaaaaattagccgggcgcggtggcgggcgcctgtagtcccagctactcgggaggctgaggcaggagaatggcgtgaacctgggaggcggagcttgcagtgagccgagattgcgccactgcaatccggcctgggctaaacagcgggactccgtctcaaaaaaaaaaaaaaaaaaaaaaaaaagaaagattaaatttaagctatgggtatgacacaaaaatatacttgaaaattattcttaaatttcaccatatttaggaagtggctaaatatcaacataatattcctacttctgcatttcctatttctctctttgcattttaaattcagaggaagttatctcatttattaattgtaacatttaaatagtatacatttctgtcatttaaaagtggtactgacaatgtagttaaacctttattatcttttattggtttaataaataaaagtgcatgactaaaaacaggccacaaatatcaatgattttggggatttcgccctacaggaaaatcatacaatgcatttggaaaaaggtaattctgacttgtcctctacgaaatgctaaatttctgcacaaaagcttaaagcacaagtgtttacaggattcttggtgacaagaaaagtgatagtaaatgtgctttagcactaaaattcatgtatccatggaaacctgtgaagttctgtaagcacacacacacggcctgcggtatttattgaagagctaagacagcgatcagtgggttactatgctgtgaaaagccgacagattgctgggagctgctatgcacaggcatggatgaggttgtttttcccctgctaaatgtaattacagaggaattcagaagtctcagatattactgagaaaaaaaaaacatgtttatttatttatatgtacttgtacctttcagaatacagtgtcctttttttacagtgtcagattttttagtcaggaaagccttgaaaagtcatcagcatttccctttcccacacatttgtagccatagtcaaaaactctctagtagattttccatgtgtgcaaagaaagatatttcttgaatgttaggagagaatgcccccagttttttccaaactgattattcctgggtatttaaatatgtttcttatcagtgtttcgtaacgtataatgattgtgaaagcaaagagcatgatgatatttgggggaaagaatcgcctacaaatatctgaagtgtttatttaaccacagactgatactctaataaaataaagaagtaatgctatttcataaaggcatattcatatggcattcttttattaaaacatacatctcatctcgtttaatccttacatcaatctcaatgagtactattatgcccacattctcttccattgccaagtcctggattctttctcaaatcttattctaaactttaataacttggaaatggtctgtgtttgggttgaaacagaggtaaaattattgagttcttaaacgtacttcatgttttattcccacagttttcctttaaagtttttttttgtgtttggtcttctaaagatggactgttcaataggagagccattagccacatgtgattactgaacacttaggggctcacgtgaaataatatttgaatatattgatttgaatagtaaatgctaatttcagctgttttaaaaattgttttaatatgcttactaaaatattttaaaatatatatgtggctagcattatatttctactggacagcactgctattatccagagcattcaaaaggggtctctttttaaaaatcatttagtatatgccagagtttctcagtcttgcaactgacttgccatacttttcaccagaaacaatgagattagttcacactgattgttttcacctaaaagaagtgctttaagttatcttctttttgtggaccaggtttctcttcttttctcccatgcaattctccggcaaaatccaagtaagcaaatcaaccttgttttgttgttgttgtttgtttgtttgtttgtttttgagctctctgggcctcaatatttgtttattctaatgtatttttaatggagtttaataattaagtaaattatgtagataaaccctcgtgcaagagtttgtaatgatccaagactctggtgatttagttttaactcataagactgggggaaaaaaaagagagcacattgaagaaataatagtttgcttccagttgtattaggaatactttcagctgcaagtaagagaagaccacattaataatagtggcttaaacaacagaggtttatttttctcatatattaagaagtctgaagataggcccttgctggattgatactttgcatcaaatccctcagaaaaacttgttgctttaacctttaaaatatatctagaatccagcctttctccctacctccatcacttccacttgtgtccagaaactcttcttttagtaacatttttctagcttatctgttttcttccttgttctcatttaacattttctatatccagcagccagaaaggttctgttaaaattttatagcatgggctgggcactgtggctcacacctgtaatcccagcactttggaaggccaaggtggatggatcacctgaggtcaggagttcgagaccagcctaaccaacatggtgaaaccctgtctctactaaatacaaaaattagccaggcatggtggcactcgtctgtaatcccggctacttgggagactgaggcaggacaatagcttgaacccgggaggcagaggttgcagtgagccaagattgtgccattccactccagcctgggcaacaggagcctaatcccatctcaaaaa

SEQ ID NO: 96225 - DNA, 30871 bp, Homo sapiens
  misc_feature (1)...(30871): n = A,T,C or G
tgaactcttcggtgtttagaacgccacctctcagctgagggcatccaaggaccaggcattcccagctcagggcagtgtggtctcttcactgtttcgttcccagctcagaggagtgtggtcccttcactgtttcgttcccagctcagggcagtgtggtcccttcactgttttgttcccagctcagaggagtgtggtcccttcactgttttgttcccagctcagggcagtgtggtcccttcactgttttgttcccagctcagaggagtgtggtcccttcactgtttcgttcccagctcagggcagtgtggtcccttcactgttttgttcccagctcagaggagtgtggtcccttcactgtttcgttcccagctcagggcagtgtggtcccttcactgttttgttcccagctcagaggagtgtggtcccttcactgttttgttcccagctcagaggagtgtggtcccttcactgttttgttcccagctcagaggagtgtggtcccttcactgtttcgttcccagctcaggggactgtggtcccttcactgtttcgttcccagctcaggggagtgtggtcccttcactgttgcgttaggccaggctcttccttctccaaattccacgtcttccatgagtgtgggtaataaatgcctcatggaactgctttgagccttaattgacgtaaaaaatactggctttggagttccagagcgcagggcgagtgtgggcctgtagtggcctgtaggagcactgggggcttgtcatggctggggcagcggaggtgtgtccatctcagccaccctcatctgtgtgctggtgctctctccataggtgtggtggccgagcctggagcctgtgctgctctgccggtggaggagacactgccagagcccgctgccccgggaactgcagaagctacaagaaggccggcagtttgccagcgagtacgtgtgggtggtgagatggggtgtgcccgcccagatgcacttcgggacctgctcaaggtcatctcctaaacaccctggcttgcttgagagaagcggtgtgggcagcctctcgtgtgagcagggagaaaagaaccgagttctcgtggtggtgggcacctgtaatcccagctactggggaggccgaggcaggagaatcagttgaacccaggaggtggagtttccagtgagccgagatcactccaacggccaatagagcaagactctgtccagaaaaaaaacaaaaaaaaaaacagcctctgccagtgtctcgtctgagtgaggaacggcctctcccaggctcccgtctgagtgaggagctcgagtgattcctttgcacctgctccccttcctcttaaatctaatgtgggctcctagagtgcaccgcgtgctggtagggtcagtgtcatggggacctcagggatgcagattctcagcctaccctgacctgtcgaccccagtcagatattcacgggtccttgcaaaccatcaagctcctggcgcgatccaggctcacacacccttctgaggaccacagagctgacagccactccacctgctgaatgtgggtgccgtgttcttaaggggtcgtcagagggcactgctagtacccatcctgcctccttggagaacaccttactttgtgactagttttgaatcactgatgccacaccgggtcccctcagggtttggctgctcgccgtctgctgaaagaagagaagagggccccggcgcggtggcgcacacctgtaatcccagcactttgggaggccaaggcaggtggatcacctgaggtcaggagtttgagaccagcctggccaacatgtgaaacaatctctactgaaaatacagaaatgagctgggtgtgatagtgtgcgcctgtagtcccagctactcaggaggctgaggcaggagaattgcttgaacccaggaggtggaggttgcagtgagccgagatcatgccattgtagtccagcatgggcaatgagaaagaaactccatctcaaaaaaggagaaagcaggtcacacctccagttctaattctacaaacacagatcagattgtctgaagttttgttttttgttttgttttgtttgagacagagtttcactcttgtcacccaccctagagtgagatggcatgatctcggctcaccatgacctccgcctcccaggttcaagcgatcctcctgcctcagtctcctgagtagctgggattacaggcgtgagccaccatgcctggctaattttgtatttttagtagagacagggtttctccacgttggtcaggctggtctcgaactcccgacctcaggtgatctgcctgcctcagcctcccaaagtgctgggattacaggcgtgaaccaccacgccctgcctcgtttttgtttatttgagattgagtctcactgtgttgcccaggcagatctcaaactgctgggcttaagcgatcctcctgaagtgctatgattgcagatgtgaaccgtcatgcccagcttatttaaagtctcttaaaccacagcattgtttcattaatttcctaccaattttttaaccagccagaaaactcagacaccacactggggccagagccaggcagtcctttgttctctgttgtaggagggaatgcctgatccacagggccaggcatgggcaactgaggaaaatgaggcctcttcttccaaaatgtaggcagctggggcccaagagcacagggcaaggtagacaggaccaggccagctgcctgctcagtcagcagctctcagaacgccaggatgctgtgggggcagcaccagcacctgcccacactctcacgtggacctgggggatgcagacctagtttctgatggtcctgaaacccttctctgtcctctgatggaaaggcaggccccaaaggtgacaggtgggaataaggacttggtttctatggcgtggttgtatggttgtaaggccctgcaatgaccccgttctctctgtcccagtttcctctcccctgaggctgcctccccagcacccaacccggactggctctcagctgctgcactgcactttgcgattcaacaagtcagggaagaaaacatcaggaagcagctaaagaagctggactgcgagagagaggaggcaagataggaaattcttttactgatttattttctcgcaagcttggtttcaatcagtgctatttctctgggcttgtctgatgaactgtttttctaaagacaaatatgtggcttggagcaagactttttttttttttttttttttttgtatttttagtagagacggggtttcactgtgttagccaggatggtctcgatctcctgaccccgtgatcctcccgccttggcctcccaaagtgctgggattacaggcgtgagccaccacgcccagctggcttggagtaagactttgactatcaagtttactagtaaaaataataatttcagttttttaaatggttgtatgtagttgagacagggtctcactgtcgcccaggctggagtgcagtggtgcagtcagctcactgcagcctcttctgggctcaagccatcctcttacctcagcctctggagtagctcagactacaggtgtgtgccaccatgcccggctaattttgtaattttttctgagatgggggtctgtagtccaggcatggtggctcatgcctgtaatcccaacacttagggaggccgaggcaggcggatcacttggtgtcaggagtttgagaccagcttgggcaacatggtgaaaccctgtctctactaaaaacacaaaaattagtcgggtgtggtggtgcgcacctacaatcccatagcctgtaaagctactcaggaggctgaggcaggaggatcacttgaacccagggggcagaggctgcagtgagccaagatcacgccactgccctgcagtctgggtgacagagcgagacttgtctcaaaaaaaaaaaatttgtttaaagtaaaaattaaaagagatgggggtctcactgtgttgcccaggcttgaagtgcgtttcttcagcttatttttatcctcatcacagcccagcgtaaaggctgtcagccttcaagtggtgccttctgtgttcatgctgcagtagccttgattcatgtgctgagggacagccccagataagcttgcagtgagacagctcagacctggggtgctggggacaagaggcagcaaggatgggaccgtctgcagccataggcatagggaaaggagtgggagaggctgctcttgaattccaggccagggaccatgttcgactcagacccactgcccacctggttgctgcaccctggaaagcctgactgcccccacaagaccagtgacacccacacagctctctgtgcagggagccaagggtggtgtgtgcagaacaggaacagaaacaagcatcccacaagagagctggaggcagcagccctctgtgcccagcccgagatccgcaacgcataggtgccatgtcagcacacaacttacaccagctcaaagctggatcgacagcagcgcccagggttttggtgattataaccaccctgcaggggttcttctgagtacgtcttcaggtttcttgtgtagttttgttagaagggattttagtggctccagggccttagggccctagtgtgcagcgaggagtgtccacagagaccctgcccagtcaggccctactttaggctggagcctgtgggcttatcttcaaggattttacaaacacttctgacaggaggccttgcagggagatgatgctgagttgggactgcgcacagccaaggagaccgcagcagtcttctctttctggctcttgtcactttttcaaactgtttctagctttgtttaaaggcaagtgtgaaatgacccagccagtagtaattaattctcaattaagctgtctctctagaagtgattggaaagttttctaagatccacttaaaggatttatggcctagatgtaaaaaatttcaattaaagaggaatgtgtcagccttatttagaatgacagcacaggtaattttaatgtaataataagtgcacgtttttatttacagctattggttttccttttcttcttctccttgatgggcctgctgtcgtcacatctgacctcaaatgtaagtcagaccttaccagccaaggtgtcctctcccactgtgggccaggcaggggcaccaggcagccagcttccaagtcagggtttccagactagctcaggagctccttgtgtttgcggaagtgtgagtgagaactcccaggccgtgggttttttttttttttttttgagatgggggtctcactctgtcacccaggctggagtgcagtggtgtgatctcagctcactgcaacctcagcctcctgggttcaagcaattctcctgcatcagcctcccgagtagctgggattacaggcgtgagtctgtcacacccggctaatttttgtatttttagtagagacggggtttcaccatattgccaggctggtcttgaactggcctcagtgatccgccgacctcggcctcccaaagtgttgggattacaggcatgagccactgcatccggcctgtgggcctttcttttaatgtcttatttgaggacgtggtgcagcagccttggtgtgggtgctcgaagtccctggcctcctacctgagcctcttctgtccagaggcccagtattaccttctataggtaaaactgtcaccagttttaagacttacaataagcaaagaggaaatgccctcttctgtgctgagggctgtaccctcctacccatgggagcaccaggtcggccattctcagggttggtctcctgcggtttacagagcaccacagacctgccaaaggctttccacgtttgtgcagcaatcctcgagtgtttagagaagaggaagatatcctggctggcactctttcagttgacagagagtggtaagaaacacgctgctgaggcacaaatgcggagggccgctcttttcagaggcatcttgcaaatggttaagaacgagccctccttgaggttccttgctaagtaagtttataagctccattttagttgggacagattaagcacaaacttgtttaaagcaataagataatttactggctcactggtcaaccccaggaccaatgggcctatcatggggactgcctctctctgcaccacacccaccctcctgcaagaggtcgacccccccatcctctcccagctgctgacaggtacctgggtatcctcagctcaggctgttcgccccacactatccccacagscaggcctcccagggtacacgtcccgacccccaggggtgtccccagcactgataataggcagagatgtccagagttgcctgagccayttcttggtgttgcagacctcaggctggggcggctcctcctccgtgtggccccggatcagcacaccaggctgctgcctttcgctttttacaggtacctccacccacagggctggtcagggctgggcagtgtttcccagacccccatctcagcacctctgggtcccgccagatgggaagggttgtctgtgcctctgctccacagatgagcagtatcccttggcatcacctgctacctttccagcagtctgtagccatttgtcactatgtctttacctctagtcttctctcctacttccatgaagacgcggccatcagggaagaggccttcctgcatgttgctgtgkacatstacttgaagctggtccagctcttcgtggctggggatacaagcacagtttcacctccagctggcaggagcctggagctcaagggtcaggcaggtgcaagggccagtcccacctccaggggagctccccccagccggaggctccttctgccaaagaatgttccggcacagcatgcagactatgggggacacaccagccctgtttctgtatgtcttctaacctgtgagtttgcctgttttctctctagggcaaccccgtggaactgataacaaaagctcgtctttttctgctgcagttaatacctcggtgcccgaaaaagagcttctcasacgtggcagaggtaacgtcaagatgcccaccttgggccaygtgggggacatgagaattgacagctgcctgggccatgtgcctgcctggctkgcaatacaactcgactatttctgccagagcccctcccctgtggtctgaggcctagtgggcggcatgggctgaggacctgctcctctctcacagctgctggctgatcgyggggactgcgacccagaggtgagcgccgccctccagagcagacagcaggctgcccctgacgctgacctgtcccaggagcctcatctcttctgacgggacctgccactgcacaccagcccagctcccgtgtaaataatttattacaagcataacatggagctcttgttgcactaaaaagtggattacaaatctcctcgactgctttagtggggaaaggaatcaattatttatgaactgtccggccccragtcactcagcgtttgcgggaaaataaaccactggtcccagagcagaggaaggctacttgagccggacaccaagcccgcctccagcaccaagggcgggcagcaccctccgaccctcccatgcgggtgcacacgaagggtgaggctgacacagccactgcggagtccaggctgctagaggtgctcatcctcactgccgtcctcaggtgggttcgggcttcaccgcctggccctctgtggtcacagaggggctcggtggcccaggtggtggttccgcctccaggggcagggccttgtcctgggtctgtgtcagcgggtgcaccatggacatgtgtacattgaggttgtgggccttctcaaaccgccggccacactggtcacaggcaaagtccagctcagtctcagccttgtgtttggtcatgtggtacttgagggatgcccgctgcctgcactggaacccacagacctcacacctgggggacagaggcagataagaaggtgcgagggccacagccctkgrgggggkcctgactcacacttactgcaaaggcttggctcccgaatgtcgcatttggtggacgagaaggtgcttccgctgcttgaaggtttgtccacattcgtcacagatatagttccgcacctctgagaggggagagtccagtgagtccaggcccctgatgctccaacctcccggggggacgacgatgacaatgtgaaaccatcacagctgggaagacatttctgcacatggttcaccatgcagtgggcccaagcaaggggcctatgagggcctcgtttattaagatctttaaactgctttatacactgtcacgtggcttcatcagctgtgtgcatttcaggatggtttttaaagaaacctcagaaagctatttccttaaccacagattcttgtctttttttttttttgagatggagtttcgctctgttacccaggctgcagtgcggtggcgtgatctcagctcactgcaacctgcgcctcccaggctcaagcgattcttgtgcctcagcctgccaagtagctgggattacaggcgccccccaccacgcccagctgatttttgtrtttttagtasagacagggtttacaccatattggccaggctggtcttgaattcctgaccttgtgatctgcctgcctcggtctcccaaagtgctgggattacangtgtgagccaccgtgcctggcctacaaattcttaaaggaagccgtatcactaaggttgtatagaatactgattgtcacagctatggctgttctctagaattcatctccatatgagaggggtccatacccagggtctgggggtatgcattgctgtactggctctggaaatctttctcacacccttgaacaaagagatctcacttgctagtccacaaatgccacatgtggacatgcagacccactcaccctgtgctgcctccacatctgtcaagccctgaaacgcttcacaagacagacttttctcttcgaagggaaaccctatcttggcattttactctacgctgttctttttttttgagacttgagtcttgctctgttgcccasgctggagtgcaacagcccaatctcagctcactggaaactccacctcccaggttcaagggattctttttttttttttttttttggagacagggtcttgctctgttgcccaggttgaagtgcaatggtacaatcatggctcactatagcctggaactcccaggcttaagtgatcctcctgcctcaacctctcaagtagctgggaccacaggtgtgcaccaccacacccaggtaatttaaaaaatttggggggccggtgcagtggcttacacaaagtgctcaatcccagcactttggaaggccaaggcaggmggmymakgmagtcagttcaagaccagccccagcccaatcaatatggtaaaaccctgtctctactaaaaatacaaaaattagccaggtgtggtggcacacacctgtagtcccagctactcgggaggctgaggcagcagaattgcatgaacccaggaggtggaggttgcagtgagctgagattgcacagctgcactccaggctgggcgacacagactgtcccggaaaaaaaaaaaaaaattgggggctgggcacggtggytcatgcctgtaatcccagcactttgggaggccaaggcaggcaaatcacctgaggtcaggaactcgagaccagcctggccaacatagcaaaacctgcctctctactaaawatagaaaaattacccaggcgtcatggctcacgcttataatcccagcacttcgggaggccgaggcaggtggatcacaaggtcaggagattgagaccagcctcactaacgtggtgaaaccccgtctgtactgaaaatacgaaaaattagttgggtgtggtggccagcacctgtagtcccagctatttgggaggctgaggcaggagaatggctttaccccaggaagaggagcttgcagtgagctgagattgtgccactgcaccccagcctgggcgacaagagcaagactcagtcaaaaaaacaaacaaacaaacaaaaaaaaacacccccggcgtggtggcagatgcctgtaatcccagctactcaggaggctgagacaggagaattgcttgaactagggaggtggaggttacagtgagccaagatcgcgccactgcactccagccatggtgataagagtgagactgtttccatcaataaattaaaaaaaaagtttttggtaaagacggcctcactatgttgyccaggctggtgtcaaaatcctggcctcaagcaatcctactgccttagcctccaaagtgctgcgattacaggcatgagccactgcacccggcccaatttcaggtttttaaggaactgctggttgtgaccatcagtgaccggacagatgcagagtctgaaggaccaaacccaaggaagtgctgccatcaggagagatgtsggagaacccaaaaaataacaacccgcatgtcgggagatgacccagcagtgaaaagcaatcctaatgaaaaaatacttcagtaaattcaagtaagaataaataattcttattctgtaataagttcaaaaccaaggaaaactgtgtgtgtaaggatcaatatacagttgtcctcagctggttccaggcccccccccaccccttaccaaaatctgctcatactgaagtcccgaagttagccctgcaaagaccctacagaacctgcacttaggaaaaggcagccctctgaataccagggattcgagtccctgaccatggatatgtgggtccacgtggttcaaacaagttttttttttgagacagtgtctcactgttgcccaggctggagtgcagtggtgtgatctcggctcactgcaacctccacctccgcctcccaagtagctgtgcctacaggcgtgtgccaccacacccagataatttttgtatttttagtagagaccaggttttaccatgttggccaggctggtcttgaactgctgacctcaggtgatccacccacctcagcctcccaaagtgctgggattacaggtgtgagccaccacgcccggccaagtttgtcattttgaaaacatatccttgttggattataaaagtaacttgtgcattatagaaattgtgaaaaataagacgggcacagagacagcaccctcagtcataattcccccatccgcctccggtcttaatgacacgacctacacacaygtgaaraggcagaaccacacgtgcctcccgcctgtccacgtgggcagctccccagagctggtgtgccttcatgccttctgccttgccttttaagatacacttgtttgggccaggtgcastgctcacacctgtaatctctgcactttggaaggctgagatcacttgaggtcaggagttagagatcaccctggccaacatggtgaaaccccgtctctaccaaaaattacaaaaattagccaggcatgsttgcgggtgcctgtaatcccagctacttgggaggctgaggcgggagaattgattgaacctgggaggcagaggttgtggtgagccaagatggtgccactgcactccagcctgggcaacagagcaggactccgtctcaaaaaaaattaaaaaataaaatgaccaatttgcaaaaggacaccaagattgcttggctattagttttgacaaactgcctagatcctggggaagtcaggaattccttccatcacagggaagggcagattcacactgacgccctactctagccttcatctaccaacgtgactgagtaccaaagamcccatgagccaccttcaygcacccccaactcttggggcrgggatgggtatgaggaagactggaaagcaggtcacgtgcccctggctgtcacccgygtgggcgacactggygataggcgtacctgtgtggatgagcttcacgtggcgctgcaggtagcggtcgatcatgaaaaccttgttgcagccagggtgggggcagggccgctcccggacctcctcgtggtgctccttgatgtgcttctgaaggagagactcggtgagagaccctcagagccgcacccgggccacatggcacgagccctcagtaggkgacagctgaggcccctggaaggcagatccaactcctcctccagcgacaccactggctccttcacagcttcactccaagaaacttctagaccccccrgggggtgtctcaagtgaaagtctggccycacatctacccccaaggatggcactggctaggactgcttcaggtctcggttaacctaggtcaaagtgtccttgggcrcaagtctgagttaggctgcagaaacacctgctacctcccccaggttcacactgacagctgccgggcctgggtcaggcacagccagtgctcaccttcatgccgtcagcgcctcggtacacggccgtgcagccctggtaaggacacttgtagatggtgggaagctcctccctgcaatgaagagcatgcatggagcccyggccccgacaggcagggcgagcctcgcgttgcaggcatcacctctcacaacgaagcttcttcttccatccgggcttgggtcccggcttcttccgaattcttggttcttcagacttcttggcttctttgctttcactcttcttaccagagactctgaaaaaaagaggttcccaaattcaatggtttctgatctccatttgcaaaatgttttttgtctctccaacctgagaaatggtcttttctgaagcttccctgagttgcttctgtgctgactgaccctcagaatctacctgaagccaccaaagccagagcaactctggacaggaggcctcaggggcgagcacagcagagggcaagggcgcaggacacagcagggtcaggggtgaacacagcagagggcgagggcgcagggtacagcagggtcagggcaaacacagcagagggcgagggcgcagggtacagcagggtcagggcgaacacagcagaggrggagggcacagcagaggatgagggcgcagggtacagcagggtcggggtgaacacagcagagggcgagggcgcagggtacagcggggtacagcagggtcagggcgagcacagcagagggcaagggcgcaggacacagcagggtcaggtgaacacagcagagggtgagggcgcagggtacagcagggtcagggtgaacacagcaragggcgagggcatggtacagcagggtcaggggcaaacggcagaggacgagggcgcagggtacagcagggtcgggtgagcacagcagagggcraggacgcagggtacaggagggtcagggcaaacamagcggagggcgagggcacagggtacagcaggggtgggttctgagaactaaagcttcaccctgtgctacacataaaacccamaactagaggtatcaggacggcagaacagggatgtccaaaggaccactcctttatcaaaacgaccttacgctaggaaaaagctcagaatccactctctcaaaatgggtcagcttgattccaagctcaagccacccaggcagggcttcagaggaacaggtgatgctccctgggaagcacacggtgagtagctgccaccccagcattcctcaaccccgcctccactgcagggagcccagcctgtgttcctggagctgctggctgggaccatggtgggcaggagaccttgtcctccaaaactctggggtcgtgcattttagttggtctggcaagtccctgagggaccagcaaatgcagcagcttccagtgtgcgtctatcggagacttagagacgcacttgtggttcctttctggatccaggtaagaatagttaaggaaatatctgaagaacagaaaggaacttcttcaccacgataaaacctctacatgaaacccacagcagacaccacgctcaactgtgaaggactgaaagctcttcctccaaggtcaggaacaagatacggattctctcaccactgctctcagggcagcactggaggccctagccagagtaactgggcaagaaaaagaaaacaaagacaaattctccctattcacaaatgacacgaccttctacgtagaaaaccctaaagatccacatacaaaaaaccctaattaattatttcagcaaagttgcagggcacaaaatccatacacaaaacccagttatgtttctatrtatyatcaatgaacaatacatatgcaatagcatgaaaaaagtagtttacactgccgagtccagtggctcatgttggcagtcccascaccctgggaggctgargtgagaggctcacttgagcgcacagggctgcagtcagccatgatcgtgccagggcaccccagcctaggcaacaacatgagaccctgtcgctaactgcccttctctttaaagagtgcattgaggccgscgcggtgsctcacgcctgtaatcccagcactttggcaggctgaggcgggcrgatcatgaggtcaggagttcgagaccagtgtggccaacgtgggagaaatcccatctctactaaaaatacaaaaattagccaggtatggtggcacatgcctgtaatcccagctactcaggaggctgaggcaggagaatcacttgaactcgggaggcggaggttgcagtgagccaagatcgtgccactgcactccagtctgggcaacagagcaagactccatctcagaaacaagacaaaaacgcactgagaagaactgttgacttcgcacaggctgcrccttctctccctgtccctaataactggttttcatgacctagccacatgtccccctcacctgccctgcctgcctggattgggtggccccttgtttgtgagtggctggccatgscrttcccacaatgaccactcacctcctcagcacaggaggcttcagagcacccgcagtctctgtgccctcgtgtttgggacgggaatctttgcggaccgggtgggctgggctcaggcctcactgctgcctgtcagttctttccccatgggggtgcaggccctggccttcccctctggcgggaaccactgacccctcattaacacatcacagaagtctcttctcatgcgcccccagctgaggacacaggcgagcacgcccgctagaactccaaggtcagggttgacaagactgggaggcagcacacgggccgggggctgtgcagaggcccttctgggttcccaggggggtctcacggtggcagctggggaaccaagtgcccctggtactcgccgcagtcaggaggccatgcttgctaccacccagtcctgcctcctgcgcagcggtttccactgaagtcaccccttttattagagacctctgaaaacgtatctcccgtgtctctgttccaaagcacgtctttgtctgcactcctggggtcccagagggactagtgacacagtctgagtgtgctgtccctgtcacagcagcaggggctcagcagagaggaccctcccctcctgaatctgcctcgatccggaaaaggctcgcctggctcctcccatcccagctcccagccctcctcacaccagcagccccagaccttctgggcagcaagccagagacacattctcaggtgtcctgggattcagactcmacccrgagggtcacggagtgggggcttccgtacagcagcctcaggcggcactcccagccatgactcctgggaacaagcctgsgggtagggaccccygggcaccttttctgggcctgaccagttttctgttcatgctgaagctgctgcagcccctctggctcagtcctgccctctgcttcgcatctctctccrggcctcctccactgctcccgtttctcttttcagaacttaacagcatcagaacttccatgaaaaaaggccgttgacctctcagtctgcacagcagggttctagtggctgacggtggtgctcagagccacctgccctctggacctttgttctgggctgtgaaatgctcaaggacagggactgggtcagtcaccaactacctgggagtgttctgggtactgctgggtatagggctgcaaagaaaacagcacaagtgaaaaccagccctcactaccagggcctgtgttctaactgaagagagaaaataaaaatccctaaaaacaaagtcaaaacaagctcacagaagtcattcaacagggaagtggaccgtggctgcctggccatggacatcagtgatggggtcagaactgggaggatgacagagctgggtcctcgggcctctggggacgcacacaaagcagaagcgacgggttgggggcttcgggggtacactggggtgtgaacccagggcaggaccggcagaagggacgtaagagcctccttctcaagcaaggyggggttytgtcgacagagacacctgccatccactgctgggactctgaggcagcctcacagtgccgagaccaggtcccagctccaaagcaccaggaggmcccaccttctcacctgcccgcctgcccctcccccgcctcccgctcactgagggaagccaygtttcactgggctcgggagatccgcacacgagagagtgaactgagkgggcaccggggagaggccctggagcacaggcgggtgtctaggtcgcccaacggatgcctccagcagaccccgggctgcccacttacttcctttctgggtaaggctcaaaggactcgtccgaagactgggcattttgcttcttgtcattttcatcttcactcaagacgtctctaggaattaagagagaatcttcagcaaagccctgggcctgggcagtgacagacccaacacgacctcctgcctaaagataccaaatggacccccatgtcccacatttgagttcttctgaaaatgtcttaaatctaaaatccccaaatttccaatcccrtttccgaacacaaagggccagccaggctcacaagccagcaatccccacaagccatgtgctctgggcaccaggacactggacttggaaacagccctttccacagyggcccagaaggggtggaggcgctcaaaggtagcttcctgctaagcagactttgagaaatcgaccacctcaccccataactgcgaaccctatgcaactgatgggtttgccatgagtcacttctaagttcacaaaagtggctgggtgcagaggctaactcctgtaatcccagcactttgggaggctgacgtaggtggatcgcatgaggtcaggagttcaagaccagcctggccaataccgtgaaaccccgtctctactaaaaatacaaaaattggccgggtgcggtggctcacacctgtaatcccagcactttgggaggcagaggcgggcggatcacgaggtcaggagatcaagaccatcccggctaacaaagtgaaaccccgtctctactaaaaatacaaaaaattagccgggcgtggtggcgggtgcctgtagtcccagcgactcagaggctgaggccggagaatggcgtgaacccgggaggcagagcttgcagtaggccgagattgtgccactgcactccagcctgggcaacacagcgagactccgtctcaaataaaaaawaaataaataaatacaaaacttagctgggtgtggtggcgggcgcctgtaatcccagctactcgggaggctgaggcgggagaatcacttgaacgcgggaggtggagtttgcagtgagctgaggtcacaccactgcactccagcctgggcaacagagtaaggctcggtctaaaaaaaaaagttcacaaaaggaaaaaaaaaaaaaaaaaaagatttgtggcctttatgctataacctcagctgcggttttgtgtcctggtggtcctgaggacagtcttagccaccccaggtgcctcctggcacctgcccgatttcatcactgcacatcccactgggattggcccccaaactggggtgtcctcatttggatgaggtgcatctgtgttgcagccaaggtttacaggagagggtggaaacggtgcaaaccccagcctggcacagctgccctgaatggcgcttggctcagaggcaggggtggcccagggagtttgcagacactgatgaggtcccttctgaggcccgtcctcctgcaacacctcctcgcagagcctcggcttcaagccacaacagtgtcatagtcaagggctaaagtcggggtttctctactccagaaacatctggagcgaacacaaaactatggccctaaaacagtagcagaagcaaaggacccagccagagtggtttcaacaaactcatttctaggctgctctgggtcagaaaccctatcaggctccctctggagctgcctcaggtctgggagtgctctctggcacccaggaaaccatcaatcagagacaagaagcctcggaagctccccagcccctcctctcccgccacctcgagaggaggcgtgtcccaaccagggcacggacagccggcccctgtgatggcttagtttggtaccagcgcatgggcagccgaccctacgatggctgtttggtttttgaaggagaaattttaggctgtttaaacccactcttctctcacccctcagaaaggtcactgatggtttttgaaggagaaattttaggctgtttaaacccactcttctctcacccctcagaaaggtcactgaactcgtcttttacccgatcatccgaggttgaagatggaagctgcttctcacccaactgccctgagaaacaaagaacaaggctcctgttaccaacacggagcacagaaaggtctcacctgcaaggaggcatgattctactattgatgactagaagggagactggggtccctgaccctcaagttctccccaccrtggccccatccccaccaagggtgctatgcagcctctgatcctgccctgccagcccaacgtccagaagcacacaggcagcaacaagcatcagaaccctcaggaacagcagaaccagaaagcccagtccttccactgactccgatccagtccttctaggacagcctggacttggtggatgttctgagacatttaaaaaattactaggccaggcacggtggctcatgtctgtaatcccagcactttgggaggccgatgcaggtggatcacgaggtcaggagatcgagaccagcctggccaacgtggtgaaaccccatctctattaaaaatacaaaaattagccgggcatggtggcacacacctgtaatcccagctacctgggaggctgaggcagaagaatcgcttgaacccgggaggcagacattgcagtgagccgagatcgcgcactgcactccagcctgggcaaaagagcaagactccgactcaaaaaaataaaataattaaaaattactattctcagtccgggtgcagtggctcacgcctgtaatcccagcactttgggaggctgacgcgggtggatcacaaggtcaggagatcaagaccaacctggctaacatggttaaaccccgtctctacaaaaaatacaaaaaattgagctgggcgtggtaactcatgcctgcaattccagcactttggaggccrgggtgggcggatcacctgaagtcgggagttcgagaccagccttaccaacatggagaaaccccatttctactaaaaaatacaaaaatagccaggcatagtggtgcatgcctgtaatcccagctactcgggaggctgaggcaggagaatcgcttgaacctgggaggcagaggttgtggtgagctgatatcgtgccactgcactccagcctrggtaacaaagagtgaaactccttctcaaaacaaatacaaatacaaatacaaaaaaattagcagggtgtggtggcacaagcctgtaatcccagctactcgggaggctgagacaggagaatcacttgaacccaggaggcagaggctgcagtgagccgwgattgtgccactgcactcgagcctgggcgacagagtgagactccatcaataaataaataatactgttctctcggccaggcctggtggcgacagagcgagactccataaataaataaataaatattactgttctctcggccaggcctgaaggttcatgcttataatctcagccttttgggaggccaaggcagaaggatcacttgaagacagaaattcaagaccagcctgggcaaaagagtgagaccctgtctctacttaaaataagttttctttgttttgtttttttcttttttagacagaatcttgctctgtcggtcaggccagagcgtagtggtagaatctcagctcactgcaatctccgcctcccagggtcaagcgattctcctgcctcagcctcccaagtagctgggcctacaggcaaccacagccacatccagctaattttttgtatttttagtagagatggggtttcaccgtgttagtcaggatggtctggatctcctgaccccgtgcatccgcctacctcagcatcccagagtgctgggattacaggcgtgaaccactgcacttggcctaaaataagttttaaaaagtattgttcttggctgggcgcggtggttcacacctgtaatcccagcattctgggaggctgatgcaggtggatcacgaggtcaggagttcaagaccaagcctggccaacatggtgaaaccccatctctactaaaaatacaaaaattaggtgggcgtagtggcgcgtgcccatcatcccagctactcgggaggctgaggcaggtggatcacgaggtcaggagttcgagaccaagcctggccaacatggtgaaaccccatctctactaaaaatacaaaaattaggtgggcgtggtggcacgtgcccgtcatcccagctactcgggaggctgaggcaggtggatcacgaggtcaggagttcgagaccaagcctggccaacatggtgaaaccccatctctactaaaaatacaaaaattaggtgggcgtggtggcatgtgcctgtcatcccagctactcgggaggctgaggtagcggtgagccaagatggcaccaccgcactccagcctgggctacaaaacgagactctgtctcaaaaataaataaacacatagatagatagataagtaggtaaataaatagataaataggtagataaatagatacatagatatacagataggtagrtagatagagagagacaaagaagtaggaagatagataggtaggtaggtagatagatacacagatagatagaattgttctcaacacactgcatacaagtttacagagccaagcagctctaagatgtgacactcacaatcccgttcctacctgagrcccccgagccgcactgtctcatctgtgcacccgtatctagctaaactatctgggtagctgtgtttctgtttgggacagagtcttgctctgtcacccaggctggagyacggttgtgcgatgtcggctcactgcaacttccgcctcccaggctgaagtgattctcgtgcctcagcctccagagtagctgggattacagatgcccaccaccatacctggctagtttttgtatttttattagcgatggggtttcgctatgttggccaggttggtcttgatctcgtgacctcaagtgatccacccacctcagcctcccaaagtgctgggattacaggtagctacgcttttcggaagctcccctcaagactcaaagtgggaactgagtgctcaggtggggacaggtgcacagagcacacacaggacaagaggccggagggaaactggccctggccctcctaaaacaacatccaggagcagctgcaccagcccacagtgctatgggttctggggcccaaacaagggccttgtgtttcccctcagcctgtcagcagagaaagctgcgccacactggcccacaccagggtgtcaccaggcggctggctgagtgccaggaaatgacctgcagctggcccagggcagcagccgcagaggcaacggccattcttttctcccacatccacagacaaggccctattcttccctcttcctcagtcccctcagccccaagcacaggcttagaaaaagactcgacggctgatgagcgtgtctccacagaaactgctggaacagagccctgctcacagaggagcaagaggcggagacaggctggccgcccctccctgctctctggatgtggtgagcagccgcaggcagaagccccaagctctgctccttctcacaccacaccccagccaccacctagagcagtggagacattcactttctgctgaaaaccctgcccsactgaggagcacacatcctggtctagcaccagcaagaggtgcctcctacctggggccctgcaaaggggcaggcttggctgaggtgggaagcccgacctgggccccacygcgtcgctgtccgaaggaggctgggccacatccgtgctrggcagggtcttggtctcagccccaactggggtccctgtccctctaccctgggaggtctgaggggcatccccagggttccaccctcggtgctggggcagccgtggcgccgtctctttgtcccrtggccacttgactgccagcgcactgtccagcaagaaggccttgcagctggagctggtatccatggtgtagtcgtggccctggtcgcagccccacacgacctggatgacgccgcagtactcggaggacagtgtcctctgaaggtggggcagggccccgcagctggccgcatgtccatgcacccaccccaccaagccgtgcaggcactgggggctggatgtgatmagatccactgcagagagtcaacagagatgtcagatccacggctggtcggcacccagcccaccctccaccgggggaggactcacccagacacgctccctcctctgcccctgttgggggctgggcaccgaccctgcaaaggatcagtgtggccatgagcaggacaagcaggcggaggttcacagcgctcgtcgtacgggaccctctcgagatctcaaacctcagcggtccccataggcaactttctcttccctcaccccagctcctcccagttcatctctccacaacagtcccagggctgttggcactgaacccgggcatggcccattccccccacccagaggctcccgcggaggcacgccctgtccctctctcaacacccgtcacactgcagtactgacagcctgaacgtgctctgaacagactagggcgtactttgcacaaggcttccggcgaccagccggggaggcgttgaccctctgcaggaaggacttgagaaggctgtggcactggtagaactgggcgtggcagctcttgcagacaaacggagacaaggtggggtcctggcggacagccacaccaagcaggcgctggaagtcccgtacgagcacgcgctcctctgcggatggcctctccatgctcgctccaggcgccctctcggagatgctgcgcaggcttctcgaggaaaacttcccgtggcagaggcgacagtgacccatggcgagagcccggcctgctcctgcacagagcggcaggaagtgttagcagctggcaaaggaggctcctgagcacagggcgtcccggactccaggtccgagggcagcgcctgcagcgcccttcgcgcggctcccggacacagcaagcggctcgggcgcgcggctctcggcgggacaagccgccctgtgggggatgtggccgytggtccaagaaatctttcaaatttcaaaggcctctaaggcctctccagcgaagcaacttcaagagtgaaacctggaactgcaccctcctcccagcgaccgcgagacccggggcaggcgctgcgccctccaggaaacgccgcggtttcctgtctgccaattgcaggtgccgcctcctttccggctccgcgagggcacgaagcaggggagggcgattcccacgcgcgggcaccccagggcgacctgcccgcggtgacagcgctcctcacgccgggtcccttctggccgagcccgcggccggggaggccgggccggcgacgccggcgtcacggagcgcgaggaaaaccgagccggccgcccagcgcctatcccgacgcagccccgagtccgctacgcccttggccgggtggaggagaggccgcgccggcttccgggcgtcagtgcggctcctcccacgagcaacccctgccgcgaccccaacccgccacgcccgggccgcggacccacctgcctcgtccgcgccgtcctcgcccgcgtccccgcaggaccccaccgggccccaggcgcgccgcgccgtcgccccgtccaccctcggcccaccgctaagggaagggcggccccgagtccggctgacgccgccgccgccgtccgaggccccgcactgtcgggacgacccaggagacaggaagcggcccagccggtcccgcttcatggcagcggaggacgccagcagaatcccgcgggtgctgcccggcccgaggttcctagaggacccggcgttaggctccgctcggcgcgctggaagcgaggcggggcgggggaggggcggagcgagaagcaaagcgaggcgggcggggcgggccaggggccaggggcgggaccccgccggccgaggttccacccgcggtgccagcgcccccgctcgtaccgctcccctctcgggcccgagggcggccgtgcccgcctctgtcgccaatggagcgctggcctggggcggggcggtgggcggaggggctcgccgacacctcacgacgagtcctccagggagaggcgacgcggccctcaccgcctcttaccgtgggagacggaggcgcggggcgggcaggcgccggcggaggccacgcggcgcgcaggtggcgggcgggctgcagaaaggggaggggggccggggtctcacgtagagaggggcctggctgccgcggttagacgcccatggcaactccgtgaggggcccttctcgccagccccgtctcaagacggcgaagaggcccggctccgtcgcgacaacccacccggactctgccgcccccgccactaacacccgtggggcccgcagtacgcgcggagggggcccgtcgccggaagtgcggccgcgtcccttcctgcggtccgctgctcgggcggctccagcaccagcgccggctgcgttccgggcctccggtcgcccgtccagcccctcggctaccgccgccgcctcccccgctcggcgccatggccgctgcggccggggacggcacggtgaagccgctgcagagcgccatgaagcttgccaacggggccatcgagctggacaccggcaaccggccccgggtgaggcggggcgggggcggggcttggccgctgagggtggcccctggagggacccccgcccggggagggcgaggacggggccggctcgggctggagacttgggagcgggcgccagccgggatcccgggccgcggttcccgggcgaggacgggggcggggcgcagccgggcgtgcagtgaccttggacagctcagatcctgcggaccttggctttccactccgctcgctgagccggtgcatcacagcctgggctccacctgtagaggagatgtagcaggagggtccgccaggccaccttccaaaatccgagtgacgagcaggtccgtgcgttcgtgcatttttctgggcagagatggtagatttaatccggttgccacaggggacggcatgcagagaaggccacatacctgctcatttgtgatgctgtttgcagtcgtcttaggaaggaaaagcaggccggaggggtgtggcccgttcctgagatggggccgaatctaaggttggcgaccaggtagagaagctggcccagccacacccggctgcccaaggagggaaggagcctgcctgtgcctaggagaagcctcgttcctgaatctgctgctttccccaagttggtttttagggcagcaggtgcccccgcaagtcagaaatcctgcctggattatatttcgtctttctctctgaggcatagacttaaagataggaaacttaacagctagggataaaacaaaaaaacatagcatattgctgggcgctgtggttcacgcctgtaatcctgacactttgggaggcccaggcggtggatcacctgaggtgaggagtttgagaccagcctggccaacgtggtgaaaccccgtctctactaaaaatacaaaaattagctgggtgtggcggtgcacacctgtaatcctagctccttgggaggctgagggatgagaatcacttgaacccaggaggcggaggttgcagtgactcgagatcctgccactgcactccagcctgggcgacagagtgagactctgtctcaacaaaacaaaacaaaccaccattctgtggttccaatgacctgtgccttgtcagaggggtcacacagccttgaaaggtaacagttctaggctcctgtgtgcactggaaatacgtaactcgcaggttctgggaaagggatttctcggaacttaaaccgggaagtgatttgaaaacttccagtatcactccctttatcctctcagaaaagtatttttttaagccactgaatgaatcacccttgagttgcacaagaaggaaacattgcatagaatgaaaaatgacagcaaactgctgaggtcacttccccaggcccactgaatgagaatatcagttcctgtgctggagagaaaggcagtcagaggagaaaatgaggtccagctcgtccctggctctctctctctctcaggtcctgatgtcttttccaagtctggagagcagcgatgctgcctgtgccctgcgcagaaaaccgtgttccggctgcagctaaccaccgcaggctcaatgtctctgggtgtatctcagagataagcaggtggtggtgttccttgcttatcccacaagggcacctggccggaataatggagtcacttccctccactggcctgaccccactctttctctttcctggacacaggaggcatacacggaatacctgaggagcatccactatatctcccaggtgttactagaagaagtggaaaccactaaaggtacggctcagccagccgggcgcggtggctcacgcctgtaatcccagcactgtgggaggcagaggcgggctatcacctgaggtcaggagatcgaaaccatcctggctaacatggtgaaaccccgtctctactaaaaatctaaaaaatcagctgggcctggtggcgggtgtctgtagtcccagctactcgggaggctgaggcaggagaattgcttgaacccgggagcagaggttgcagtgagccgagatcaccccattgtactccagcctggaacaagagcgaaactccgtctcaaaaaaaaaaaaaagaaaagaaaaagaaaaaggcatggctgagccctgctgcttcctccatgctggacaaattgtgggcatcctagcccttgatgggtgccaggcttcggcgggggtctcttgtatccttccagcctgaccatttgtagtaggtggaccagcccacactcagtgtgatatagtggcaggaagggaccagcgttgtggataagaagatggagactggggtgtggcaagacactggctccagtgagcggcacagacgtggggcagcattccagctgtggggtgtgcaaaggccctgaaataggagtgggcggggtggggctgtgtgcatgccttgggtggaactggggccgttctggtgtgcagggaaacttgaagagactttgagctttgagggagaggacagcctgggagtggagcctcaggtgaggactgaggatggcagtggccagaccacccaggatgggagcagtaaacggcctcggggtgcgtcctgaaggtggaacagagcagacttgcaggaggcagatggggcaggagcaaactggcaaggagaggaatagcaagttccgcaatgaacacattaagtttgagaggccagcagccgctgcacataggatcacagaggtcagggggagccactggacatagagcacagaggtcagggggagccactggacgtgggatcacagaggtcagggggacccactggacgtgggagcacagaggtcgggggagccactggacgtgggagcacagaggtcgggggagccactggacgtgggagcacagaggtcgggggagccactggacgtgggatcacagaggtcgggggagcccctggacgtgggatcacagaggtcggggcagccactggacgtaggatcacacaggtcagggggagctaacagttgccccagctccctagggagccggtgagctcggctgagctctggcgctccaagattgaggagttgggtggaggagtggcagaggatcccctggggagagcaaagtcccagaagacagaggaactccagtggcccaccgtgtctggcaaggtggggacgggtaagggcagtttccggggggagtcgggggctaaatcggggcgggatgagaaaatgggagtctatgagaagttttctgtgaagggcagcagggaggtgggtcaggcgctggggcggtgggtccaggggcgagtcacagagaggcagctcccacggcgcgcagaagggctgtgtgagcaggtccatggtcgcgcagaggtgctccatgccaagctacgggaaggcaggactttggggacacagccggtgggagatgggtgaggcgatcccctcagcacgtccttgtctctgtaaaacggccacttcccagaggcctgcagttgcaagtgaagctgagtgagcactaaaggcctgtttagggtcgaggctgtgacgggcctcgatgaggggcccacagccttagcagactcaggaggcaaaaccaggggcagatgattagaaatgcgtgggtggggggacttgcctggggtccatggtgggggcaggggccttgcctggggtccatgaggaatagtcggcttgcccggggtcagtggggggtggaaggggcagtgggcttgcctgccttttccgttgcctcattttatctcagcagtaagtaacagtggtagagccgactgtgaccagccttcttgtccctcccccagaagctggggaaactgtgccccccgacacctccaagatgctgaagctagcacagcagtgtctggagagggcccagtcgacggccgccaagcttggtgggtctcctgcagtaggcggctctcctggggcatcccccaagcccgcatctcctctgtgggatgtggcccaccgcttgacccctggttacccatggcttgcagggaaaacacgcctgaagccaaccatgcctgcagctgctcccattccccagcctgccggccgacaccgccgtgtatactccgatgaaggaggaaagctctctccttttctgccacccgagatcttccagaagcttcagggggcagagtcacaaagctgtaagaagtaagatggacaagatgggaggtgggatgagcctgggattgggtttttgaggctgagaaagatgagctgatgacagcgattttttttttgttttttgagacagagtctcactctgtcacccaggctggagtgcagcggctcaatcttggctcacggcaacctccacctcccgggttcacaccattcttctgcctcagcctcccaagtagctgagactacaggcgcccaccaccacacccagctaattttttgtatttttagtagagacggggttttgccatgttagccaggatggtttcgatctcctgacctcgtgatgcgcctgcctcggcctcccacagtgctgggattacagcgtgagtcaccgcgcccggcccccacagtgctgggattacaggcatgagccactgcgcctggcctgacagcgaatgtttttaaaatgagtcccagaatgggaatatcccctggccggacacaagcaaatgcaggcggcctggtggctcacgcctgtaatcccagcactgtaggaggccgaggcgagcagatcacctgaggtcaggagttcctgaccagcctggccaacatggtaaaaccccgtctttactaaaaatacaaaaattagctggccgtggtggtgtgcacctgtaatcccagctactcaggaggctgagtccaggagaatcgcttgatcctggaaggtggaggttgcagtgagcgaagattgtgccactgcactccagcctgggcaacaagagtgaaactccgtctcaaaaaaaattaggcatagtggtgtgcccctgtagtcccaactactagggaggctgaggtgggaggctcacttgagcctgacaggttgagggtgcagtgagccgtgattgtgccagtgcactccagcttgggcaacaaaatgagactctgtctaaaaaaaaaaaaaatgaccgggcgcggtggctcacgcctgtaatcccagcactttgggaggccgaggtgggtggatcatgaggtcaggagatcgagaccatcctggccaacaaggtgaaaccccatctctactaaaaatacaaaaaattagctgggcgtggtggcgggcacctatagtcccagctactcaggaggctgaggcaggagaatcccttgaacccaggaggcagaggttgcagtgagttgagattgcgccactgcattccagcctgggcgacagagcaagactccatctcaaaaaaaaaaaaaaaaaatttagctgggaacaagaatgagttatatatctatatatatgtagaaatccatacatacaaaactgagcagacaagtttataacagcagagcagatatagctgaagagcaaattcatgtattggaaaaaaggtcaaaagatagctagaatgaattacagaaacaaaaaataaagacagaaaacaagagatggaaagcctaacgtgttcgttggagttccagaaagaaaatgggagggaggccaaggcaggcagatcacaaggtcaggagttcaagaccagcctggctaacatggtgaaaccccatctctactaaaaatacaaaacttagctgggcatggtggcgcgtgcctgtaaccccagctacttgggaggctgaggcaggagaatcgct

SEQ ID NO: 96226 - DNA, 23566 bp, Homo sapiens
gagatcactccactgcactccagcctgggcaacagaacaagactccgtctcaaaaaaaaaaaaaaaaaaaaaaaaaaaagaatatttactaagcatctactatttgtcaggcactaatcttgttcctggggaggcagtagataaaagacaaatatgaggagactggatatttgattccagatagcccccttttttttgacacaaagtctcaatctgtcacccaggcgtgcagtggcaggatcttggctcattccaaccactgctcctgggttcaatcaattcttgtgcctcagcctcccaagtagctgggactacagatacgcacagacatgcccggctaattttttgtatttttttgatagaaagggggtttcaccatgttggccaggctggtctcgaactccttgtctcaagtgatccacctgccttggcctcgcaaagttctgggattacaggcacgagccaccgcgcccggcccagacagcccttttttgttgttgttgtttgtttgtttgtaacaggtcttgctctgtagtccaggctagaatgcagtagcatgatcatagctcactgcggcctcaaactcccgggctcaagctatccgtccctagtagctgggactacaggcatatgtcactacactcagctaattaaaaacttttttttttttttttttataaacagagggtcagccaggcatagtggctcatgcctgtaatcccagcactttgggaggccgaagtggacagaccacttgaagtcaggagtttgagaccaacctggccaacatggtgaaaccctggctctactaaaaatacaaaaattagccaggtgtggtggcacgtgcctgtaatcctctactcaggaggctgaggcaggagaattgcttgaacctgggaggcggaggttgcagtgagccaagatggcgccactgcactccagccccagcctgggtgacagagcaagactccgtctcaaaaaaaaaaaaaaaggctgggctttgcagctgacgtctgtaatttcagcactttgggaggccgaggcaggttgatcacctgaggtcaggagttcaagaccagcctggtcaacatggtgaaccctcgcccctactaaaaatacaaaaaaaaaattagctggacatggtctgtactcccagctactcaggaggctgaggcaggagaatggcttgaacctgggaggcagaggttgcagtgagccaagatcatgacactgcactccagcctgggtgacacagtgagagactctgtctccaaaaaaaaaaaaaaaaaaaaaaagacagggtccagttctgtttcaagttcaaggtcaggctggtcttgaaatcctggcctcaaaagatcttcctgcctgtggctcccaaagtgttgagattacaggtgtgagccattgttccctgtccccagatagctcttttaaagcctcattaacattctatatttataagtgatattagtaatcacacatttgtgaaattaccttgcctgaagaaaacagaaattcaaaaatggtttttgcttcaccctctccctccaatgtcactgccctcccatctggtccttaagtttaattttctgttgcagaatttgttttttaagtggccactgctcacccttccctcttcccctctgttctccatctgctttttactttctgtcctttccctcccaagattgatggccttggcacatgtgactggatcattttttttttttttttttaagagatggagcctcactctgtcacccaggctggagtgcatcggcacgatctcgggtcacttcaaccactgcctcctgggttcaaacgattctcctgcctcagcctcctgagtagctgggattacaggtgtgcgccaccatgccctcctaatttttgtatttttagtagagatgggttttcgctatgttgaccaggctggtcttgaacttctgacctcaggtgatctgcccgcctcggcctcacaaagtgctgggattacaggcatgagccactgcgcctggccttgtgctaattttttttttttttttttgaaaaagagtcttgctctgttgctcaagctggagtgcagtggcgtgatcttggctcactacaacctccacctcccggggtcaagcgattctcccacctcagcctcctgagtagctgggattataggcacctgccatcatgcccagctaatttttgtattcttgtagagatggggtttccccatgttgaccaggctggtcttgaactcctgacctcaggtgatctgcccaccttggcctcccaaagtgctgagattacaggcatgagccacaactcccaggcccttgtgctgatttttgaaggcagttgaggaagcggagaaacagaggcagcaatctttggtgttctccacttgtagatgtatcattccaacctttgcctccttcttcacattaccctcctctctatgtttctctgtgtcatatctctctttccccttctcttataaggacacttgtcattgggtttggacccatcctacatccaggatgatctcatctctcaagtttcttattgttgactgggtgcggtggctcacacccgtaatcccaccactttgggaggcagaggcaggcagatcacctgaggtcaggagtttaagaccagcctggccaacatggtgaaaccccgaatctaaaaaaatataaaaattagctgggcatggtgtcaggtgcctgtaatctcagctactcggggggctgaggcaggagaatcgcttgaactcaggaggtggaggttgcagtgagcagcagagattgcaccattgcactccagcctgggcaacagagcaagacactccctcaggaaaaaaaaaaagcagctgggcgcggtggctcacacctgtaatcacagcactttgggaggctgaggcgggtgatcatgaggtcaggacttccagaccagcctggctaatatggtgaaaccctgtctctactaaaaatacgataattagctaggtgtggtggtgtgggcctgtagtcccaggtactctggaggctgaggcatgagaatcgattgaactcaggaggtggaggttgcagtgagccgagatcatgccactgcactccagcctggttgacagagtgagactccatctcaaaagaaaagaaaagagaaaaaagaaaagaaaaagaaacataaggccgggtgcagtggctcatggcctctaatcccagcactttgggaggccaaggtgggcagatcacaaggtcaagagattgagaccatcctggccaacatggtgaaaccctgtctctactaaaaatacaaaaaaaaaaaaaaagaacatagctgggcgtggtggtgcacccctttagtcccagctactcaggaggctgaggcaggagaatcgcttgaactccgcaggcagaggttgcagagagccgagatcatgccacggcactccagcctggcgacagagtgagactccaactcaaaaaaaaaaaaagaaagaaaagaaaaagaaaaaacacaatagatggaatagaactgcagaaaaatatggcaaacacattatatcttttttcaaaaataaaaattaaaaaattgctcaagggatccacccaccttggcccccaaagtgctaggattgcagatgtgagccaccacacctggccaacacattatatctctaacataaaagaggttctataaatggattttaattaaattaattaattaattaatttatgttttctgtttttgagatggagtctagctctgtcacccaggctggagtgcagtggcactatctcagctcactgcaaacttcgtctcccaggttcaagcaattctgtctcagcctcccgagtagttggcactacaaatgcccgccaccatggccggataatttttgtatttttagtagagacggggtttcaccatattggtcaggctggtcttgaactcctgacctcaggtgatctgcccgctttggcctcccaaagtgctgggattacaggagtgagccacagcacccggccatgcatttctattatttatttatttatttatttttgagacagagtcttgctctgttgtccaggctggagtacaatggcgtaatctcagctcactgcaacctctgcctcctgggttcaagcgattctcccaccccagcctccagagtagctgggatcacaggcccgcaccaccacgcccagctaatttttgtatttttagtagagacaaagtttcaccatattggccaggcttggtctcaaactcccggcctcaggtgatccacccgcctcggcctcccaaagtgttgggattacaggtgtgagccatcattcccaacttattgtgttttttctttttcaaaacttatcactgtgaggtcatgcaaaaccttcaaaatatttatgtaggcaaatatttttcttttttctataatggttctgggcttcctgtcttgcttaaaatttctgcctcattggccagtaatcacatcacttttgggaggctgaggcgggcagatcacgaagtcaagagatggagaccatcccggccaacacagggaaatcccgtctctactaaaaaacaaaaaattagccgggcatggtggtgcgcgcctgcagtcccagctacttgggaggctgaggcaggggaatcccttgaattcaggaggcggaggttgcagtgagccgagattgtgccactgtactacagcctgacgacagagcaagactccgtctcaaaaaaagaaaaaaaaaattaggcgtgtgtggtggcgggtgcctgtaatcccagctactctggaggttgaggcaagagaactgcttgaacctgggaggtggaggttgccatgagctgagatggtgccactgcactccagcctgggcaacagaatgagactgtctcaaaaaaaaatttttttttcctcttaagtttctgttttgtaaatttttatattttttaattcttctggattttttttttttttcctagacagggtcttgctctatttcccgggctggagtgcagtggtgctaccgtgctatctcgactcacaccagcctcgacttccctcgacttcctgggttcatattatcctcccacctcagtctcccaagtagctgggacaacagatgcacatcaccacactcacgtcatttttgtcagtctcgccatattgcccaggctaggtgtgaactcctgggctcaagtgatctgcccacctcggcctcccaaagtgttggtattacagcctcttctggaatttatttttcaatgttcttgctttaaatcgaaagtcaattaaaaccaggatcattggccgggcacggtggctcatgtctgtaatcccagccctttgggaggccgaggcgggctgatcacctgaggtcgggagttcgagaccagcctgaccaacgtggagaaaccccgtctctactaaaaatacaaaattagccaggcgtggtggcgcatgcctgtaatcctcaggaaggctgaggcaggagaatcgcttgaccgggggacgcagagttgcggtgagccaagatcgcgccattgcactccagcctgggcaacagtagcgaaactctcattcaaaataagtaaataaataaaaaataaaaaaactaggatcatttctcaaataaactattggtttgtcacttaattgatttgtcacgtttgctttttattatgttgtacttctagattttatccctgactactcaactatttgtccagggtaatataggagcattacgttagaatatactagctttggagtgagttaaaatgttggttttcagtaagtaaaatttaagtgtcccactagaaagaggactgtgatttttcgcggttggggtcaaaggtaacaggaaacaaggtaggcaaaaaggggtaaagtttaaggctctgcagacaaatgttaggtgttgttactgcaaaattgaacaaagaacaagaatcttgggcttgaaagcctggacttttccctagaaacaaccattcacagtgtagggactgaagggccagctgtgaggcagccgagctagcgccctatcctcacaaagggagtgaaagacggagacgggtatcgggaaaaaaataagtgctgcgtccaagaatttaggagtcagtccatgtcgcagaacagggagaagggctgggaagaaaaggccagcaaggaacctaggaagagcggaatctctcgggaggaggttatggaggccgcagcgggtgatgggtctctcctgaaggcgacttgccggggattccctattccgcagtcctctgggagtcgcaaagagagttaggaaaggccgtgcagcagcgtcgcagccgggctggcaacggtagaggaatcggcagtgaggcctctccccacaccctgccagcccaactgccgccgccgccgccgccgccaccgcggggcccgggattggcccgagggcggcgcagggcggggcgggggctgctgggatgcaggcctgagaggctggcgcgcgcgcacacgggcgcgggttcggcggcggcgcgcgcgtgctctgtcggcctgtgcggcgctgcggcggagcgggccatggcagtggggagggggcgagtgtagtgctgcgcggggcaggcgggaggtgatcgagagaggcagggatgggggcgccggagtggagcggttgcggcggcctgggctgctgactgcgcacttggaatagtagcaggcggcggcggcggaacgccaggcaggtgagtgcggcggccgggacccggatgcggcgcggctgaggggcggctgggtcgcggcgccggctgcggtgcccccgggcgtgctggcggtgcgttctagcttgccgctacctgcggcgctggcgactcttgtggttgcaccgcgcttcctgccagcttggaggataaccgcctaccggccggtgggggcgtctggcttggttgcggcccgccctgggctctccaaggtgagtggcgccccccggcccctgggcggcagagacgctgccgggcgtcccgggtcactgtcgctttgggtcccgttcctgaggggcgtttctgtggagagacggcgtactcgcgccccgcgtctatgcggacacctccggaacttcccgaccctcaggtgcctttttgcgcagaagtgtatttcagaggcgtggacccagggttattaggttatggacatgttttcgaatcccaacgccgctgctgaccagtcctggggccttgggccaaaatatcctgatgtgttaaatggaaataataatacatacaccataaggttgttgtgaggttaggcataactgaacaagtgctaagtaaatgatacccctgctgcagcatctcgtgttagctattgctaattcctggctgctggcgtgcgtttgggggcacatttatttccgatctgctctggtgttgcagtaaccgatactggagttgcttaatattggagcctgttaacytcgcagtggccaaaatagaatcctatagtcccttactagaatcctgcagtctcttcccgcagggctgaattggaaccctgtctcaggtactgagtgggaattaytgctgaaatgaaaccgagcaaattcgggattcgcttaggatgaaagatggtgggacgtaaacttgaagtgctttgctgtttcatctcaagtgacacttgaactctgccacttgttacagagttataaacacacgaagagtatggaaacagactcttttttctgcattgctacatccaaagggagtgacaagtgcttttgtaaacatcattgtgggcagtgtgactgtctggtgaagtcatgataattaaatgagtacttattttgaagcactgaatggaagtttggagatatgattcgtaataaaattgtctccaacgagtcagaggtctcagcagttcattaatcatttggggatttttatgctacattgtaagattttatggtaaaagcagaactgtttaagtcataataatgtagcacaggaaagggtggtcagataaggatcttaacccagtttcagaatgcaggtatggaagaaagtaaagtcttttttctgaccaggtgcgttggctcacgcctgtaatcccagcactttgggaggccgaggcgggcggatcaattgattccaggagttcgacaccagcccaagcaacatggtgaaaccccgtctctaccaaaaacacaaaaattagcagggcgtggtggcgggcgcttgtaatcccagctacttgggaggctgaggcaggagaatcccttgaacccgggaggcggaggttgcagtgagccgagatggcaccactggactccagcctgggcaacagagggataccctgtctcaaaaagaaaaaaaaaaaatctttttgagaccgaatcttgcttcttttttaaaaaaaaattattgttgttttttgaggcagggtctcggtctgtcgcccaggctggagtgcaatgtcgccatcttggctcactgcaacctccgcctcctgggttcaagcgatcctcctgcctcaggctccctagtggctgagactacaggggcgtgccaccacgcctggccaatctttcaattttgtttttttttttttttttttgagacggagtttcgcttttgttgtccaggctggagtgcaatgacgcgatctccagctcaccgcaacctccgcctcccgggttcaagcgattctcctgccatagcctcccgagtagttgggattacaggcatgtgccaccacacgcggctaattttgtactttttttggtagagacggggtttctccatgttggtcagggtggtctcggactcccaacctcaggtatccgcccgcctcggcctcccaaactgctgggattacaggaggaagccaccgcgcccggcccaatctttgtatttttggtagagaggtggttttgccatgttggccaggctggtcttgatctcctgggctcaaatgatccgccagcctgggcctcccaaaatgctgggattacaggcatgaaccaccgcgaccggccgaaagtaaaaatcttaaaggtttaaactggaattgtattcactaaagccaaaatgacttaagaagcaaaaatctaatttacacccctgattcacaccctgagtccaccaccttcggagtgttttttagaagtgttgaaaatcaagtcgggttttgatttgtcattttgcacctcttgcctatctttcttggtgttcttaaagactcatccataaaggcttttgcttcaacttgctttgtgaatgtcagccaactatatggaaaaaagtgaaaaatgaacactgtagtctaaattatgttctttcttgaggttttcccagttgtctagcttagactgttgaactcaacagtagaactactgctagccactgtgaaaaggctgggagtcagaagtcacctcttggttttaggcctcaacctgggtaaaaacagctggggctatggggatgttacccagtcttatgggcctctgttttgtttgtttgtttgttttgagatggagtctctctctgtcgccaggctggagtgcaatggcacgatctctgctcactgtgacctcccgggttcaagcgattctcctgcctcagcctccaaattagttgggactacaggtgcacaccaccatgccccgctaatttttgtatttttagtaaacatggggtttcaccatattggccaggatggtctcagtcttttgacctcgtgttcctcccgccttggcctcccaaagtgctgggattacaggcgtcagccactgtgcctggccccaataaataaattatttatttttattttttattttgtttttatttatttacttatttagagactgagttttgcccttgttgcccaggctggagtgcaatgtgcaatcttggctcactgcaacctccgcctccccggttcaaacaattcttctgcctcagcctcccragtagctgggattacaggcacccgccaccacgcccagctaattttttgtatttttaggggtttctccatgttggccaggctggtcttgaactcctgacctcaggtgatctggccgcctcggcctcccaaagtgctgggattacaggcgtgagccactgcgcctagcactatttttaattttwatttaatttaattttattttattttattttatttatttgagacggagtctcactctgtygcccagcctggagttcacacctcctgggttcacgccgttctcctgtctcagcctccccagtagctgggaccataggtgcccgccaccacgcctggctaattttttgtattttttttttagtagagacggggtttcaccgtgttagtcagggcggtcttgatctcctgacctcgtgatccgcccgccttggcctcccaaagtgctgggactccaggcgggagccaccgcgccttgcccccaataaataaataaaatacttaactgaggaaagtgagttcctgctttattattattattattattattattattattattattattattattattttgagacggagtttcgctctgttgcccaggctagagtgcagtggtgcgatctcggcttaccgcaagctccgcctcccgggttcacgccattctcctgcctcagcctcccaagtagctgggactacaggcgccagccaacacgcccggctaatttttttgtgtgtttttagtagagacagggtttcaccgtgttcaccaggatggtctcgatctcctgacctcgtgatccgcccatctcggcctcccaaagtgctgggattacaggcgtcatccactccggcccctgctttattatttgtgtattctcttggacttgttccttttgattttttgttttgttttgttttgtttgagacggagtcgtgctctgccgttcaggctggagtgcggtggcgccatcttggctcgctgcaacctccgcctcccgggttcaaggaattatcctgcctcagcctcccgagtagctgggattacaaggcgtgcgctaccacgcctggctagtttttttgtatttttagtagagacagggtttcaccatattggccagactggtctagaactcctaacctcaggtgatccgcccacctcgtccttccaaagtgctgggattacagaggtgagccaccgcgcctgggcccctttttttatttatagaatttggcttaccgtggtgggcagggggtggttgtggtggtgtactagaaaatcacattatgtaaaggaaccttctaggataytcgagttttatggctttcctcctcttcactctctttgacttttccttctcttgttgagttcaaaacattctaatgccccagggcttccggcctgtccctattcctttctctacctgtattctttctgaatgatctcatgttgtcctgtcctgtggtttatttatttatttttagtagagaaactaaaaataagtaaattgttgtcaactgctgttgcctctcaagatttttatctccagtcctgaacttcagtcttctgcctgcctacatgacaccttcatttcgtctgtttttaggcgtctttcaatgtaatgggttcgcatggatctcttaattcccattcttattccttccctagcagttttctttcttcttttttgagatggagtttcgctcttgttgcccaggctggagtacagtggcgcaatctcggctcactgcaacctccgcctcctgggttcaagcgattctcctgttttagcctccgaagtagctgggattataggcgcacgccaccacgcccggctaaccctagcagttttcatgtcgtagcaccccgctgccccactcaccatcctgtttgagtgtaaaatctagtggttatgtttaatttatccctttgtctcatcctccctcactgtacgctcagccaatccttgagcacactctaaattttatctccaaaatatatcccacatatgtttattttcatttccactaccccagttcttcctgggtagtaccttcctaactggtctccttgcctctgttcttactctatttttcacacagcagtcggagtgatttttacttattctcctgttccagtggattctcattacactaagaagtaaatccaaactttatctgcatgtcagcgaattgtttatttttattttattttatttttaaaatagagatgggatcttgctatgttgctcaggggtcttgaattcctaggctgaagcaatccacccatctcagcctttatttatttttattaaattttcctttatctgtcataatctgtttgagtgctaaaaaataaataaaataaaaaaatttggccggacacggaggctcacgcttgtaatcccagaactttgggaggctgaggtgggcggatcacctgaggtcaggagttcgagaccagcctggccaacatggcaaaaccccatctctactaaaaatacaaaaaaaaaaaaaaaaaaattagcctggtgtggtggcatgcgcctgtaatcccagctattctggaggctgaagcaggagaatcggttgaacctgggaggcggaggttgcagtgagccaaggtgcaccattgcactccagcttgggcaacaagagtgaaactccgtctcagaaaaaaaataaaaaataaaagataaaatttttttagaggcggggtctccttatgctgcctaagctggagtccagtgggcattcacaggtagtattatagggcactacagccttgaactcctggtctcaagtgatcctcctgcctcagtctccccagtagctttaggcacatttcacctctcccagcttgcttattttattgttcatttatttatggtctttttcctccaatataatataagcttcatgatggcagggaccttgtcttccctggagtattttcaggaaccagaacaatgcctggaaaatttaactaatggggctgggcgctgtggtttacgcctgtaatcccagcattttgggaggccgagacgggcggatcacaaggtcaggagatcgagaccatcctggctaacaccgtgaaaacccgtctctactaaaaatacaaaaaattagccgggcgtggtggcgggcgcctgtaatcccagctactcgggaggctgaggcaagagaatggcgtcaacccgggaggcggagcttgcagtgagccgagatcgcgccattgcactccagcctgggcgatagagcgagactccatctcaaaaaaaaaaaaaaaaaaaggaaatttaattactgttgaatgaataaatgtaggaatgaaattagttctaaaatcttttgattgaatgtacaatgtatatcctgaacacacttccccctttttttggttccggatttgggcaaattagacagtaaccagagaccctagagttattattctatcaggtacctttttttgttttgttttgttttttttgagacggagtctcgctctgtcacccaggttggagtgcagtggcgcgatctcagtttacttcaagctccgcctcccaggttcacgccattttcctgcttcagcctcctgagtggctgggattacaggcgcccccaccacgcccggctaattttttttttttttgtatttttttagtagagacagggtttcaccgtgttagccaggatagtctcgatttcctgaccttgtgatccgcccgcctcggcctcccaaagtcctgggattacaggtgtgagcccccgggcccggcctttttgttttgtttttgaagagaccaggtctggttctgtcacccaggctggagtgcaggggcacaatcgtagctcaccgtaacctcgaactgctgtgctcaagtgatcctcctgcaccggcctcctaagtggttattaatagtactataggcatataccatcatgcctgcctggctaactaaaaaaaaaaaaaatttcttaggtagaagacacaggctcttgctatgttgcccaggctgggtctcatgctcttggcctcaagccatcttcctgccttggcctcccaaagtgctctgattacaggctagagccactgaacccagccttctattaggcgttcttaactctctcaatcttcgttaaggtgctctacccctgaaaagaccaagcctttagacattaagcaattaatgacaaaaacgagtgtgaattttgttcactgcgtcctgaatcattagtctttttgaaaataaggaaccaaacaaaaccaccttgttttgtccttttgaggccttgaattttggtcttgactgaaggggactggttttaggatgtggtagtttgatcctgtattcaatcgtatttagtatttttagagatcaggaatatttatttatttatttatttattgaccgagttttgctcttgttgcccaggctggagtgcaatggtgcaatctcggttcactgcaacctctgcctgctgggttcaagcaattctcctgcctcagcctcccgagtagctgggattacaggtgcccacaaccacgcccagctaattttgtatttttagtagagacggggtttttaccatgttagtcaggctggtctcgaactcctgacctcaggcgatccgcctgccttggcctcccaaagtgctgggattacaggcataagccactgcgcctggccaggaatttttagtttaattagacaacttagtttttgaatctgagaccctcccattgcacacgtgtgtgagagagtgtatgtgttgtaagaatgtatgtgtatgtatgctctgaactatttggtttagagttaccatatcttttttttttttctcattaaactttgttttgatgggtctcaaaattctgtgaccgatttttggtccagttgtttccattaaaaactactgattttaaaagttaataatttaaaactgccacatgccaaaaaaaaaaaaaaaaaaaaaacccaaatggtccataacacattctccttttcttctgaggggtttacagtgcattgttatcattaaccagtcatttactattaaacctaaatggctgattgaaacaaacatttctgaggctattcttccaccactgattaagactcaggtggcaggtattagggataatattcatttagccttctgagctttctgggcagacttggtgaccttgccagctccagcagccttcttgtccactgctttgatgacacccacggcaactctgtttcatatcacgagcagcaaaatgacccagaggaggatagtcctagaagctctcaacatacatcggcttgtcaggaaccatatcaactatggcagcaccaccagacttcaagaatttagggccatcttccagcttcttactagaatggtgatcaatctttttccttcaggtcagcaaacttgcaagctgtgtaagctgtgtgacaatccagtacagtggcatagccagcactgatttggcctgaatggttcaggataatcacttgagcagtgaagccagctgcttccattggtgggtcatttttgctgtcaccagcaacgttgccgtgatgaacatctttgacagacacattcttgacattgaagtccacattgtctgcaggaagagcttcacccaaagcttcatggtgcatttcaacagactgcttcagttgtaacattgactggagcaaaggtgaccaccattccgggtttgagaacaccagtctccacttggcctataggcacagtaccaatatcaccagttttgtagacatcctggagagacagatgcaagggtttgtcagttggatgagttagtggtaggatgcagtccagagcttcgagtagcatggttcccctggcattgccatctttatgggtgactttctatcccatgaaccaaggcatgttatcacttggcttcagcatgttgtcactgttcccaccagaagttggcacaaatgctactgtgtcggggttgtagccaattttcttaatgtaagtgctgacttccttaatgatttcctcatatctgtattggctgtagggtggctcagtggaatccattttgttaacaccaattagttgcttcacacttcagcatataagccagaagggcatgctgacaggtctgcccatttttggagataccagctttaaattctccgacaccagcagcaacaatcagaacagcacagtcagcctgagatgtccctataatcatgttattgataaagtctctgtcttcttgagcatcagtgatggtcacgtaatacttgctgttctcatattttcatagggagataccaatggtgataccatgttcatgctcagctttcagtttatccaagacccaggcatacttgaaggagtcctttcccatctctgtagctgccttctcaaatcttttttttgacagggtctcactctgtcacccagattggagtgcagtggtgcaatcgtggcccactgcagccttgacctccccaggttcaagtgatccttccagcctcccaagtagctgggagtacaggcatgcaccattatgcccagctaacttttttttttttttttttttttggtattttgtagaggcagtgtttcaccatgttgcccaggctggtctcaaactcctgagctcaggtgatttgcctgcttggcctcccaaagagctgagattacaggtgtgagtcatggcacccagcctaggatctttctttttgtgaccccccttctccccgagaatgtatatctccttcatttcttttcttttttttccgaagtggagttttgctcttgttgcccaggctggagtgcaatggcgtgatcttggctcactgcaacctccgcctcccgggttcaagtgattctcctggtctcaaactccagcgtcaggtgggtccacctgcctgggcctcccaaagtgttgggattacagggatgagccaccgcgcccggccatatctccttattttcttttaatagctcctcagatatttagcagatcacctgaggttgaccctttaactgggagtagctggcttactgctggaatcaagaatgtgaatctcaacagtcatctcctatattatagtattgctagagataggtctgcagctcagaattctccccagtgtaaacccaaggacagcatccctggtcctgtagtttgtcttctggtgcttcaggcattcaggagaccaccaggcaaatgctgatttgccctcaagggaaatgcgatcctgattatccatgcctgcagggggaggattatatggattaaactaaatccatgggtaatccaaaggctttgttttaaactacagtttaaccacattcctgaccacagttttttcttgtatttctaataactaatttataatatttactgatttcaaatttatcttcttctcctgccacttagaagtaatggcagttgtgaagttgagaaaagatggaaggagttagataaccagcagatgatttggtattaactgggtggtttagctacagtgctttctagaccatgaagacctgaattccatgaattccttacctgctgagtcattggtaactgtcaacaagagctcaaactccattttgatacatttgtactttacttgcttaaatgaatgagctcttgtgatttaagtaatcagtatttcagatgatcagaattataacccgatttgaagttttcctttactgtttaataagttagcctactgatagtttttttattttaaaaaaattttttcattattattttttgagacagagcctcgctctgtcgccaggctggagtgcagtggcgccatctcggctcactgcaacctctgactccctggttcaagtgattctcctgcctcagcctcccgagtagctggcattacaggcatgcgccaccacgcccagctaatttttgtatttttagtagagacgaggtttcaccatgttgcccaggatggtctcgatctcctgacctcgtgatctgcccacctctacctcccaaagtgctgggatttcaggcgtgagccaccttgcccgaccgttgcttttttttttttctgtagccagtctactactacatctgacaagttacgtgttcatagttatacaataactattcatatttcattaaatagttgaaatatgatcacttaaaattgtttattcttgatttagtataggccttgtatttatttatttatttttttagggatggggacttgctgtgttgcccagctggcctgtaactcctgggctcaagcgatccccccacctcaggctccagagtagctgggaccatgggcaggtgttgtatttagattctattaaagtcagtgttttcttgtagcttcataaaccattacaaattgttgccattgtgttatctgaaaaaaaatgtagtttgttaactaaaacgtttttctgcagtgataaatatcggcttgaacccaggaggcggaggctgcagtgagccgagatcacgccactgcaaatatatatatatatatttcatgtatatatatttcgtatatatgtttcatgtatatttcatatatatatttcatgtataaatatttcatatatatatttcatatatatttcgtatatatatttcatgtatatatattttgtatatatatttcatatatatatatttgcagtggcgtgatctcggctcactgcagcctccgcctcctgagttcaagccgattctcctgcctcagcctcccaagtagctgggattataggcgcatgccacacgcctggctgatttttgtatttgtagtagagatggggtttcaccgtgttggccaggctcgtctcgaactcctgacctcaggtgatccacccacctcagcctcccaaagtgttgagccaccgtacctggctgcagttacgtattttctttttctttttcttttatttttgagacggggtctcactgtgtcgcccaggctggagtacagtgtcgtgaacttggctgaacctcccaggttccagctgttctcctgcctcagcctcctgagaagctggaactacaggtgcatgccaccatgcccggctaacttttgtattttttagtagagacagggcttcaccgtattggccaggctggtctcgaactcctgatctgcccttcctgaccttgtgatctgcctgcctcggcctcccaaagtgctgggattataggcgtgagccaccatacccggcctagttatatattttcaaaagtcaagttccatatttatgagctagttatcattccccttaaattttgagcaagagttcctggggatagccaactggaattctttttttttttctggagacagggtcttgctctgtcacccaggctggagtgcagtggaaccatcttggctctctgcagtgtggacctcctgagctcaagcgagcctccccagtatctgggattataagtgtgtgctaccacatctggctacttgttgtatttttcatggagaaagattttgccatgttgctcaggctagtctcaaacttctgggcttgagtgatctgccagcctcagcctcccaaagtgctgggattacaggtgtgaaccaaagcacccggccaagctgtcttaactcttgatgtgcacattcactcaccattccattattaatatttttcctttttttatttttatttttattttttgaaatggagtcttactctgttgcccaacctggagtgcagtgacgccatctcggctcactgcaacctctccctcccaggttcaagcgattcttctgtgtcagcctcccaagtagctggaattacaggtgcctgccaccactcccagctaatttttgtgtttttagtagaggtggggttttaccatgttggtctggctggtcttgacctcctgacctcaggtgatccacccatctcggcctcccagagtgctgggattacagacgtgagccgccatgcccaggctattaatattttttctaactgaggagcttctgggttttaggtcttcattttgctcacaagtattgtctaatatctctgtaatttgtacatgatggtccagtggctcctgacctcaggtgagccacccgccgcagcctcccaaagtgctgggattacaggcatgagccaccctgctcagccctgagcattaattttttttttgttttttgtttttttttttgagacggagtctcgttctgtcgccaagctggagtgcagtggcacaatctcggcacactgcaacttccgactcccgggttcaagggatctcctgcctcagcctcctgagtagctgggattacaggcacgcaccaccacgcccagctaatttttatatttttagtacagacggggtttcaccatgttggccaagatggtctcgatttcctgacctcgtgatctgcccgcctcagcctcccaaagtgctgggattacaggcgtgagccaccgtgcccagcccccattaattctttttgtaggcattatcctattggtatactcacatgtgtggaaaatcatgtatggtgaaggctatttgttgcattattgtttataatggcaaaattcctgaagtaacttaaatgtttttcactaggggaattactttaaaaaaaataggacgttcctatgattgaatgctctgtagccatttaacagaatgaagaaagtggaccaggcacggtggctcatgcctataatcccagcattctgagaggccgaggtgggtggatcatctgaagtcagtagttctagactagcctggccaacatggtgaaaccctgtctctaataaaagtacaaaaattagccaggtgtggtggtgcgcacttgtaatctgaactacttgggaggccgaggcaggagaattgcttaagccccggaggcagtggttgcagtgagctgaaattgcaccactgcactccagcctgggcagcagagcaagactccatctcaaaacaaacaaacaaacagaatgaagaaagtgtttatgtactgatgtggaatcattttaccacataaatgagttaggttaaaaaaccacaaaggtgtggttacaatatgtggggaatactatcattgttattacatttattcctattaatgagtaatgtaataatattgtaacaggaaattctgaggtgatgtttgaattgagatgtgaaaggtgaattatgtaggtcagtgtttctcatctggggttgactgatgtttaggggctgtttcaggaatgagagcaggggacgattttagcttgtacaattattgggggatatattagcatttagtgtgcaaaggccagtcatgttagccttagtaatataaagtgtgcaacagtcttgcaaagcaaagatttgttttgtgtcctgtaagatcatcaattttcagttcacataggtgaaaacctatttgttttagtccgtaacagtggatctcaactctggctgcacatcaaaatcacttgagaaggctttattgattgattgattgattgagacagagtctcgctctgttgctcaggctggagtgcagtggcacaatctcagcttactgcagcttctgcctgaggttcaagcgattctcctgcctcagccacccaagtagcccgagactacagacacttgtgaccatgcccagctaatttttgtatttttagtgaaaatggggtttcaccatgttttccaggttggtctcaaactcctggcctcaaatgatctgcccgccttggcctcctaaagcgttgggattacaggtgtgagccacaccatgcctggcctacttaggaagtttttaaaagatgatgaggctgtacctcatacgaattatataaaaatctttgagatgatacctcggcatcagtattgtttaaaaatgtccttcttattctaatgtatagcccaggttgaaaccattgcctaaatcctaacttcattttacacataaacaaaatataaaaatggcatggttttaatattcagttttcccagaattcaccttctttggaaatctagaggagattatgctttagtttgttcagaactttaccaagagttatctttctaaaatttaaaatttatgtcaccagtggcatatgttggtagtgatttttttttttttttggagacggagtctcactctgtcgcccaggctggaggacaatggcgcaatctcggctaactgccatctccgcctccagggttcaagtgattcttttgcctcagcctcctgagtagctgggactacaggcacgtgccaccacgcctggctagtttttgtatttttagtagagacggggttttaccgtgttagccaggatggtctcgatctccagaccttgtgaaccacccaccttggcctcccaaagtgctgggattacaggcgtgagccactgcgcccggcccggtagtgatgtttaatcaccaagacaatatgtgcacatcagtctgcctttgtagctgtgatattcagtaattttaagtttaggtttaagcttcgactacctttttatgacttataatgtagtcgtaccagagcatttaccattagcatatatataattttgtactaagttatattccttttatttctctttatattacagttaagactctatataacatatacatatatgtaactaaagttttgtttagtttgtattatgtatacattttgtttccaatggtaaagggatgttatgaaatatttattattttaaaaaaggaagcattgagtccagcacatgggaaggctctttagcaggagggagcctggcattttggaggaactaaaaggaggccattctagcctgagaggagagagtgaggtcaagaggtgtgtaggataagggtgtaagatgagccaaaaagagaggtagagtccatgcagcaccttgtaggctgtgggaaggatcttggagagttgtttgactggaacaaaagctgaggcattgtgagctgtagagttgcttgaccaagtggaatttatagctgaaatggacattaaagagcatatagttaaaccatcttgttttacaaataagaaaaaggaagttaggggaactttcccaaggtcacacagtgaataaatgagctagagccagaacttgatgacacagttctttgtttctgcctgactgccaggcagaggagttagattttagacatttaggagcatattgggttttgagcgagagaattccaggatggagatggctgcatggctgtgtgcaggctggaggcagtgaataatagggagtcatgaagtcaggacctccatgattttattctctggtcaaactgaatcactaaatatgagtttccatcttgactattattttaaatagagacagggtcttactatgttacccaggctggacttgaactcctaggctcaagctatcgatagctcccacctcagcctcctgagtagctgggactacaagcatgtactaccatgcccagccccatcttgacttaagctcaattatttaatagcttttgttttccttattagagatgggatctcattctgttgccaaggctggagtgcagtggtgcagtcatagctcactgcagcctcaaactccagggctcaa

SEQ ID NO: 96227 - DNA, 12426 bp, Homo sapiens
tttatttatttatttatttatttatttttgtatttttgtatttttagtagagacatggtttcagtatgttggcccagctggtcttgaactgctgatctcaaatgatctgccagccttggcctcccaaagtggtgggattacaggcatgagccaatgtgcccggctgattgtgaagtgtttttaaatgtgtattcctggatttgatttgctaatatttgaggggtttgcatctttttttttttttcaatcagtggtattagcccataagttccttttaagatctgtgtcaagttcttttaggcaagatgtaaccaacatggctgatgaggtgcctggcactcacctcctccactaagtgggaccaaagcagcaaatagataaccacacatcaagtagacagagagaacactagaattcaccaggaaagtgacagggcacctctgaggtaaagaaggagagagaaacaaagaagcacccagcccagctggaattggctcagagctggaaggaacttgccattactaggaaaaggtaagggggagattcccaatagtccacattcccaccagggatgcctgcagtcctagccaccagagagccccttggccctaacaggccctgagcctagtataggttgctgcttggagttcacaaaactgcattgttcaagaaagggaattcacactggatcccactgaccgccaacacccaagcaactgcagcatggtgccattttgagagctcagtccccaccagactacatcctccctgggactcaacagcccctgcatctccacattcctggagccccactgacatcctcccaccaccacctagagggctgcagcattgcaatgccagctggacccagtgctatggccagttcctcagcactctagcccacaaggtaacctacaccctagagaataggtggtgaagcacatcagggaggctgccccaaggacaaagagggccaaagtgtacattccctgcagcttggcagctgacttcctgagactgctgccaccaactgcaatcctgcccttccagcagcagggccacctcatacctgtacatgctgtgaagaggcctaaggaacaatcctccctcacacactatccaagggtgtgaggacagacctgccaagtccactcatgctgccagcgcctgcatgcacctctggggacctaaggacaggcccaacccacccatcactgccattgccaacacccacccatgcatgccacctaggagcctggagactgggctgactagcccattggcacctccgctggcactcatgcataccacccaggggcctgagggccagcctgttgacattactgccacagccaataccacaagtgctacccagggccctgaggacctgcctgcctgacctgccacaaccactgccagcacttgagcctgccacatgaagtacaccacccaggcgactgaggactggcccacctacccttctgctgctgccactggtgctagaggactgactggctcacctggtttccctatccccagtgaagtccgactacaacgtacataacctcatcttattgaagacaacataataagacaagataaagcagaagaaagaatttctgaactgaagacatgttttttgaaataagacataaaaaacaataaagcaagccatgtgacatatgggacacaaaagaacaaaaattcaaatttggggagttccaggagaagaaatgggcaaaggtatagacagcctatttaatgaaataatagctgaaaacttcccaggtcttgctagagacatagacatttggaagctggaaactcaaggagtcccaaatagattcaatctaaagaggtcttcccagagacaaatgatagtcaaactgtcaaaagtcaaaaacagagaattctaaaaacagcaaaagaagcccaaaatctccttaagccgataagcaacttcagcaaagtctcaggatacaaaatcaatgtgcaaaaatcacaagcattcttatacaccaataacagacagagagccaaatcatgagtgaactcccattcacaattgcttcaaagagataaaatacctaggaatcccacttaaaagggatgtgaaggacctcttcaaggagaactacaaaccactgctcaacgaaataaaagaggacacaaacaaatggaagaacattccatgctcatggataggaagaatcattgtgaaaatggccataccgcccaaggtaatttatagattcagtgccatccccatcaagctaccaatgattttcttcacagaattggaaaaaactactttaaagttcatatggaactaaaaaagagccctcattgccaagtcaatcctaagccaaaagaacaaagctggaggcaccatgctatctgactacaaactatactacaaggctacagtaaccaaaacagcatggtactggtaccaaaacagagatatagaccaatggaacagaacagagccctcagaaataataccacacatctacaaccatctgatctttgacaaacctgacaaaaacaagaaatggggaaaggattccctatttaataaatggtgctgggaaaactggctagccatatgtatagaaagctgaaactggatcccttccttacaccttatacaaaaattaattctagatggattaaagacttaaatgttagacctaaaaccataaaaaccctagaagaaaacctaggcaataccattcaggacataggcatgggcaaggacttcatgtctaaaacaccaaaagcaatggcaacaaaagctaaaattgacaaatgggatctaattaaactaaagagcttctgcacagcaaaagaaagtaccatgagagtgaacaggcaacctacagaacgggagaaaatttttgcaatctattcatctgacacagggctaatatccagaatctacaatgaactcaaacaaatttacaagaaaaaaacaatcccatcaacaagtgggcaaaggatatgaacagacacttctcaaaagaagacatttatgcagccaacagacacatgaaaaaatgctcaccatcactggccatcagagaaatgcaaatcaaaactgcaatgagatactatctgacatcagttacagtggcgatcattaaaaagtcaggaaacaacaggtgctggagaggatgtggagaaataggaacacttttacactgttggtgggactgtaaactagttcaaccattgtggaagacagtgtggcgattcctcaaggttctagaactagaaataccatttgatccagccatcccattactgggtatatatccaaaggattataaatcatgctgctataaaggcacatgcacacatatgttttttacggcactattcacaatagcaagacttggaaccaacccaaatgtccatcaatgatagagtggattaagaaaatgtggcacatatacaccatggaatactatggagccataaaaaatgatgagttcatgtcctttgtagggacatggatgaagctggaaaccatcgttctcagcaaactatcgcaaggacagaaaaccaaacactgcatgttcttactcataggtgggaattgaacagtgagaacacttggacacaggaaggggaacaccacacactggggtctgtcatggggtgaggggaggggggagggatagcattaggagatatacctaatgtaaacgacgagttaatgggtgcagcacaccaacatggcacatgtatatgtatgtaacaaacctgcatgttgtgcacatgtaccctagaacttaaagtataatttaaaaaaaaaagcatcaaaccacatataagggaatctccatgagactaacaatgaatttctcagcagaatctttgtaggtcaggagagaaaggaataaaatagtcaaagtactgagagaaaaaaaaaaaaagaaactgtcaaccaagaatcctgtgtccagcaaaggtatcctggaaaaatgaagggaaagtagtctttctcagaaaaacaaaaatggagataattcattaccactagactagccccccaagaaatatttaagggagccctacaccaggaaacaaaaggacaacatctaccatcatgaaaacttaacaaaagtagtgtagagcagatacacaaaacaggaataggagtgttgttactctaaaaaaaaaaaaaaaaaaaaaaaaacccaccagatcataaaagaaagtaaaagaagaataaaggaagaaaggatattcagaacaatcagaaaacaacaaaatgacaggaagtcctcacctattaataacaagctggaatgtcaaagtttaagctcccccaactaaaagatatagactggctgaatggctaacaaaaataagacccagatatatgctgtctacatgaaactcatctcacctataaagacacatagactgaaaatgaagggatggaaaaaaatacctcatgcaaacaaaacaaaagcatgcaggagtagctacacttatatcaaaggagagtttaagtcaaaaaaaatgagacaagaaaattataataaaggaatcaattaggcaagaggatataacaattgtaaatatctatgcacccaacatcagaaaccaaaatatataaaayaaatattattacagctaaaaagacaggctaatacaacaatagttggggatttcaccactcccacattcagcatggaagagattatctagacagaaattcaagaaacattggatttaaactgcactttagaccaaatggatctaacatttagagaacatttcaggcaacagcagcagaaaataaattcttctcatgaacacatggaacattctccaggatggaccatatgttaggccataaaacaagcctcaagaaagttttaaaaattgaaatcatatcaagtatcttctaagaccacagtgaaaattaggaatcaacaacaggaactttgggaacaaatatgtggaaattaaacaacatacacctgaataaccaatgggtcaatgtaaaaattaagaaagaaagtaaaaattcttgaaacaaatgaaaatggaaaaacataccaaaacctttgtgacacagaaaaagcaatgctaagagggaagtttatagcaattaacgtctatacctgaaaagtagaaagatgttgaataaacaacctaaaaaatccacctcaaaaaactagaaaagcaagaacaaactaaacctaaaattagtaaaaggaaagaaagaataaagagcaaagcaaagcaaaatgaaatagaaactgaaaaaaacaatacaaagaatcaacaaaatgaaaaattggttctttgaaaatataaactcaatcaataaaccactagctagtctaaccaagaaaaaggatccaaacaaatagaagtaaaaaaagagacatggctggtcacggtggctgacacctgtaatcccagcactttgggaggccgaggcaggcaaattacctgaggtcgggagttcaataccagcctgaccaacatggagaaaccctgtctctactaaaaatacaaaattagccaggtatggtggctcatgcctgtaatcccagctactcgggagactgaggtaggagaattgcttgaacctgggaggcagaggttgtggtgagctgagatcacgccattgcacttcagcttgggcaacagaagcaaaacttcatctaaaaaaaaaattacaacggatgcaacagaaatacaaaagatcattagagacaattatgagcaactatacaataacaaaaatggaaaacctactggaaatatatacattcctggacacatgcaacctaccaacattgaaccaggaagaaatagaaaacaaagataccaataacaagtaataagattgaagcagtaataaaaaactctcccaatagagaaaagcccagaaccagatttactgctaaattctaacaaacttttaaagaagaaataacaccggctttgcagttgtcaccactgggagccccgtattatcacccatgatcaaccccaccatgttcttcgacatcgccgtcgatggtgagcccttgaggtgtgtctcctttgagccttttgcagacaagtttccaaagacagcagaaaactttcatgctctgagcattggagagaaaggatttggttataagggttcctgctttcagataattattccagggtttatgtgtcagggtggtgacttcacacgccataatggcactggtagcaagtccatctacagggagaaatttgatgatgagaacttcatcctaatgcatacaggtcctggcatcttgtccatggcaaaggctggatccaacacaaacagttcccagtttttcatctgcactgccaagactgagtggttggatggcaagcatatggtctttggcaaggtgaaagaaggcattaatggccaggcgtggtggcttacacctgtaatcccagcactttgggaggctaaggtgggtggatcacaaggtcaggaaattgagaccatcctgactaacaaggtgaagccctgtctctactaaaaatagaaaaaaaaaaaaattagccagatgtggtggcaggcacctgtagtcccagctactcaggaggctgaggcaggagaatagcatgaacctggaaggcggaccttgcagtgagttgagatcacgtgactgcactccagcctgggcgacagagcaagactctgtctcaaaacaaaaaaaaaaagaaggcatgaatatttgtggaggccatgggggactttgggtcctggaatggcaagacctgcaagaagatcaccactgctgattgtggaccctctaataagtttgacttgtgttttatctttttggtggtgttttgttttgttttgttttgttttgttttgttttgctttgtttgagatggagtctcaccctgtcaccaggctggagtacagtgatgcaatctcggctcactgcaacctccaactccctggttcaagaaattctcctgcctcagcctcccaagtagctgggattacagacacacaccaccacacccagctaatttttgtatttttagtagcgacaaggttttttccatgttggccaggatggtcttgatctcctgacctcatgatccacccaccttggcctcccaaattgctgggattacaggcatgagccaccgtgcccagccaacttgtgttttatcttaaccaccagaccattccttctgtagctcaagagagcacccgtccaccccatttgctcacagtatcctataatctttgtgctctcactgcatttccctttgggttccatgttttccttgttcccttccatgcctagctggattccagagttaagtttatgattatgaaataaaaattaaatcacacaaaaaaagaaataacaccaacttttatcaaactattccaaaaaattgaagaggaaggaattcttcttaactcattctgtgatgccagcattaccctgatacaaaactagacataatcaaatgaaaaataaaactacaggccaatatctttgatgaaaataaatgcaaaaatccttaacaaaatgctagcaaactgaatccagcaacacatcaaaaaaataatacgatgatccaatgggatttatctcagggatgcaaggatggtttgacatacacaaatcaataaacatgatacatcatttccaacagaatgaaggacaaaaaccatatgatcttcatattagtccattttcacactgctataaataaacctgagactgggtaatttgtaaaggaaagaggtttaattaactcaacattccacatggctggggaggcctatggaaacttacattcatggcagaaggcaaacagaaagcaagaagctcttcacatggcaacaggagagagaagtgcaagcaggggaaatgccagacgcttacaaaaccatcaaatctcagagaactcactatcagaacaacatggaggaatctgcccccatgatccaatcacctccctccctcaacacgtggggattacaggtccctccctcaacatgtggggattataattcgagatgagatttgggtggggacatagagccaaatcatattaatcttctcaatagatgcagcaatcgcatttgctaaaattaaacatcacttcatgataaaaacaaatttagcatagaaggaacatactcagtgtaataaaagccatatatgagaaacacagctaacatcatactgaagagggaaaagcttaaagcctttcttctaagaactggaaccaaagttgcccactttcacctctactaatcaacatatagtactggaagtcctagccagaacaatcaggtaacagaaattttaaaaaggcctccaaattggaaaagaggaagttaaattgtccctctttgcatatgaattgaccttatattttaaaaacctgaagactccagcataaagctcttagaactgataaatgaattcagtaaagttataggatacaaaatcaacattaaaacgtcagtggtgtttttatccaccaacaatgaactagctgaaaaagaaatcaagaaagcaatcccatttacaatcactatcccccctaccaaaatacctaggtgtatatatatatatatgtataggaatatgtatatatataggaatatgtatatatatatgtataggaatatgtatatataggaatacacacacacacacacatatataatatatatatggagataaaatacctctacaaggaaaactatgaaacactgataaaaagaaattgtagaggacacaaacaaatggaaagacatctcatgctcacggactggaagaatcaacattgttaaaatgaccatactacccaaaaccatctgtagattcatgcgatccctatcaaaacgccgatgatactcttcacagaaatagaaaaaacaatcctataattcatatggaaccacaaaagatcccaagtagctaaaacagtactgagcaaagaaaactgggcaggcatggtatctcatgcctgtaatcctaacactttgaatggctgaggcaggaggatcgcctgagctgaggagttcaagaccagcctggccaacatagtaagaccctcatctccacacacacacaaaaattaaaattagtgtggtggcatgcatctgtagtcccagctactcaggagggtgaggtaggaggatcatttgaacccaggaggtcaaggctgcactgagctgtgatcatactactgcactccagcctgggtgacagaatgaaaccctgcctttaaaaaaaaaaaaaaaagctggtggtatcacgctgcttgacttcaaagtatgctacaaacctatagtaattaaaacagcagccaggcgcggtggcttatgcctgtaatcccagcactttgggagaccaaggtgggcagatcacgaggtcaggagatcaagaccatcctggctaacacggtgaaaccccgtctctaataaaaatacaaaaaactagccaggcgtggtggcatcgcctgtagtcccagctactcgggaagctgaggaaggagaatcacttgaacccggaaggtggaggttgcgtgggccaagatcacgccagtgcactccaggctgggtgacagagcaagattccatctcaaaaaaaaaaaaaaaaaaccagcatggtactggtataaaaacagacatatagacccatgaaacgtaatagagaacctagaagtaattccacatgttgacagccaactgatttttgtcaaaggtgccatgaacacacatgggaaaaaggatccctcttcaataaatgctactgggaaaaccggatatccatatgcagaagaatgaatgtaggccccctaattctcactgtgtacaacaataaagagttggattaaagagttaaacataagacctgaaactagccaagtgtggtgactcacacctgtaatcaggcaggagcatcgcttcagccaacgagttctagactagcctaggcaacataatgagaccttgtctctgcaaacaaacaaacaacaacaaaaacacctgaaactataaaactactacaaggaaacatacggcaaagtcaaatagtcttttcctagactgaactcctgggctcaagtcatcctcctgccttggcctcccaatattaaccccacaagagattgtttatacagtcacaatttatttagatctatgtccgtttttaccattgttgcttttcaaatcctttctcttgcatttttaaactttcaactgaaataattttttcttcttagaccaaagaatatactttaatatttcctttggttggtctgctctggatgaattacctcaactttattttgcctggtaataaacagtagttttgctgggtatagatatttagttagttgtttttcagcactttgaaggtatttttccattgtcttcttgcttctgtcatttctatggaaaagttagccttatgttttggtgtgtgttttttccactagccacttttttttttttttttttttttttgaggcagaatctcactctgtcacccaggctggagtgcagtggcacgatcttggctcactgcaagctctgcctcccgggttcacgccatctcctgcctcagcctcccgagtagctgggactacaggcgcccgccaccatgactggctaattttttgtatttttagtagagacggggttgcaccgtgttagccaggatggtctcaatctcctgacgagatccacccgcctcggcctcccaaagtgctgggattacaggcgtgagccaccgcgtctggcctcccactagccacttttaatgattttcttgttgtctttggtttttagcagttttactatgataggcctagagatggttttctgtgtctccttcctggttggtgtttgcagggctcaaatctgtagcttgatgcttttcatcatttgggaaattccaaggcattatctctttaaacctttttctgcatcattctttcttctttggaactataattacacatgcttttaactatatagtctatatttactactgtcttctctataatctgttgtatttttcttatatatatttgtctcacctatattccagtttactgtttctctgattttgagttcttagtttcactattgtactttttgactctatagtttctctttagttcttttcagttctgctatgccctttttaaaattttcctattccatgctgatattctcagacttttttttttcttttttgaatcatcttgaacattttaaacatagttacaggccgggcgcggtggctcacgcctgtaatcccagcactttgggaggccgaggcgggcggatcacgaggtcaggagatcgagaccatcctggctaacatggtgaaaccccgtctctactaaaaaatacaaaaaaaactgaatccagcaacacatccagcaacagagcgagactccgtcacaaaagacaaaacaaaacaaaaaacaaacatagttacattaagctgtacatctaattaactcttaatttacaacctatgtgtctgtttttgttatttctgctgaccctatttgtgttgtcctgtctcatttgcttgcatgtttatttatgttggataattacatccgtgataactctaatttcaaggacagataaactatttattcttattccttaagtactgttctttgggggttcctgcccaaaatgtggaagttttgctagagtatcccaaccttggcattcccttaccctaatttttgtctccccatcccttcaaggctgttataagtactgcttagactcttgacctcctgttctggaataaataaacatttccagggttaagtggttccaaatgcttggctcatctctctggttttccatcttctgctacatcttggcttagattgtctttttagctttatgataacttcaagactttttatattttgccttttttttttttaatggagttttgctcttgtcgcccaggctggagtgcaatggcgccatctcagctcattgcaacctctgcttcctgggttcaagcgattctcttgcctcagcctcccaagtagctggattacaggtgcccgccaccatgcccagctaatttttgtatttttgatagagacggggtttcgccatgttgaccaggctggtctcgaactcctgctctcaggtgatctgccctcctcagcctcccaaagtgctgggattacaggtgtgagccaccacgtccagcttattttggcctttttttttttttttttttttttgcaagagagttgtcagcattaccttttccatcttttctcttacccccactaactattcatccattttaatatggcttctgtctcatttcattgagcctgattttgttcattttctcacccacatcctccatgatgcca

SEQ ID NO: 96228 - DNA, 13698 bp, Homo sapiens
aggcaacagagccgactttgcttgaacaaaatacacaaagcttgcagttgagaaaataaaaggcaataaaatgggcttcatttcctcctattgctttcttagaagtaactaactttaagggtactgtgggaacagggtcaagaaaagctgatggttctattcttggtgatctgtaactggcttcggacaagtcttcagagtttatgtgaggttgctggagtctactggtgtttagggccccaatgaaatgcaactttaggggtgtgtgtgtttctcttttctctctactgtcaagctagttctcttccactgatactgttgtgtgtcagagagatttggaagctcagcattccagtttagatttctggttagtgtttgaataagatatcttccttccaattgaagtacatacattcttatcctattctgtccttctccatttacattccatgctgtttttgtccatatcaacaacattttaagatctaactttatatagaaacgtgtatacatttcaaatagtttgataatgttttccatatgtgtacacccatgtaaactagcacacatatcaggatatagaacattttcttgtagcccctctcagtcagtcctaagggtaaccactataatagtccccctcatccaaggggaaacattccaagacccccagtggatgcctgaaactgcagaaaccaaatcctgtatgtgtactgctacatagtactacagctaattcatccttccatgttttatgtctggtgcctcttttgtactttcatcaatgtagattctactggacatcttccagaagaggccagtttcattgcaactgaagtctcactcagatagtatcttttttccttgatcaacttcttcaactctgctagaaatgtggcagcagcttcttcattggcagacaaaacctctctagtaaattttatatttgtgaatccaaacctattaccaagtcggtgtaaccatcacttatttgcagtaagtggcttggtgtcactcatttcaggggatcccttgctgaaatcttcatataggcttactgctttctgatgcaacacattgccatcaattggaatgctttctgttcatgtcttccacccacaaatttaatgccctttccatcttcactaagcacttatcacacactgtcaccgtaacttctgcaatttgaggtgcaacagcaaaactagcacatatttctttttccttcttcacaacttcatggatagaggatttgttcttaccacagatcttagcaatctcagcatattttttttcaccttttcacttagaggaagcactttacagcttctatttggcatattacaattgtcagcatcactactgttgtgtttggggccattattaagtaaaataagagttactcaaacataagcactgctacagcagtcaatctggtaactgagatggctactaagtgactaatgggcagggagcatagacagcatggatgcactggttgtagggatgattcatgtcccaggtcagatggagtgcgacggcaccagatttcatcatggcactcactcacagcagcatgtaatttaaaactcatgaattgtttatttctggaattttccatttaatatttttggaccaacgttggccacaggttaaccaaaactgtgggtaggaggggactacttattttgacttctaagttggttttggctgtttggggacttcataacactgaagtcatagtgtatgtattcttttgtacttaatttctttcattcaacattatattgtaactcatccatgttgttgggtaaagagttccattgtataattaaactgtttatggttgtttgagtctggagctattacacataataataataatgcaagaaacattcttgtgcatgtcttttagtagacagatgccctcatttctcttggttatattgtcaggagcaggattccttagtcgtgggctataaatatattttcttttaataggtacagcaaaatatttttcctaagtggttgtaacagttaaccctaagttcctatggttttaaagcacagttttttctgcagtatttttactgtaggttgttgatgctaattaacgtggaacattgaggtatttgccagcccatcttagattatatacatacacacatttttgtattttacattcattcaatttggattcagaggtagaaatttgccttgtcatatatttggaaatttaatagtgaaaaattgccctcagaaattaaaagaaaactatctaataataatattgttctaagtgcctactccctgctagtcactttaaacattctagttccacttattcctcattgagatcttataaattagatatcagattgggactctgtcccaattctagatattgttatggtcatttttaagctatttatttattttaattttataagatgaggtctctctcttgcccaggctggtcatgaactcctggactcaacaatgcttccacctcagcctcccaaagtgctgggattacaggcgtgagccaccacgcctggccctaaactatttatttttaacctaaaaataagtaatattttttaaaatataagtaatattttaaaaatctaatattaatcacaataaagtttaactgtggaatagatgtctggttttgtggcttcacagtgagaatgaatcttgactaagtgtggtatttaattcatgggagtgaaaccggaagggggaaatgagccagggaggttccttggatcctgcctctggcattattcatttgcagctggctacattgcattttatggctgctattttctctcatttgtccttgattccttcgaaaggaagtagtaactcaatatattaaacactgcctagaatcctcagtgctgaacattttaattctatcaaatttttattagcatatcgttgaaaaagaaagaaaacctagggcttcagtttcttaggtcacataatgggtagttccagtaacacacctgcatgggctggagggcactctaaataataataatattcctgatctttaaaaaatatatcaaggtatagagctcttagaatcagtgtagaaaagcctgttagactggattttcaaataatagagttctcttcccttttagacaaagctatattaatccatcctttcattcattatcatgcattcacacaatgattcaacaagtacttactcagtacaatgtgccaggccctgttctagatattaagcatataacagagaacaaaacaaaggtctttcccttgtagagcttactttctcagcaaagaaacaggcaagaaaatgtatacatatatgtcatgtggtactccggaggacaataaaaacagagtaaggggcatgcaaatgtagacttggtgttgagaactgcaattgctttttataaggaacagttatgaaagcctctccatcagtattaatatttgtgccaggacctgaaagcactgaatcatacatgactcagtcaattctctgtccccagctctacaaggacaagggtagaaactgggaaaccagctaagatctctaataggtgtgttcaggcaagaaccaaatagcatatatgttttattttgtgggctcatcaccatccttgtgttttattagtaaaggtaattattatgtttatccagacatggacgaacaatatctggtacatttgagccacattgataataatgtagtaatatgaagttaacagtaatatgctgtgggtattataaattgagttctatatttaatgttcttttctacttacctaatattaatttttttgtagacatttcctcctctctcctgtttttattgaataatttgtagcattctttcagccacttacagttgaacttcagtcatttgtgtctcctgttcatcctctgcacagcatgctattaggttctgttgttgccttgtctcccaaatccatctccttctgcctttcccaactttggttttagacctttgtttcgtctcagaattagccatccttctctaattcatgcgaaattctctctttaatccatgtgaaattcagaaaaaacaatacaggtttttgaaatgagtccttgattcaaattggttcagatctttgttcttccgtgtactggctgtagtgccttttgcaatttttgaacctcaatcgttccttcgtaaaatgagtataacaatatctatgcagtgaggattaagtgggattatggagtgtttaaagtgcctagcagggagtaggcacttagaaaatgttggttctttccaccttgtgttcttctgcttcagatctcttaatttctacaactctaaatgtgctattttcctctctcagtaaataatactaccatctcaccagtttaaataaaaaaagctatgagtccccttcgaataatctatttctttcacaatctaaatttaatccatctgcaaatcctatttgttctaactcaacacatatcctcagtctctctgcttctccccattgacactgctacaaccctagtccaagaatcttatctgtactgttgccataggtcctgaattcatccttctgcctccactctggtcttctttcagcctgttttccacagagcctaagtgatatttaaaacataaaccagataatatcagtcccctgcttaaaaccctccagtggcgtttcatcatattcagaatgagatccaactcttaccctctcctaacactcccgctcttatgcttcagcggcactgcccttttttctttttctgctaactcatcaaactcatggctgcctccggccttagcacttgctattctctctgcttggaatactcattccccagatgtccacgtgacttactgcttcttgtcatttagatctcaactctaattgtcccctgacttctatcagtagtgctccatcacaccatcttacttttcctaaggcttaccactatctgaaaatagcctgcgtttctctattttcccctcagtaagaattaaaagttcatactagggcccatttcctagcagtgtttggcacatagtaagtatgctgaaaaaaaaaaaccttgactgactgaataaatgaacaaataaactcacttttaatgagatatcaaggttttatattaattacatgagccaagaattgtggtttcatttttaaaatgtgaggacctactggtttaatccttcatacttcacacatatgcttgtgctggaactatgactgtaaatcaatagcaataccatcctctgttttggcttcttcccctaacctaaatagttctcagatttacttttctctccatctccactgccacactgtcaccttagtgcaaatgaccatcctctctggccttttttctgtaaggttttaatctcccaatatgtattctccagactgcaggccagtgagcttttcagttgctgttacacccatgcttgaaaaccctttaagttttcattgttctcaagataaagaccagaatgtggtctggtccaccacctcacgtcaggccagccctcactctccactccaggccacactttctcctcccctcctggttcccgcctgccaactggctgggtagccgttgcttcccgcttcctgcaaagttctacatcgcacccatttcgcccacttcttcagatttcaggagattgttccttcctcgaggaagccctccctgattaggccaagcgccactccacgtcatacagccccacatcatcatgggcctctctttcagggctttgttttatgagtatgcaatccagaatatgacaatcttattgacatgcgtcaacgcgagcttgcgctcaatagctatttgccgaaggaatatacggactagcggcccgaccactcctcgcccctcccctaccactgccgcgcacatattacgcattaagcaggcgccgcgagtacggacatcgcgagcgcctgcgcgaagggctacgcatgcgcagaggggccagcccgctgacagattctcggtggcggcggcagcggcggcggcsctggactgcggggaatgggaatcctaggtccctgactgagcacctcccccgcctccctgcccccgacatggctcaggagaagatggagctagacctggagctgcctccgggtacgggcgggagcccggcggagggcggtggcagcggcggcggcgggggcctcaggaggtctaacagcgcccccctgatccacggcctcagtgacacttcgccggtgttccaggccgaggcgccgagcgccaggcggaacagcacaacgttcccgagccgccacggcctgctgctgccggcstcccctgtccgcatgcacagcagccgcttgcaccagatcaaacaagaagagggcatggacttgatcaaccgagagacggtccacgaacgggaggtgcagaccgcaatgcagataagccactcctgggaggaaagtttcagcctgagtgacaacgacgtggagaaatccgcctcccccaagcgcatcgatttcattcctgtgtcaccagcaccgtcacccactcggggaattgggaagcagtgtttttcgccatccttgcaaagttttgtaagtagcaacggattgcctccaagccctattcccagcccaacgacccgatttaccacccggagaagccagagccccatcaattgcattagaccaagtgttcttggaccattgaaaagaaaatgtgaaatggaaactgaatatcagccaaagagatttttccagggcatcaccaacatgctttcttctgacgttgcacagctgtcagatcctggtgtgtgtgtatcttcggatacccttgatggaaacagcagcagtgccggatcttcttgtaactcaccagcgaaagtcagcactaccaccgactctcctgtgtcacctgcccaagcggcttctccatttattccactagatgaactttcgtctaagtgattcactcatcctgagactttctttttgcagtggagagagagaataatctagttggggcaaacactgaactttgtcaattaatttgaggctatttcctatttgaccccttttcttttttgaaattccctgaaatgatgttattctagagaacttctatgtcaggttcctttggatacccttgaattcagtgtagtaatattttcagacgtttccccaataagtgtgttgaagcatacatctttacgctgctaatatgtctaaatacatatgttatcccttgatttttttaaataaytgagagctctatttatttatgggattattaagttctgatgaaaatataaatgttgacttaatcagcatagtaaactgatgtttaaaattccatacttcatgcccacactaatttttaatgttattttcagtggttgccgatttccatttgatgaagaactatacagcttaaaaaaatacgttagttatatctatctagtggttgtctgttttacccaggaattcttggatatttagttttctgggtactgaagtggatgggagggggaatgattaaagaacaaattataaaagtttgaacaaatcttttcaaattaagtatataaaagtaaacttttaagaaaaacatttttaatgagattttaatagtaattctagtcagtcatacaactataactactatagagaaaataaaattttttcctttttttttttaaccggaaagtgcatttgcttgggtgtaatcctaaagtgaaatgggacagtgccttgcagtctttgcccactgtacataggctaaggctaagctctttgtactactgcaaacttaaaagtttttcaaatgtgggaaacgtgtgggaaggcttgttgaactttggcgcactcaggtaaacaatactctctcaattgttgatatactttaaaatattcagttgtgcctcagttccagaaattattgccaaacaggagccacagcaatttttggctacttttctgctctgcccatctgtcaccttactggttttcccttgttcaggaaggaagcagctgtttccttgccaacaggtcccttcctctccatctcccaccaaactagggcaccattgattagacaaaggtacagtgtaacttgggtttctgacagcaacaacaggactgtgaattgtttaacctctgtggttaaagctacagcttgagttgactgccttggggatgtcagttaattaaggggtgatgatttgcaagagaaaattagtggagagtcacataggtaaatcattatttaacttaggttttcctaaagttagaatagtcgaatgttcttttctttacctttacaattaagacaaaatgtttaataagaatagcaaaaatttttttatattatgcatccttatacctcacatatcttccttaactagatagtttgacagaaagaatggcatacaaagaggaaaggggaaaaatgactcagaacaagacaaaagctctgactgtttaaagttatcgcttacagagactttaacaattttgtggaatttttacaactatgagagtaaatggaactggtcaactcttgacagttgcctcaagatggagtgaaattgcatcgagggtaagactgtgtccacaggtttaaaattctctcttctgagtaatagtgttcatgtgctcccattctcgaccctgttgttgaaattcaaacttaaatagcctgacttcttgttgggtaacttgccctgcctccagaggtatttgaacttcattatcttcagcacaggaattgtcaatcttctcacttcacctgttcttgcattagctcaattgatgtcatcactgatttcctaaactagaaactatggaagcatctttgacttttccttttctctgttggattagcttaatcaccaagtcctgtcaacttctgaaatgaatctcaaatttcttcccttctctatctgttgcccctgattttgccttaagttcttgcctgagtgatctcccagcctgtcttctgtctccttttggttcagtctttatactgcctcttgagtaatctttctgaaatttaaacttgatatttttcgccctcttgcttgaaaacttcacttgcttccccatttcctactctttaaggaatgatttctttagcctcagatagaaggacctttatgatctggccatattctgaaatagcttcaatcctctcctcatctctgttccagtatacatctttccttcttattctgcaaacattagaccacttgatattctttaaatatgtcatgtacttttcttgtgtctgttctttgggataattcctatccttttcagggaggcaaattgcacgtgagtttaagtatgaaggcaatgtatacctgctgattgtaaaatatttaaacattgtacatatctgtgtggttttaaaagtctgcttttaattatgtaaaattcatcttccctttccacagataacttctgttaacaacttgatatctattgtacaagatgtgttactggcatttccatgtatatatgtatataaatgcaggaaaccaacatgtcattgacacctctcttctttacttttccccatatctaatcattcctcaagtcttactgatttttatcagctagaatctatctccttatttctacctctattgccactctgatccaggctaccagcatttccctcttaggcttctgaagcaacttcctaactcccacttgtgctcctcacactcactctggtcggctatccattcattctccatacagcaactagagtcattcttttaaaattgcggacctgatccttccatctcccagctgaacgcttttcatttgcttcctgttctcatgagtatgccaaaatgtattaattctgggctaggaggccctgaggaatttggtccttccctcctcccccctcgttttctgtgcttcgccctcactggcttgcctttcttttccttaaatacatcatgttctctcctattttagatccttttccccgaaggtatggaaacattatttctgtaagcttattcttctatatagatgggaagtttttaaatcagataaggttctaagggcatgtggacaatttacgttatcatagtattgttcataacgtccatcattattctgtagactgtaagggcttacttagctcgtgtaagaattatccttcaaaaagcatttttaaggtattagtattgctaatctataaactttgtgcaagaagtcctaaagtcaatagcaacatttatttaaagtacagtttgtcatacttaataaacctctggtatattttcctttattatgcttgttaaaaacacagtataaatgggagaaatcattaaagatcattaactccaaggctgctggatgttaggacccttaagcatacttaaaagattgattgtaatcaagaataacttgtatcagattgccttccagtgattcacatttattagttcaaccagttacatacctgtagcaagagaccagtttatttggcaataaaattggggaaggaatcaagacttaaatgaggaaagtgagtctgagaacattttttttcagggtgtgtttatagattagtagaacaattttgaagatctaacagaggtgggagtcaggggaatggttgccagacaattgaaccaagaagatgatgatcatttcttgagtagcaccagagaacagaagaaagagttggccttggaaaggaggtctggaaacttatttttcttctgaaacaggagggagagtgaaaaggctaggcaaagatatccataaatgttgaattgatttgttgttgcaggggtttaggagtatggaggtaggtatatgaaaagtagaatttgtttctgattgtgcctattttccaattattgaggaatctaagatacatgaggatagggacaggagatcatttggaagcttgagtgcagtaaaggtttaatgttgcctctgagaatctaaaggagtaagttaaggacaagtagaaggcttattaggctatgatggatgccaggttgcagttggatggcaggcacaaggaagtgggttggattgactaggtttgggaattggttaagtgggtactaggtaaagcccagtgtgtgaagtagttaagggttctgctgaaagtgtagtttgaatgattggctgaggcattgaggataagagaagggagcagaggcttatggactagaccacttttttcagggctttaccttatcagccatgacaaagtatagagaatctggtctcaatgtaggtctctcactccagcagttttgcccacatttttcatggctgttagagaatcagggctgaaggcaagccttgagtgccacttacttggtaaaaaattgtgtcagattgctcactgtagccaagacagagttctttgtggcttctgtaacttgccatccaagtaaaaaaattttcttaaaagttgaaatgacctttgtataaaaagtaataaaatacttgctatgtgtcagggactgttctaagtgctaagcaaatatatcaatgcatttaatctatcactatcatctgaggcaagtgctatcattatcctcattttataaatgaggaaatggagacacaggttgagttacttgcccaggattccagagctgggaggtaggcagcgaattgtggtggttaggaatatagacagtggagcagggtggctgtggtgaggattgaatgggttcgtacacaatgtgcttacaaagatgctgggcaattagcatccttgatggatgaaactcctgctttcacactcagttaacagtacaatatccttcaaagcaggctatccttttatgaagcgattgtttctgatgttagcctttcttatagtgaacagacatttccctctaacttccaccattcaattcaagtccacctttggcaaatgcaaaacaagccttattcttctttttataggtgatagcccccttctagaaatcagaaatactgatccttctctaatgactacttcttccttccagattttagaaatcttgagctgtgtcttcagtatgctgtctgtgaaataaggctatcattgcgtggcagccaagattttcaccagattgtgattcccttatgaccatttgccttcctgggtaggaagtgataaatggcctgataatgtgagtttttgccagtaataataataatgatgtgttaatatttcttgagcattcactatgggtccagacactatttttagtgctttacatttatgagtgtttaaaatcctcatgacaaccctgtgaggcaggtgctatggattcccattgaagagatgagaaaaccaaggccattttctcaagtccctattactgtctattttttttccttttgaatttaggcccttttggtttttttattattattattataaactttttttattattaacttgaagaccatttcccagctaactttagcaacttgctttattttactagtgctgctacttctgttttgaatcaaatgataggtaatcattccttaaaacagtattatattaaaggaacataccaggaagttttttttttagtaataggcaagaaattaaagtgtatagaaggaaatcatggttccacagctttatgtattttttccctatagcattaattttattcaaagatttaggggaaattttttgttttagaacgaaaagggactggtagctaactgttgtaaatacatggtagagtagagtacaaaacaaaagtctatgaggaaatgaccacttaccaagcagcttcacggagcaaccataccctccacggtaaccattctcttaaggcgattgatggaagagtttccaaccggaaggttgggattcagtaccacccccgcatggacaaatgcagatgtgagatcactcacagccatgtctaccttcatggaaaatgagtcggccctctccaataccatgacacgcaacctctggctgcactgcggttatgggattggcttctctcctacttttgcggttatgggattgaaactctcctactttttagaaaatcctgtggaaggatcaggtaataggaaaaaggctggtgaattctgtaaagggaagtgagtagaattgagttgggttagggaaggaagcattttaggcagccaccatggaaagaaggcaggccaccttctcactgacgatgagacccaagtgctaaaggccagcaacaggcagtgtctgaaaactagtctgatatcatcacagtcttcgagggaaaatatgattctactagggttttcatgtcaatagtggactcgaatttaagaagtctccagtccttttgtagaagtacaagtgttttttatatatgagcagaaggaccagaaagaaaccaactcttcttcccatccctccttaatacagaatttatttacttttcttgccaatctttcatttaaagatgtctcgtaactcttctttaattctgtttcctcctccttctcctgcatagatcagatccttaacagacctttccttgacctaacattcatttttcttccaatttttctttctaatctttctttctttttttttcagagacagagtctcgctctgtcacgcaggctggagtgcaggggtgcaatcttggctccctgcaacctccgcctcccgggttcaagtgatactcctgct

SEQ ID NO: 96229 - DNA, 12616 bp, Homo sapiens
acttcttgttcatttaataggctcttccattaagatacactcatttttaacactaaggatttcgtgatgcaagttgaaaaggaattgcttcactttatttcgttggcatttttttgcaaactatccatagtacccaaaaaggaaatgggagaagggagggctgcagcacaagggaatagcagacatttacccaagcttcctaaaactgaaaagctggaacatagcatacccatagtaacactcatgaccaacaagttttccataacatttggtgttctaaaatttgttttcatcagtggattaaagataagtgcagaaaagaagaaagaaggacagagaagagggaggagggaggagggggtagggaaagtgggagagaatctttgtgacattcatttactacttcagaataagtcaccttgttaagttacagccagaaaaaaatatcactggcattcgagacacaatttgttacaaagtatactaataaaccagattgccaaattatgtcagtcacatctaaataacaacaagcaaattgccttacacagacggagaatgtgtaaggtgcatagatttcctgtgaggcaacctcaactaagacttattgattaatgttatcctacttgtttattctgtttaaaagcacggactgcattattttcgccttccattaaagcctaagccccacatttcaaaatcttcaagctttaaataaagtttccttatctttggcagagggttcatggccacatgtacagggttctcaaagaaatgtcagtgactacctccccaacgccagagcttcagaaatgcaagagtacccccaactaaagttttgggaagccagtttaacaattattccgattattgttatattagataaagctattaaaagaaacgttttctttccatgtgtactaaaccatcaaaattgtgtttgaagagaataaagaataagaaattatctggggagactgagatcatgagattgcccaacggcttctccgttcagtggccacaaattataccccttgcctcagcataatgaatctgtgctcttatccaatacaattaataatgagaagcaatcagagaagcaatcataatatttgaaaataatatagaagacacatacagctccaacatttcttagctatgtgacgtttgatcagtttaagttaacttctttgagtctttggctccacatttcaaagtggaagcgctaataaaaactaataagtttgctttgaaaatttgatgatatagaatacataagacaggtgctctgtaaaatatcaagcaacaaataaatgtatgaaagggaccaggacacgaaaggataggggatcaatgaaaatccatcactgataattaggaaaattattgaaaacacatatatactcttttctgcacagaaaaatgccagcaagatcagcactgaccaacttggagagggtcattcaaaaaggaaggaaaggtgtaattaactattgtgaatccacatatgcctagatgccattgccagaaaaactgttaaatggctaatttaatggttggctgaaattctgttttaaatatagctccccattgcttcccaactgtccttcccctctctacatggtagaatgaaaatactactattctgagaatcaggggctatgtagcctagtttgagttcaccagatgtgtttactttgcactgatcatttattcattcattcattcagccaatgtttactgacctcttaagtatcaggtcctgtacttaccacaggagacagagcagtatacttctcacgtgccttcctatctagcaggggtctcttaacttctccagcctcagctccttcatctgtaagaagagggaaatgagcgcagtgctctctgcagtatcttccagccctaatgttcttagtgttgattctctctgaagatttttgttctttatccttctctaaggacctacaaaatcttgctgagtctttccctattcattaaattatgaaatgttgagtctgtatatatatttacatacatgaatatgtatatatatacacacatatctgtatatagcctataacctattttctaaatagaattcttcccttcaatttatgtattgcacatttttgagagttattgagggaagtcactgtgctatttgtgaaggcatatgcagataggtgtatcaaatagtccctatcttctaagtacttataacgtaatagatgagacaagataaatatacaataaatacacatcagaatccttcctttagaagaaatccctttccattagtgggatcagaggaggtttcttccagtcagtgaagctaaagtgagcttggaggagaggataagatattgataagaaaaattaaaaaaaaaaaaaaagagaagatcatccaggaaatagtataggcagaagaaaagaataagaaagcacagaatctctgaaaaaatactggccatggtggacatttcatatgtgggatgtgagagttgagacaagtagaggagattacagccagatgtgaattacagcacaaaattcaggtgctgggattttatgctgtaggctagcacatcccagtagagtataatacaagccacaaatgcaaaccacgtaggtaatttacaattttagaggcctcattagaaaaagtaaaaagaaacgggaaattaatttcagtgataaattttctttacccaatataggcatcacaacataaaatcaatatatttgacattctttttttcatactatgtctttgaaatccagtggacatttaacacttttggtacatctcaagctgtgctcatggctaggggctagtgactaccatattagaccatgcagttctaggctatggaaagttattacggggttttagagggagagttgtttagtaaaagcaacttttaggcagctgaatgaggcttttgtatgtagatgtgtatcagattgtaaggatgttatagcacaggacagagagatgaacctgttgaaatcatctggttttgaagcgtggtggtcgactcacaggttatgaaaacttgggagaaacattgaggctacacaatccaattaaagagaaagtagtgagcaatatgctgactcatacatttaaaaaaatagaactattcttttgcatagaactcttttttgcacctgattattttgtttatctcactgggcctgagccacattaggttcactcaattccacaaacaaggatcaaacatctaataatgaactgcaccaggctttggggattcatagacgtacaggccattgttcttaatgtcagtaacttaatgtcatggcaattacacaacagagggcaaaagctattttgaagcctttggaaacacaaaataggaactatccaattctgcctggaaaaatcaagaaatggggcaagtgacacctgagctgaatattgaatgataactacaatttctacaggtggaaatggaagaacgggcatcatgcagggaaggaagaacaatgctggaaatttggaaagtacctggcatgtctgggcaacaataaatatcttccaaatttagggtctgtgtggacatttatcagaaatgaagccagaaaggcaattaagggtgaattggaggaagagggaggtcaacatgtagctaaatgcaaagtggctccactttgccgcagagacctagagcctcatcaaggaaagagggcacttccagagcccacaggtgagcactgaagaacatggctttaacctgagaaaagacagagaggagtcagcttctgtgagagttatgtgaagacaatagtttacagattacaacccagaacactgacttggtgtcagatataatgatctgccttttcaccgaaaagtatttgacatttcactaaattgacctttgcttgccaatagcaaactcaattgcattatcttctctgttcaaagtttaatagtatagtcataggcacaatgtatctcttgaaggtgagcttttgttgtttggcattctgtgttccccgaacaaaaagcttcaagaaaaaatcactagttttgttttttcttaaagctacaggtgatagggaaatatgcctgcattagttttctattgctgcataacaaatgcccaccaccatggaaacttaacatccatttattagcagatagttctttaggtcagaaatccaggtaggctcaactggattctctgctgagcatctcacaaggctgaaatcaagctgtcaggtggattgtgctctcgtctggagatgactctcgggaagaatctgcttccaagttcattcttgtggttggcagaatccaattccttgtggttgtaggaatgaggtcccggttttcttgctggctattgactaggggtcacagctcctagaggctgctttccaaatccttgcatcttcaaactagcaacactatgttaatccttctcttgcttggaatctaatcactccttctgctacttgctagagaaaatactctgctgttaaagggcttatctgattaaattagacccacctgagtgatctccctatcttaagttcagctgattagtaacattaattacaatctgcaaaatcttttgccttgtaaatgtactgcaataatagtagtaacaccaagacaaaggttatgggagccatgtacaattccacactgcctttaatagcatgtcagagtaactttcaaatagaaccgttttttttcctgtaaactgaaagaagcatttgttgctaaaaatgaaacaaaaacaaaataaaatctttgaatgtccataaaagaacagatatagaagtttttcctctaagtggctgattaaatgggggggggggcaatgaatttatatgaatttaagagaaaatgaataaaataaaagcaatttttatttctgatagtatggtagaataggtaccctatatcatttatatcaccctcactgttgaaataactaaaatatatgatgaaatatttaaaatatatgtctaaatctataaatataaaactatatctatgaggctgctggaaagtaaggagtgaacagatccctaacataaaataaaatcagaacacccaattggtaagcaagttatcaagtggctattgctgtgagaatttttgctaaaccctagaattctttggcttccattctgatggttttgtgggaccagctgtgagatacagcctaggtcttggtcagtgcagggaatctaacaggaggcattcataaaaacagtattctagagagctatactgccaatgtaagaatgaatttgcaatgaactctgatatttcacaagcaaattgattttggcatagtgtgagagaatggaattctctgaggattcataatcccaaattggtctttgcttgagtttgggttctgattcatcctgcatgtgtggtccataaaacctcaagcatgatcccagacgaccatgtccttaggtgactagtagaaaaaaatgtataacttcttcgaaagaactcaacttcagcccaggattcaagataccacaaataaagtttcttataaaatgaacagtcaagagtgaagtatcacaaaacagtaaaagaagtaaggcactgtgagtaaaatgacagaccacaaaatcctcatataatagaatttttgacatggaatataaaacagttatgtttaaagaaattttctcactttgggaggcggaggcaggcaaatcacgaggtcaggagattgaggccatcctggccaacatggtgaaaccctgtctctactaaaatacaaaaaattagccaggggtggtggtgcgcacctgtagtcccagctacttaggaggttgaggcaggggaatcgcttgaacccgggaggcagaggttgcagtgagccgagatcacaccactgaactccagcctggcagcagagggagactccgtctcaaaaaaaaaaaaaaaaagaaaagaaaagaaaaaagaaattttctaagagtttgaaaatatgcttaagtttgctgctgccactggagccactccaattgctggcctcttcacgcctggaaccttcactaaccaaatccaggcagccttccaggagccacggcttcttgtggttactgaccccagggctgaccatcagcctctcattaaggcakcttatgttaacctacctagcattgctctgtaacaattctcctctgcactatgtggactttgccatcccgtgcaacaacgagggagctcactcagcgggtgtgatgcggtggacgccggctcgggaagttctgcgcatgcgtggcaccatttcccgtgaayacccgcgggaggtcatgcctgatctctacttctacagagatcctgaagagactgaaaaagaagagcaggctgctgctgaaaatgctgtgaccgaggaggaatttcagggtgaatggactgattcagctcctgagttcactgctactcagcctgagattgcagactggtctgaaggtgtgcaggtgccctctgtgactattcagcagttccctactgaatattggagtgctcagcctgccacggaagactggtctgcagctcccattgctcaggccactgaatggataggagcaaccacttaatggtcttaagctgttcttgcatgtgttcttaagcaacatggcaataaggttgatgggaaataaacatcagtttctaaaaaaaaaaaaaaaagaaaagaaaatatgatcagggaacctgagaccataaaaaaagaccaagtgtttgtacaatataagattctgcaaagtaatatataataattaaaaattaaaatgaaatggataataccattcaacatattagatgtaatgaagatagtgaactggcagatcaatcctaagaaacaaactagaatgcagtccagagagatgaaaatatagaaaacatgaaacataggttattacagaggctagtgtaagaaggtttagcatacatctaatcagagtttcaggcggagataatagagataatggagcagaggaatactcaatggggtgacaagaatttccccaaatttttaaaagatccagtcttagaaatgggaaacctagtggatcccaaacaagataaatgaaaagatttctacacgaagacatattaaagaaaagctatagaacaccaaagtaaaagagaagatcttaaaagtggaaaaagtgaaaagagagattgctttcaaagtatgaatagttagcctgattataaactgcctgtttgagatgtaaatcttctaccacccagaactgtctccttaatgacctggagctgtctctttgacctcaaaggaggtagtgtgagttccaccgatccccaacccccactcccccactcccatcccgtctcctgtcttcttacctccctcttgttcttttgcctcccaggctccttgggagggtaagggaagaattttgttaggtgccttacctaatttgtaaaactgcctcctgtcctggaggtacgaagtttgtttcttctccatataagtgccaattaataaaccagatggcctgattacattgaccaagccccttcttgtttttgtaattttccatttccctcactctgttggacctgccactggtttctccttccctgtttcatcagtctctctttaaaccaccatcacctctacacagttggagtcgagctcagttttatacttgttataaataaagtttccgtgctgcaaaagaaatagcacttgaatgtaaaattttctttttaattctcagcaaggcaatgtacttctatagaagggtgtgcccttacagatggagcaatggtgagtgcacccttggacaagggaggggaaggggttcttatccctgacacatgtggcccctgctgctgtgttgttcccctgttggctagggttagaccacacaggctaaactaattccagttggctaatttaaagagaatgacggggtgagtaaggtttggcaggaaaaatggttatgacagagcaggtaattggaatgagtcagggtggagcaggtaatcgaaaaaggttgctttccgaggaagttaagtttaaaagtagaaggcaaagaattgaacatactgacatattgattatttgaagagaaatttagaactcatagctaacatactgaagtctctctctactactgcagtagtattactgaatagaagctgtctttatcacctttaactagtgtctagctttgtttttctttaacaccgctcaataaatgcgaactttattctgatatctcaatacatttccctggtccccgtgaaggtgttttgcctcctggatgctgactcttctttacaagtttgtgtcttatatattttggaggcaattactaacctaagaggtctttactgaacactaaatgacttaaaatccagttaagaaaaagaaagtcagattaattttttgaggagaaaattttagtaacttaactcttttaaaaccagcttcaactcaccgctagtctcaacagctgatcattaggatgatatttcaagaattagttcatcctaatgaagaaaacagctcaaagaaagaagtcctacatatttttgcctttgggaatgagaagaaattaaggaaaatatttctgcatttggtttgaaacgtcacaatttttgtttgctgaatggaaggaaattctacttctggcagaaggaaaatgaaagagctgagatgcaagaaggaatagtgcgacagaaattagattagtggttgccaagggctgggagggaaaaatggagaaatggggtagactgctaaagggtacagtgtttttttgggggatgatgaaaacgtaaatgtaaagttaattatggtgatgattgcacaatactgtgaatatattaaaatgtaggtacacttttaaataggtgagttgcatgtgaattatatctcaataaagctgagaccaataaaaaaggaatagtgagcgatggtattgataaatgtggataaatctaaaacaaatattatctaaaacagcaataaaaataatgtcccatatagggagatttggagaatcagtctataatgaaatttctgactaaaaaatgtacctattagtgtggaggagatattggaactggtgtactaattctactgttgtcattctcagaaattattcaagcaactagtttatctcctcttttgctagccttgatgaatctactataatccttctcatcccagcatgatattttatgagaggaaccgttgctccatccagagagagtaagactattaacaactgtaagtttcaaattatttgacacctctttcatttcttctaagttctgtacttttacaaaaattacttcagctctcttttaaaatttgtgcgtaccttgttttactgtgcctcactttattctgcttcacagatactgctttttttttttaattaaagatgtgttgcaaccctgcattgagcaagtctgccagcagcatttctccaaaggcatgtgctcatttcgtgtctctgtgccacatttgggtaattccctcagtattttaaactttttcattattatatctgttgtggtgatctgtgatcagtgatctttgatgttactactgtaattgtttcgggcaccataaactacacccacataagacagcagacttgatcaataagtgtgtgtgctgtctgctccaccaaccagctgttcttgtctttcttcctctcctcaggcctccctattccctgagacacaacaatattgcaagcagaccagttaatagtcctacaatggcctctaagtgttcaagatagagtcacacatctctcattttattttttattacttttgttgtaatttcaacttttattttagattcagggggtacatgtgcaagtttgttacctgggtacattgtaccctgaggtctagggtacaaatggtaccatcacccaggtactgaccataatacccaatagttagtttttcaatccttgccccttctctccctcctacctctagtagtctgcagtgtctattgttcctatgtttttgtccatgggtgctcaatgtttagctcccacttataagtgagacatgcggtatttggttttctattcctgcattaagtcagttaggataatggcctccagctgcacccaaattgctgcaaagaacatggtttcattttttatggctgcatactattccatagtgtatatgcaccacattttctttatccagtccaccactgatgggcacctaggttgattccatgtctttgctattgtgaatagtgctgcaataaacatgtgagtacacatttcttttggtagaacaatttaatttcttttggatatgtactcagtaatgggattgctgggtcaaatggtagttctgttttatgttctgtgatgtctctcactttaaataaaaagcgttttaaacatatgtgtaaatatcacatctgttcacagcatcgtttattgaatgtgtttaagcttactgttgagacctactgtttatttaaaaaggctcctttcaaaagattactgttcactgacagtaatcttgggtgacctaatcacccaagagtcctgatggagatgtacaaggagattaatgttgctttcatgccttctattacaatatccattctacagtacatggatcaaggagtaatttcaactttcaagtcttattatttaagaagtacattgcaggccgagcgtggtggctcacgcctataatcccagcactttggaaggctggggcgggcggatcacctaaggtcggaagttcaagaccagcctgaccaacatggagaaaccctatctctactaaaaaaaaacaaaattagccaggcatggtggcacatgcctgtaatcccaggaatttgggaggctaaggcaggagaatcgcttgaacccaggaggtaggtggaggttgcggtgagctgagatcgcaccattgcactccagcctgggcaacaagagccaaaactccgtctcaaaaaagaaaagaaaagaaaagaaatatatttcataaggctatagctcccattgtgattcctctcatagatctgagcaaagcaaattgaacaccttctggaaaagattcaccattctagctgctattaagaacttctgtgattcatgaaaggtgttcaaattattgaccttaacagatgtttggcagatatggatatcaaccctcatgaatgactttgggaacttcaagacttcagtggaggaagtaactgcagacatggtagaaatagcaagagaattagtggaatctgaagatgtgactgaattgctgcaatctcatgatcaaacttgaaaggatgaggagttgcttcttatggctgagcaaagaaaatggtttcttgaaatggaatttactcctggtgaggatgctgtgaacattgttgagatgacaacagtgggtttagaatattacataaacttcattgataaagtagagacacattttgagaggacacactccaattttgaaataaattctactgtggttaaaatgctgtcaaacaatattgcatcccactgaaaactctttcataaaaagaagagtcaatcaatgtggcaaatcactgttgtcttaatttaagaaattgccacagctaccccaattttgatcaaccaccaccctggttagcagccatcaacatcgaagcaagaccctccatcaacaaaaagattacaactcaccgaaggcccagctgatcattagcatttttttagcaatacaatattttaaaattaaggcacgtacattgttttttaaaacataatgctattacacacttaatagactacaatatagtgtaaacataacttttatatgcttgggaaaccaaatgatctgtgtgactcactttactgcaattttcgctttattgaagtgctctgaaaccaaatccacgacatctccaaggtgtgcctatactactcaaggattagatttgcactaatgaatgcatatccagtcctagaaccaaataatgacaaatcttcatagaaaggggatgaatttacccagcacaaacactgaaggtcaatacagctagactgtattttgaactctgctagttataggtgctaggtagactggggcaccacactttaatgaggtcttggcttcctcatctatagaatggagaataaaatatcttgtgtctcttatatttttgttgtgaaagtccaataaaatgtttaaacttgtgctttaaaaactgaaaaagcactatacaaatggatagtattttgaaaactgtgtgtttgccgggcatggtggctcacgcctgtaatcccagcactttgggaggccaaggggaggtcaggagttcgagaccagcctggccaacatggtgaaaacccgtctctactaaaaaaaataccaaaattagctgggcttggtggtgcatgcctgtagttccagctactcatgaggctgaggcaggagaattgcttgaacctgggaggcagaggttgcagtgagcagatatcgcaccaatgtactccagcctggatgacagagcaagaccccgtctcagaaaaaaaaagaaaaagaaaaagaaaactgtatgtttatgtttcttaa

SEQ ID NO: 96230 - DNA, 13792 bp, Homo sapiens
ttctaccctaaggctggccatagaaatcagaattcctctgccccacagtgggtcatagaaactaaacatatttctctcaacttccattgcctttctgcatatgagctggccataaagaaattctctggtctaccttgtctgatagtagatcataaaacccttattccagaaggggtcctgctctataccagggaggaaggaatgccacacagagaggccaagaagaatccaaatagtcaggccttgctgggttgttccccttcaatctattacattagattatttcctttttgtccaatcccatttttacatggttgtccactcctcattgaatctaagcataaaaatggacagttttcccttgggtctttgagtcttcattgtgaatgcttccgtgtcacgcaaaattctgactgaataaatttgccgtgcttttgtcttgttaacctgtctttcattataggagtgtcaaccatgacaacccccctcctttttctttctttctttctttttttttgaaatgctccattggccaggctgcagtgcagtggcccaatctcggctcactgcaacctccaacctcccaggttcaagcgattctcctgcctcagtttcccaagtagctgggattacaggcgcccgccaccacgactggctaatttttgtatttttagtagagaaagggtttcgccatgttagccaggctggtctcaaactcctgacctcaggtgatctgcccacctcggcctcccaaagtgctgggattataggcatgagccaccactcccggcagccatgacccttttgagggctgaggaaaggtatcacagcattttcaccctgcaacagagaccaaaacaacttaaatcagttccaaaagtctaccatcaattttactatcctaaaatccaaagttctttataggtgaatgtacaatatttcgtcgtttttctatctgcttctacattaactacacaaaatgctgtatcttctttgttcctctttaaaataaaataataaacttttagtacaggtttctcactaagactgaaatacataaatacaagttttgtctatgattaagaaatttttttcttttaagtacttccaaattaaaatctcaaatcagtaaaaatgagccatgtggaaataatgtaagcatttcaagggcccttttctcctattttatcaaattactggcacattgaatttcctagacaaaaatacttttataaactatgctcacagcaggattaaagaatggttgaatcatccctaacaatttccgctaccaaaaagaggcaactgaaaaaacagacatttagaaagtaaatccaagttaatgtggcatcaaagaatgaaaaggaaatttcttacaaaaatgttttactgaccaaagtagttatgttttgagggaacatgaaaggtattgctttcatggctttaaccttcttattcctgctttgggaaaaactctcccttccaggttcactttacaataattgctgctttttctgccctgcacctcacctcacttttccctttcttgaggaatgttcttaaggctctagagagagctaagatagaaaataagagtgggaaagaaatacttggaaaacaagcataaggaggactatcatgacatgtgactacaaaaaaagttgcttggggccagatcataaacatccaagaccaagaatagtcattatttcattaaggagaaaggagggtctttgagaagagtgatttggccagatgcacaaaaggtaaagcttcaggactgccctgaaaagagtatggaagcaggaaatgttgggatgctcctaggatggttcccaggatatcagtcagggcagcaaacaggcagtggtcaagctgggtaatttaagaaagataaacaaagaatacttgcagagatgtgggcagtttaaggaaactgacaataacggtagtgctgcattagcagagaactataatcactcctaggcctgcagcaaccaagggagcagctagaggagcaggaggaagatggctgcgtggacagggctacctgatgggagctgtggccttttgatggacttttgatggcaatctgcatgcgtgccctcactctcttcacgccttctgatcttctgtcactgcccctgctggccaaacccagttggaagccagggacagagtggagaaagaatatggagaagcagatgaaagagatccagtctaggaaaatagtggcaaggtcatggcagtgggaatggaaaaggtacaatatagagataagccaaacaagacttttacattgattggatttggagataggaagagaaaagtcaaggatgatgtcatagtttcaagcccaagctctagactagaatgatgataacatcaactcaatgtcggcatagtgcctcaggcatcaaaggccttctataaacatttcctgggagaaaaagaggggagggatggacggatggatggatggatggatggatggatggatggatggatggatgaaggagaagcaaatctgggagatgatgatatgttatgtcgttttagccatattgagtttagaatatggcggaaaagcccagtaggtagttgaagattaaatcctagagctccgaaaaagaaagaaaaatgtacctgtaagaaccagctgcacaaaagtggtagctggcaccatgcaagtggatgacatgtcacagggagcacatagagagaaaaagtgggatctgatgaccaaacttaggatctctctgtatttacgggatataaggaagaagggaaaccaacaaaagaaaaagacaatatataccaccatttgctgtactattaatatatattcatatatatttatacatctctggtaggcctcctttttctttttttaatgaaggaggtttttatttatttatttcagaatcaggagatgctctgttgcccaggctgcagtgcagtggcaccatcacagctcagtgtaacttcaaactcctgggctcaagggagccttcctcagcctcctgagtagctgggactacaaacgcatgccactacagccagctaatttttttactttttgtagagacggggtctcaccatcttattcacgctggtctcaaactcctggtctcaagggatcttcccgccttggcctcccagtgttctgagattacaggtgtgagccaccacgcctggccagagcctgctttctctgggcactgtatagtcttgcctaaaataagaatgatacaaatgcaacctggagaccacaacttacccacttacctcagtaagattttttttaagcccgaaatcccaatcttactgtttttgctcaccttgaatctaacacaatcaatagtaataacctttaattagataaccctatagtgtttatgcttttaaacaatcattttgttgaatgcctaatatgtgcccagcactatgtggaagtaaaaatcagtctctagtcttcaaggaaattaaaatcagtttagactataaaaaaccactgaatatggctgggcaaggtcgttcacgcctgtaatcctaccactttgaaaggccaaggtaggtggatcacttgagctcaggagtttgagaccagcctgggttacatggcaaaacctggctctacaaaaaatacacacacacacatgcacacaaagagccaggtgtagtggcacgtgcctgtagtcccagctacttagggggctgaggcaggaggtccacttgaacccaggaggttgaggctgcagtgagccaagatcgtgccactgcactccggcctgggtgacaaagtgagaccctgtctaaaaaaaaaaaaaaaaaaaaaacactgaacataaaacagagttcaattaagagctgacctgtatgatccagatcataccatttaacacttgtcaacctatgctctttttttcccaattcagaagattgacagagaagctaactcctacataactggtacttcctattaaaggtccaatgacgttacattatatagtcaatttctttttacctttcttccccagtattccataaggtctcagttatctttgcacctagtgtctgccacatggtagccattcaattaaatgtttgtcaagtgaatgaatgaatgagaaaccaagccaagcccatagcagtcatatcaatacactcaactctctcctatggcaaatcccaaaggtttaaggctcaaggcagttagctaatatggtctttgacctagccttggctacatgggatgactgatgttaaagccttgatgctgaatgttaaagtaggttcaaggggaaaaaaaaaacagcaaattctaaaatgcttctggatgagaaaggctagcacaatgctgaaactaaactgagtctatttgctaattgctattaagttaatttcattggttaattctccagcataaccccctctaggataaacctggcccccagtgaaaggaagataaaccctgtaaaccacgcaatcaacagtgcctctgatactcaaatgtacatcctagtcacctacagatcttattaaaataaaggttctgataaattacatctagagtgaggcctgacgttctgcatttccaacaagctcccaggggatattatgctgctggtatgcagaccacactttaatgagtatcaagagcttggacgacattgcagagaatagatctacagacttaaaaccagagttaagatatctcttgttcttatattccctaactgcataactttagataagtcatttcacctctctgagccctccttgtttcatctgtgaaaataatatagttaatacaataattaataacatagttaatactaatagctaacacatactgagttcttaccatgtagcagtaactaatgttttatgtttgtcaatttataaataaggcttagatcaaacatcctctccaagtaatggtgacctgatacctgattgtaggccgtttgactcatacttaacaccatgtagcacttacctcccagagcctatgaaaatgaaataataatcggtatttggctaatttgtactgagtactcatacgctccaggccctcgtctaaccctcccttggacgatattaactcatttatcttataaccaccctaggaagtattattatcattatctcgcaggccttaaaacggcctcaacaagtaaaattgctgaaggaccaacagtggcacagtcaggattggaacccaggcagtgtaactgcagagcgtggcttagtttcagcactgtactagattaattgaactagactaggttctgtaactgcagaatcccggatctccgagtcagctagctcactagggtcggtgcacacccgcgcccactcggggtggcttcattgccagagccactgactcccaaaacaaaacgaatcttctacaattagctctatgtgtatctttgggatgttatctttctcgggccacaactaggaaccctgaaagccgactatgactccagtgaaactatttggccctaagaagggtgattgtctaaacatcttcacaacggatttacactgaaattgtaacacgcacttgattggaaccccacaccacaggcagtcccaggaatttgtacccgccccggtcccggaccgcgcccctggacaaaccctccggcccgcccctccggattgagccccaagactgtccccggaccaccatcctaagaccactccctgaactgccccccccaagaccgccccctagatcgccccccgggaccgccctctctagaccgcctgcgagactgtccccggaccgccccctggaccaccccctaggcggccccccgagctgtccctggaccgccctctagaccgcctcccgccccctgcatcctgggaatcgtagtcccaatcctgctctggaactagcagtgcggcctgctcgggccagctccgcctctatctggcgccagcctaaaggtcccgcttctaatcccatcatctctccataccgccctctgccggcctttcctctggtcgcccggattgcgagccgcttccggacgctccggaagcgaacctttcttttccggattgggcatcccggcatctgcacgtkgttatgctgccggagtttgggccgccactgtaggaaaagtaacttcagctgcagccccaaagcgagtgagccgagccggagccatggagggccaragcgtggaggagctgctcgcaaaggcagagcaggacgaggcagagaagttgcaacgcatcacggtgcacaaggagctggagctgcagtttgacctgggcaacctgctggcgtcggaccggaaccccccgaccgggctgcggtgcgccggacccacgccggaggccgagctacaggccctggcgcgggacaacacgcaactgctcatcaaccagctgtggcagctgcccacggagcgcgtggaagaggcgatagtggcgcggctgccggagcccaccacacgcctgccgcgagagaagcctctgccccgaccgcggccacttacacgctggcagcasttcgcgcgcctcaagggcatccgtcccargaagaagaccaacctggtgtgggacgaggtgagtggccagtggcggcggcgctggggctaccagcgcgcccgggacgacaccaaagaatggctgattgaggtgcccggcaatgccgaccccttggaggaccagttcgccaagcggattcaggccaagaaggaaagggtggccaagaacgagctgaaccggctgcktaacctggcccgcgcgcacaagatgcagctgcccagcgcggccggcttgcaccctacsggacaccagagtaaggaggagctgggccgcgccatgcaagtggccaaggtctccaccgcctctgtggggcgctttcaggarcgcctccccaaggagaaggtgccccggggctccggcaagaaaaggaagtttcaaccccttttcggggactttgcagccgagaaaaagaaccagttggagctgcttcgtrtcatgaacagcaagaagcctcagctggatgtgactagggccaccaataagcagatgagggaggaggaccargaggaggccgccaagaggaggaaaatgagccagaagggcaagagaaagggaggccggcaggggcctggggrcaagaggaaagggggcccgcccagccagggagggaagaggaaagggggcttgggaggcaagatgaattctgggccgcctggcttgggtggcaagagaaaaggaggacagcgcccaggaggaaagaggaggaagtaatagtttctaactgtcggacccgtctgtaaaccaaggactatgaatactaaatgttaagttctaggcaattatacggggactcagaaggacctggccgctgccttcattgagtttaaagggacaggattgcccttccgtcaagaaagtatgtaagtgttggactgcacaaattaatgtttttcccacaaccgagactttggagattaagaacttatttgaggatttaagaattagggaaataatttggtggaaaccgggaatgagttctattcttaaacagcctttttttttctttttaatgttggatatacggcgaggtagagttggccatatttcagagacttagattgacgtatatgtttctgcattatttttacaacaagtttgtgtatcagagcgggagtgcgggggagggaaagaaaacaaacagtttcagaattgaataggcaagtgactgttttaaagattaagtaataaagatgtcttatctagtgtgacttttaactttctgactactgggtagaaattgtacttgaagccggttacctggatacctggtacagattatttttgtttactttctgaaaaacacaaagcaggccgtgcgcagtggctcactcctgtagagtcccagtactttgggaggccggggcgggcggatcacctgaggtcaggagttcgcgaccagcctggccaacacagtgaaaccccatctctactaaaaataaaaaaattagccagacacggtggctggtacctgtagtcccagctacttgggaggctgaggcaggagtatcgtttgaacctgggaggcggaggttgcagtgagcccagatcacgccactgcactccactccagcctgggcaacagaggaaggggccatctcaaaaaaaaaaagcagttcaattataatggtttcagtgataccacttctaaacttatacttcttttggtatcaaatataatattcaaagtagtaaaactgatgtctgttttttaaaaagattttatgcctttcaacactgaacacatggatttcctgtaaatgatcaatttgggcttcattgactaatggtaataatcctcattaatccagaaaacacttaaatctttctctacgtttatatccccagttgtttgtgtgtgtgtgtttgtttttaagcttgacgtcaggtatagttttgtttgggggaagaaagaaacagacccataagatccttaattaggacattattatctttttttaagttccggagtagatgtgcaggatgtgcatgtttgttacataggtaaacgtgtgctgtggtggcttgctgcacctatcaacccatcacctaagtattaagtccctctgcccccttctatcccctgcccccaggccccaatgtgtgttgttcccctccctgtgtacatgtgttctcatagaacattattttttgattcatttgtcaagttggcctgagctggtttgattaggaggtgaaatgtttatatagctgtccttggtcttcctgtccatcaatcttttccagtttgatcgcagtaaattcatttctgtaaaacttaatatctcccataaaggattcagatttcataataacagattactaaaaatgcaaatgtttagttgttactgtctttggatactttctgataaagttgagctttatcgttaatcagcttttccactgggacatggcagatatggcacagccaagccctcccggagcatagtctaatcatggcaagttttaactattgatgtaagagttttaactattgattttgctttcatcaaaagcaaagccattcacacagtatttaacaaaaaccctcgggctctgctaggttcttgtttactgttaaaacagtttaaaggcagggtcttgatcacttaaaatactcttagaagggaaagtaacattttaaaggattaacagtggaaaaagaatatccctgttcctcttccttcccccaagtcctcaacatgtgaaaaatagagttgataagtaaggagatttaaggcagaacccgaggcctacggagcagttaccttctacggcaatttcaagggtggatggtgcgagcgccgctggggcagctggcgttctggttcttactccgtgggaaaatggccctgagcccgactggcttgaggcttagacaggtgaccccgcgaagcgggtgggcaggcgcggccgaggggcgggaggcgggcagcctccgtgattggccggcggagggggcggtgtagcgacccgaggagggaagaggactccaagcgccatggccgctgccgcccgagcccgggtcgcgtacttgctgaggcaactgcaacgcgcagcgtgagtgcggggccggcgggcgggcaggggaccgcagggtgcccacgcagccccctgggtgtgacccgctcagatcctgcgcagtcttctccgcttactttcaagaattcggagaatttggataccgccctgggctcccaccgcgcgccaggcggaacagcgaggtcacagagtgcgcgatgcagcctctcagggcgcagtgaggcagcctttactctgcttgtctaccgttaaagaaactgaggcccagagaggacctggtcccacatcgtagcaggcagtggagagcttggcacggtggccaagacaaattcatgtatgcaattgacacatatttattgggcatatattatgtgccaaaaactattctaggttctggggatacaaagatgaaaggctctggagcagtttgaggtctagtggggaatgggatgaggggacgaggctaaaaccggctatagcagactgggtgtagaagggaaggatggatgtgagaagtcgcagagtcacacttcctggcatgtacagggagtcagggtattcaatgtcatgacacgcctgcctcccagcagaaatgtgaggtacatcctggtcacctgataaatacttgctgactgtgcaagtgcacaagtctgcctgggaaacatggaaaagtttgagctcacaggtgcagatcagtaggaggaaaggcgagggactggcgaggaacgtcaggcagagagaagagcaacaccagcgatggagatgcagtcccaggacacaaaagacaagtagacctacctttataagaggaggtaaagatggagaagacggctgataaaagaccatgaataagaatatagctaatacgatgagcccggcagtgtcttacacactttgaatggactatcagtataatagtaactctaatcctttcactgaccctatgacacacggtattgtcatcctcatagatacggaaataaaggcatggagaagaatttgtccagtgtcacacagctaagcaaatggcacagtcataatttgaacccagatactctggcttcacagtccttgttcttaggcctgtagtaaggaatttgaattgtgtgctgtagataatggaaagccattgaataatatttgtcaccattaaacactgataccttaaaatgtcccatgacaaaagaattacatggccaaataagtttgagaagctccttactgctgtattgccctcttggagaatcaaaatatacattagacatgcagggctccaagaagctacaaaaaatactaaagctgtgttcaaatttttggttgtaaacctgtgtcatcatagaactctttgtcacacaacaccatttatatcccatggaatcagtgtcacacacagaatatgtttttggaatggttgcatgaaaagggagtatggcataatcagaactgtgttagcacattctggtggaaatgtggagtgaagaggaaggactagaggtcattgtcctgctccagcctgaagataatggcttcatgcacggagaggcagttccttgggtagatagaaatgctgagaggttggttagaatccacaggattttgtatctgaatagtgaagagttgagatttctggcttgggcatcaagtaaacagtgggctcatttaccaaggcagggattgtaggagagttagtgttaggaggaaaatggcaacttcagtctagggcattttgagttgagcatgcttctggtacattcagatggagaccccagtaggtgattgaatgtattgttctggggctcaagagtgagttgggaacacatccatccatgcgtatggaggacagttgaagccctaacaaaactctaacctagaaggaaacagctgagggtgaattcctggggagcagcactgccacagcaggagtagcaagatggtgctttcttctgcacatgcttattattctaatagggtaaacattttaaaagtgggagatttccaatgaaaatcttggaaaattggaaaatggcatcattgggcacatgtttcatctgggcaaagtgggctagggcacggggtgatgtgtggccatttctattggacagagcatgcactctgggcttctgcccaacacattccatagagcaactgcgctgacaactgaatggaggggaaagaatcagcactgaaggagacagaggcaaggcgtgcactggccagagaggttgtgggaaggccctggagggcaagagtcacattccgtctccagatgtgcagccctgcacagggtggtgggtgcccatagtcccagctactcaggaggctgaggcaggagaatcacttgaacctgggaggcatagtttgcagtgagcagagatcaggccacttcactccagcctgggctacagagcaagactgtgtctcaaaaaaaaaaaaaagatgtgcaatgcagccctgctttgactgtgttatctctggggtacagcagggaacaaaacaacctaaccacaccatgcatggggcacaggggatagatgacaaactagttagtaaaattgagagtacattagctgttgaaagttattacagagaacataaaggaggctgggatgttgaaggaagggatgcaatttttgaggtgttcagagcagccctcactatgttagtttcctacagctgttgtaacaaactaccatgaacctggtggcttaacacacatttgtcttaacagttccagaggtcaaaagtctgaaatgagttttactaggctgaagccaaggtgtgagcagggccacactccctcttgagtaaggctcagaggtgctgcagaatccacttacttgcttttttccagcttctagagctctaccttcggttccttagcttgtggccccttcctccatcttcacagctggcactcatcttgcttcagtgctcacatttctgtcttttgggtcaaatctccctctgcctcccttttataaggctatgagtgattgcatttagggcccacacagatcatccagaataatctcctcatttcaagattttttttttttttttttttttttttttgagacagagtcttgctgtcacttaggctggagtgcagtgatgtgatcacggctcactgcaatctcgaatttctggcctcctcaaagatcctcccaccttagcgtcccaagtagctgggactacagtgcacaacatcatgcgcagctgattttattttttgtagagatggagtctcactatgttgccccagctgttcttgaactcctggccccaagcagtcttcccatcttggcctcccaaagtgctaggattataggtatgcgccacaacacctagcaagattcttttttttttttttttttgagatggagtctcgctctgtcgcccaggctggagtacagtggtgtgatctcggctcactgcaacctccacctcctgggttcgagcgattcttctgcctcagcctgctgagtagctgggattacaggcacacaccaccacacctggctaatttttgtatttttagtagagatggggttttgccatgttagccaggctggtcttgaactcctgacctcaggtgatccaccggcctcagcctccccaaagtgctgggattacaggtgtgaaccactgtgcccagccaggatttttaatcatatctgcaaagttcctcttactatgtagggtaacattcacagattcccaggattagaaccttatcttcaggagcaattactcaactcagtgattactcactgagaaggtaatggttgcggaaagaccagtggatgcagagagcaaaccctgtggccttcagggaaggtatgcagaggtgaagcatacctgggtatggaacagagtgaataagggggagatgggagtgtggggccaagggtgaccccaagattctccggcacgaacaactggaaggatgaaattgccattagatggggatggggaaggctgtgggaagagcaggcttgagagaacaccaggagctcagtctcccatagggaaaatgttgccacttcatagacatccaagcagagatgccaagtgggcaggtgaacctggacttcgggagagatgcccaagccagaaagataaatgtggaagtcatcagcatcaaaggtatttgagaccatgagaccaggggaggtca

SEQ ID NO: 96231 - DNA, 21739 bp, Homo sapiens
actgtttagccattgaacttttgatggccagtgagtatgactggggcccatccaggcagggtgtggagcagagggccctcctttatgggctggactcactagtgggctgcttacctgtgactcacctccaaggctcaagttaatgctaacgtgttgatttgctagaactctgagctgtgcctgtgtctccttgggccctgggagatttttttcttttagcagtattttatggagatattgtctaggtagagtaaaatgtacagatcctggttttctgttgagttttgttttgttatgaggcagggtcttgctctgtcacccaacctggagtgcactggtacaatcatagctcactatggcctcaacctcccaggctgaagcaatcttcctgcctcagtctccctgtagctgggactacaggcatgcaccaccatgccccactaatttttttgatttttagtagggatgatgtctcattatgctgcccaggctggtctcgaactcctgggctcaagcaattctcctgcctcagtctcccaaagtgctcaattacaggtgtcagctgctgcacccagcctcagcctgttgttaatggatgtaaacacctgtgtgaccaccacccagaaccagatccagaacatttccaggctctcgaagactccttcgtgcccgtcccagtcagagacccccaagggtaatgccattctggcctgttgttcaacttgacttgaatggaattttcacagcatgtgtctgtttggatctggcttcttctgctcagttgcgaggcccattgatgtttcctgtggcctagctcctttttattgctgagggccactcagttgtatgaaaaccacaattcattctcccttctcctttggtgaacatttgcactgtttccagcctgggacaatgatgagtaaagctgttaaaaacaggcacatatgttttcctttctcttgggtaattttttagaagtagaaaagccagccaatagaagtagatatttgactgtattaaaactcaccaagcagtttttcttattttttttaatttttaaattttttttagccagagtcttgctctattgcccaggctggagtgcagtgtcgtgcactctcatggacacacatggatccagatgccacagcagccttagctggccaaccttaaaacaacacatttgttcttatagtgttggaggtcagaaggctaaaatcaaagtgtcatggaaggtggccagcaggaccgtggagcctctgaggcagtgggacactttggctaagagccacatactggctctggctggcaggcagtcttggccagccaggctgagctccccactgtcggggcaagcctgggtgtcctctggtgatgctgagtccagaacaaggctgtccacattctggtccgcagggctcagctctgctttctagacttccaaataggaagaagagggaaagttcccagtctctgggcacaaccaagaacagagagcaagttctgactcagcagagggattgattcattccatgcaaagagctgcactgccaaggctgacacgagccagggactcagcacacggcatcacacccagtcctctccagaactctgccacgtagtgttaccatcctgccattcagaggagggaagtggggcacaggcaggtcaagcaacttggccaatgtctgaattgctagtgtacggagctgggaggggagcccatggggccataaatccagtgcaaaaatccgtcctcctgaaccctacggagcaaaagtgagtccagttgttttcctgggtttcctggacacacagatctgaatttcacagcagccttggctggccaatcttaaaacaacaaatttatactcttaatgattctggaggtcagatgttaaaaggtcaatgtgtcagcaagtttgtttccttctggaggctccaggggagaatctgtttcctttccttttgcagcttctagaagctacatgcatgccttggcttatgggccctcctgccatctttaaaactgtcagctttgtccaggcacattgactcatgcctgtaatccaagcactttgggaagccaagacaggaggatctctttagtccaggagttggagaccagtctgggcaagaaagtgagaccgtgtctctacaaaaaaatagaaaaaaattagacgagcatagtggtgcatgcctgtagtcccagctacttgggaggctgaggtggggggaatcacgtgagcctggggaagtggaggctgcagagagctgagatcacaccactgcactccagcttgggtgacagagtgagatcctgtctcaaaaaaaaaaaaaaaaaaaaacacaaaacaaacaaacaaaaaaccaaaaccagcttcttcttgcttctgttgtcacatctgcaggactcattctcccgcctcccttttataggatccttgtgatcacattgggaccacctgtataatccaggacaatctccccatgccaaaattattgatttaatcacatctacaaagtcccttctacaacgtattcacagtttctggggatttgaatgtggatgtttctggggggtggcccactgataaccagtgttataagtttcttgaaaatccttccagagatattttatctataaataaataaatgcaagtccatagcctccccccacccactttttatacaagtggcatcattccatatcagtgctcagttccatcttcctctttttcttttctttttaaggctacacagaacctattatatggaaataccctaatttatttcacttttttcctgttggaagacttttaagctctttccaatgctttgctttataatcttttgtattataatgctgcaacctatataatcctataaccttgtttgtaggataactttctatttaaaatctcatttttcaggccaggcatggtggttcatacctgaaatcctagccctttgggaggctgagacagaaggatcacttcagcccaggtgttcatgaccagctctggcaacatatcaagaacctgtcttttcaaaaaacttaaaaattagtgaggcatggtggcatgtacctatttggtcccagctattcgggaggctgacgtgggaggatcacttgagcccaggaggtggtggctgcaatgaaccaggatcacacccctcactgcactgcagcctgggcaacagagtgagaaccaatctcaaactaaaataaaataatcttgtttttcagaatttgagggtgccatttaagacattttgacacttcacagaacttttttggggaacttgttgccttggagattagcctgtcctgtcccacccccatgatctgtacttcctgtttctccctcctggcttccttaattaagccttgtgtgtacttgcgagcccatgtccatcacgctctgccttcaattctggatgctgtgctgtgaatacgcttgagtggaggccgcatgctttccaggagggtgtgtattttcagtgttgtctctcatgatagtatgaaaggctctggagggaatcacaggcctccacaaacaggcaagcggaaaaatgttccacagacatgtttcagggacaacaggcttcccaatcctaggtcgtgctggtccataactggatcaggctgactctccctccccgacaccgctggtgtagacagggacaagaaagagaagtcagagacacaaagaagctgtgatttgcttgaggtcactaaagtacttaatggcagagttcagacctgacctgaggggcaacaaaagacacccccctcaaatccatggggagcagagtctatctgaatcagatcccagattttctggggctttcacgatgccaggtgtgtacactgagctaggatgggtttcccagggttctttgtggtcacacaactcaacaatacagaccagaaagcagtggcgagtaggctgaatttggctggtgggtgttttctgtttggtctgcacagtgtttaacttgttattataggaaattcaaacatgcagagagaattgtaccatcaacaacacacacccatcactctgctccaacaatgatcaattcaggcctatcttgcttcatcctataccctccctcgcttgcttcccttcccaccctcaaatatgtggaagcaaatccagagataccattccattgcaaatatttcattttgtatctctataatatgggaatttggggaatttcatttgagacaggatctcacttggttgcccaggctggagtgcagtggcgtgattgtggcctcaacctcccaggctcaagtgatcctcccacctcagcctcccaaatagctgggattaaaggtgtgtgccacatctggctaatttttttatttttttgtagagatgggggtcccactatgttgcccaggctggctggcctcaaactcctggtctcaagtgattgttttgcctcggcctcccaatgtcctgcaattatagatgtgagccactgtgcccagccaggaactttaacataatcctttttgacaaaaattttcctctaagaaattagaaaattttacagaaaaataaaaatccagacttctgtcttctcttaaaaatttggaagctctgccaatactgggcccagatggcaatcactgattagcactgagtagatgttgacttttcagatgaggggtgtgacgtctactttgccacagtccccaccactcccccacctggccatctcacccatacacatcacctgcctggctcctttaggcatttaatttgtgtaggaaattgacctaaaggagatattagagaagacattaaaaacttgaagaatgtgaaaatcagccaggagatagaactgtgctttaatgagggttatagaaccacactggatatgaggcattttgggaataaactttgaaaattggaagtaccagtttgtgaattttgctcagagagatgaaggtggggggtgggtgacagtggtgaagcatctcctatgtgccagtctcttttaccacaggctgtttctcacaaaatcatcaatcatatgcagtaggagaaacacctttgtattttacggatgagaaaactgaggcacagagaggtgaaataggcttcccgaggtcactcaggtcatatgagcagcagagctaggattcagacctggagttggcctgactctaaaacgatgcatgcctcaccatggcgcattgctcctttaaagagcaccagaagagagaatttgacaaagtggttgcccgtggggcctgggatgggtggggaaactatgctagggctctgggctgctgagggcctgagggaaggaatggggagcccgggcgcagaagtagaggagggggctgccccacggctacagaaggcatctgggaagacactttgctgaaggtggccaggagggcaaaggtcacagtggccattgttatatggtggtggtggggagagggggatggcttcttcttaaccttctcgggtgagtcgaaggtttaccctccagacccttgatgggtcccttatgtcccttggacatcctgagtccccagccagggccctgggcgctttgctgggagcttgacataaggtccagcagcccccattgctacctaattccttagcagcccagggtgtctgcctgctacttccctgcctggaaggaaggccttctgcctggtgcgttcctgctgcagcctccactgcctcttagactctcacacaagctcagctccctgtcgcgtcctctcagggccaggcttctccttatcacaagcttagactgtctgagtaactaattggatttgtgtttgcctccacacaggaccctaagacccgtggggctgcgactccctctgtactggtcacagccgcaccctagccccttgcatggcgctgtcaaacccaggctggccactgactagcgctggaggggagcaaacgggaggccggccacctgactgatggtcccacaccttctccctgcaggctgtccccttttctgggactattcaaggaggtctccaggacggacttcagatcactgtcaatgggaccgttctcagctccagtggaaccaggtgtgtgtgtatatggatggaaacgtttcactccagcctcgtcccttagtaaaccactgtgcctgtgagcctgggttagttcaaacagcaacatccaagctcacgtgcctggctcaggggaggcccaatgcgtccctaacccatgccacagggcagcactccacaggcacaacctgcacccaggggtgccattaacctggactccaggatgaatggggccctgggagctgacggtctaaggagggcgtgggatggtcagagttggatgattatgttctgggttgaaccttgcacactgtgactaagagttgcaaaaatcaaacttcctctatttcccgtaactgctctcatccactctgaagctctccttctgctgatgtgaaaatattgaaaattgacattcaaagtaatttggtctctttcagtttcaaggccttttctggaaactactaagtcaattcaacatactaacattgtatcagggctgtttcccaccccctcctccctcccaaggtgggctgtctgggaacagagaagagctcacatggcttctcagtggctgggagggctctagaccctcacgcaggcctggctgacccctgccgaggcaccctgattgggtgacacagaggtgtgcagctctctcctggttgggtgggagaccacagggtggcttgctgaagtctgcggggcccacagaagagcctctggactcatggttctcccacagaagcctctctgcctcagtcccaggggtcctctccttaagaccttctgggccttgcagatcccaactcaacatcagttcggccactagattcttgctgacctcccccaggagatgccaagggcagggcggccctgatccccctgaaccctccaaccaggggaatcaggaccacacccctgatcttcctccccttcctctcttcctctcccttggcctcccctacctcccagcaccaggaaggcttccgactcccatcctgtcgaatagagacagatcctacctcagagggccctctcctctcgggagctttctgtctctcccttccttggggcaggaatttccaaaggactacagggatgaagctgaagggctccaaaagaaaaaaatacattcagaggtatttcaaatgtamtcatctccatttattcatttattcatttaattaattattttttttcttttgagacagggacttttttctttgacccaggctggagtgcagtggtacgatcatagctcactgcagcctccaattcctrggctcgagcaatcctcccatctcagcctctggagcagttgggactacaggagtgcactgtgatgccmagctaattaatttttttttaaagtagagatgagatctcgctgttgctcaggctggtcttcaactyctgggctcaagtgacccacctgccttggcgtcccaaggtgctgtgattacaggcgtgagccactgygcccggccccaatttcacatgctctttacatttgttctcttctttcccacttaatcaggcttgtgctagcctccaacaagtgtccactggcatggaaggctctctcttctaggtgtgcttaacaacttccatctttggtaacaattggtaatcactttccaagacctatgcttcttgtttgctaatatcagcacttttccttaagcattttctacttatttttagaaaatcatactgtaaaggcaaaatccaataattgcacaaaaacacattagrtccaaattagagaaacaaaaagatgccaaccaagcagtctctgcgacgcaagttgtatgcaagatcccagacaaatgcraggcagaggcaccgaagccctcctgtgcctgtcactggcaataacccatgccacagaagactatttgctttccctgggcctaggtttgctgtgcgctttcagaccggcttcagtggaaatggcattgccttccacttcaaccttctgtttgaagagggagggtacatggtgtacaacacgaggcagaaaggaagatgggggcctgaggaaaggaagatgcacattccctccagcaggggatgccctttgacctctgcttcctgctacagagctcagatttcaaggtgagcaggaaacccctccccacctctcacccccgggtcycccagctctatcaggcgaatgggctttaagtaatcaccttgattgacattcagccagagtgatgctactatacagataacacaatcatttccttgtaaggtgttaytcatggctgcctagtcatcttatrcacctttatctgaatctacaggtgcacctgctgcttcttttactctgaaaataagaactagaggagtcatcacgttgctgtttggtggtgtgtgtctttgaattccaagctcatgccattcctctgctatcaccacacctcctctccaggtgtctggtaacatttattattcagcgacattgttccagccttcatccagggtctattaagggtatagttttgtaagcaaattgcaaattacctttgcaagcagagtaggtctctgggcttgagaagcctgtgggtaagtcagtccgagtatgcttatctgagataaggatgtccccatccactcagtatgcaacstgaggtcacctctcctctgctccccatgagcattttatgcatatataaataatacccctgcagccataaaaaggaacgagatcatgtcctttgcaggaacatggatggagctggaagcctttatcctcaacaaacacaggagcagaaaaccaaacaccacatgttctcacttataagtaggagctgaacgatgagaacacatggacacaaggggggaaacaacacacccttgggcctggtgggggagggagagcatcacgaagattagctaacagatgctgggcttgataccaaggtgatgggttgatctctgcagcaaaccaccatggcacccgtttacctcgttaacaaacctgcacatcctgtactcataccctggaacttaaaatcaaagttgaaggggatgggcacagtgggtcatgcctataatcccagcactttgggaggctgaggagggcagatgacttcaggtcaggagttcaagaccagcctggccaacatggtgaaaccccatctctactaaaaatacaaaaattagctgagtgtggtggtgggcacctgtaatcccagctactcaggaggctgaggcataagaatcacttgaaccactgcactccagcctgggcgacagactgacattccatctcaaaaaaaaattgttcaaggaaaaataaataataaataaatgaaaccccaggtgagctaagactagaaagacaaacctactgcaggaaacaaccagaagaatgaaaagtcyaactggagccccgtagagactcgggttgatgcacttcrggtcacacacacgttcctgtaactggccccacactgaagaccagactcaggtcttcattttctagaaagagggtccaggagctcaggggtggtccccatcccagcctgggatgcctcccccggaacacgtgctctcctctggcaggtgatggtgaacgggatcctcttcgtgcagtacttccaccgcgtgcccttccaccgtgtggacaccatctccgtcaatggctctgtgcagctgtcctacatcagcttccaggtcagactgtscacctggcaccggtcccaggggctgggatgcagggcccagcrtagctgtgtctaggcccwgctgggtgggcccaagccaatctcctacccaggtcactctggggacaacctctgcttccctgtcccagtacctgcccgccccttctcctctgtcactctgcccctccttctgtgttactgtccctgtccggaacacctgccttggtctcccagactcctcagctgcccctttctcctcaccccttgatttccaccctggttaggaggccatattgttctagaaagaacacaggctaaggaaccaaactgaatccagttcaaattccaagctctgccattcatcctctgtgggatcttagacaagcaacttcacctctctcagcctwggtttcttcatctgtagaatggtcattgcctgccccccatgggtggttgtgtggttcagtgaggagacagatatcagaggtcacacagtggcccccctgggcccacaccagggtctgtttgacctctgtgttttaacaactttgaatgtgttgccaacatctaaaaggtcaggagagtcaggtatggtggtggaggtctgcagtcctggctactcaagaggctgaggcgggagaattgcttgagcccaggaattagagttctgcctgggcaacatagcaagaccctgtctccaaaaaactttgtttaaataataaaataaaataaaacaaataaaactaaagaaggtcaggagataccaataccacgtgaaaaatgggaagattagggtatgctgggcccacattcccacagggcaccagcagctgggtgggagctactattacccttttggcattcgaggctgctccctgagatcagcgaagcacacagtaggccctcagcaaatctgggcttctcgccctttggtcctcatctctgactttggtccctctttccctgactccctcccctgtgggtgaatggggagggaagagctggagggagaccgcacccctgcactgctcaccagagcctggctctttcccatcccatcttggcatggccctaacccccttgcctcatccccctgcctgcctggtctctccctcttgcccttgcctctgcctttcggcttctccttggctctattaatgcttctcctcactgcccggtgccttttgttttaacagaaccccygcacagtccctgttcagcctgccttctccacggtgccattctcccagtctgtctgtttcccacccaggcccagggggygcagacaaaaagtgagttcaacacagaggccctgggtggccgagcagacagtaggaaggaccragggtctgagaggctggccccagccagcaggccactcagggcctacaggccccatcttgcccactcaagagttccctgtctgtctgccgggcacccagagctggggacctgggggtctccctgaattcttcattcycccttctttacgtctctccaaggcaccaagaggcccgaagccaccgacatggcccaggcctccgggattcctcaccatgacgacaggggtccagttccccaccccccacacccaaccactgtcacagtggttcttataagcacttaagttcttataagtgcttcttataagcaaatctgatcacaccctctccctgcttaaaaatcttcacagcccccagcccttcaaataaagcccaaattccccagcagggcatacaaattcctcccagtctgaccccaatcaacctcgctgcctcaccccyaaaccacaaagctcacgcagcctctgcagctcactcaaggccctctcgggccaccatgtttttgcatatgctgtccctggtcccggaagcatcctctgccagcctgcccccagcacacgcctaattgcccttccatgctctgcctaaatgtcgctcctctgggagtcctccccgcctggaatattgttggacgctcccccatgaccccacrgagtctgtacgtatctgtgccatgccagttcaaagcacyccattgtaactgtgtttgcgttgtctgtccccgtcactccacccccatctccctatgcccatgaggcttcagagggccgggactgtgccttgttcatttgcactcagtgaatgaatgtggaatgtggttcacacagccagggagaatgggataccagccagggcaagaacagtctactgggtggggcaggatccaggacaaggaggtgagcagcccttcctctggccactccagtagtggggactgggaggaggggcgctttgtctatgcagtcttcttacggctcatcacggtacagacagggcacctgcctcctgccacgctgacttcaggactggtcgagccccagggaacatttgcagcgcagcccaaatttggccctggccctggggaggatagaaagtgtgctggatacagtcagacagaactggctgccactttggatttgatgccttccacctgggcgagcttgggcaagttgcttaatctttctaagcctcattacctcaccagggacacaggagctgaggctgcttccctcattggaaagcactgaaacccaggaatcagcccacagtaggccttcaacaaataccacttctcaccttagtggtaaaatatggcactggaagtaatgctcttggctgtgggagctacagagagcaatgaggtctctatcaaacccagcctcctctctctcaagaggaaccaatggggataccctaccccccaaccccaaagccctgtgcacctgggggtaaaaatctgggtgccacgggctcaggaaggcttgcttgggagcaagagggaggtgggtgtgtccggggaggcatttctgagcacaagagcctccctggagttttgccaccatctcctcccattctgtggtgcccgcgataaccaccattctgactctcctcacccctccagcctcccggcgtgtggcctgccaacccggctcccattgtaagtctcttgctttctttttggatcgtcctcattttggcttttctgggctcatggaggaggcagggccaggcattgggcctctcccattgggagtrgggagggcacaggccaggcccttgaccatctgcccggcctggtgaggttgggggttggatgtggttggctggccgtgatgaaacaayctgagttgccaccccgtgggcagccacggaagaccatgccccacattcacttctgtcacctgcaaagggaggctaggctgagagacgtttccccgagaggaaagatgggccagagccaccagcgtccccatctgtcttctccagggttctaacctttgcccctcgctcatccccttgagagaagagacacctgggcccaccctctgtggggtctgtggggccattgggcttgttacgccccctggagggtgcctgccgtgtggcgccctctggtgggagctggtggttttcacacgtgagagcctgggtgagacctggtttctttcttccagacccagacagtcatccacacagtgcagagcgcccctggacagatgttctctgtaagtctacaagttctggtcagttcacagctgcacagtgtcctccttcaccaagaactaaattccctagagcgctagagttgggaagaaagcggtttagcaaggaggatggggacactaggggctgagtgcttggctcaggtgacatgtggctaaagctgtccttgggacagcagagattctggaagaagcaggatttatccagtggtggaagaggcaagccccctagagaccgggagggaaactggtctgtctgtcaccaagtggggagtgcagtggccccagcacccggatgtgaggttcctggccctgcatcctgggtccccaggatgtcactaccgatcataggcttaagctcttctcctgctggtgcaaatcaggccggaagtttagcgttagtggggctgcctgcagaggggttgagggrcaggtgaccgtggtggagtccgggaacacggcaggaagttccaggaaggctaacatgaaaagggaggtggatgggggagtccaagggccaaaggctcatgaggtcagcctcacagtggagcccctctagaatgcatgggtgcgcgtgggtgagtgctcgcgcacacatgcgctctcccattgaatttcctggtttcttttcagcagactcccgccaacccacctatgatgtacccccaccccacctatgtaagtgrtttctcagggagggcggaggttctgtttgtggtgggcaggctgggggtgaagggccacttcgggggtatccactagccttgcaaaatgaaaagcgaagggctttcaaaatggtaagctgaagggcttcaaagcttcccagcgaattagaagactgtggagaggagctttcaaccttaaaactgtcgtgtcaatacgagcgcattgcatggctctcccttttcaccccacgagatgagtctttttgtgtttggccaaagttcctttcatgacactaatctaagcccattaatatgaggagcactggaaagttttcctttggcttttatggaaccaagtacagatatcgttggtttcttcttagctgacagcccaaattcatgggacctggtacaatcttcccttttgtgtggtgggctgccctggctgccactggctgacccatgcctctccttctgaaagccgacgccttttgtcaccatcattccgggagggctgtacccatccaagtccatcatcctgttgggcactgtcctgcccagtgctcagaggtaagctaagggctccagttgacctctgggaagagagagcccttcaaggtgattccagccattcccctggctttgggcaggctgtggatgacggggaggaaataaggcccagaactcagtggacaaaggtccaggtgggctgcccaccccaggttccacatcaacccgcactctgggaaccacatcgccttccacctcaatccccgttttgatgagaacgctgtggtccacaacacccagatcaacaactcttgggggtctgatgagaggggcacagctggggagaggtggggagtgggcagtgaagatgaagccccatgctcagtcccctcccatcccccacgcagctccaccccagtctcaagccaccagctgtccactcctggtgggaggtgacgtcctcagtccctcccctctgacctttaacctaactctcaccttgcaccctgcatcaacccttcaccccctcctggaaagccagcctgatggcatcccactggcctccaccaactgaccagagtgttctcttcaggggactggctcctttcccagtgtccttaaaataaagaaatgaaaatgcttgttggcacattcatgtgggttgaccgtggcttctttaattcatttggagacattttggagtctgtggaatcgggcggcggtgctgctgagaggagtgggatgggaaagcatggactccctttgggcagggggtcctgacctcacacctcctcccagagggtccctcacaaatcccacgagggtgttggagaaagcaggctggggctctagccttttgggcaggagtctcggacacaggaaggtggtaatggggtacmccaggaaacagccccatgcctccgagatgggagaggggctggggcagagcctgtgagggccacagcagggtcagagctgcctcctcagacctggcgtcccagtgggaggaggtggcttggggaggggggtcaggagaagccaacccgaagcaccgtctgggtgtgtgttccattgtgggtctctccggcattaggggttagggcttgcataggaaaagtggctcagtgttcatgtgtkgggttctgccagccactgggccactgccaggaagcccgactctgcatccaggtgatgccaacacatcctgctcagcccagtaagaatccagttcctcaggccccatagtagtcctcagagcagtggcaccagctgcatccgggagtttgttggaaacgcagcatcccgcgccccacccgacctgcgaggtcagagtctctgttttcacaggaccccagacgaggtgcgcacattaaagctggaaagccctggtccgggagcggactcctggccttgttgctgagatgcacggctgtcgcgcagggcatggagctttcctggagcctgaggttggcactgccccttctcctgcccctgagatgctactgctagaaggggaaggtggcgggcaagggggtgaagtcggccagggcacccaggaggcagaggccaaacctaagctgggagccgtgtgttgccaggaccccagtggccgccgctgagctccttttttggttctgaccaggagaaggaaacggggcccactctcctaagaaggcttccttggcctgctccaaacccaagagggtccccagtccctcaggcgaggatgctgtggcccacactcgcctcgacacgctgccttcccagggaccacatccgtactggccaaggcacagtctcgcatgagactggtggccccagagcaaaacgctttctaagacagtgtccaagaagaagctcaaggccttcctcgaaacactggccttatgcgacaatcccaccctcaccagaccccgtttcagatactttgtgtgggaggcaggcctgcgccccctgccctaccacaggtctttggaccagcacgaagctccatctgctgctggcacacctggcagccatttcagaggagccatggactggctggggtgtccctctgtcggggatctgtccaggctgtgacacccaccagctccccactctgagaagagctttccctacaaaacacccacacacgcatacagtgtgattaaagtaaaatgcaattcatgtaaatatctccatcaaggaatcatacagggaagacccaagtggccatggggaacagactgggtgttagttttttaaatacagaggcataaataactgtacacaaggcagttaaatacacagtggtgcgatagcacctcctggtggtcacttgaagtggtgcactcagcagcaagttccatctttcacccacttgccaggcctggcatttaagattttgtctccaagggaccagggaggccccagtttgagagaggaggctccgatcaatccagggtgctacttgttaggaggtcaagtaaagggcttgatggggagcaacgttgaggaaataagacttgaggctgggggatatcactttcctccatctccccaggccctgtgacctcagataatgcagagctggctccatccttaagttctgtgccggcagctttaacccctcctgtaggccctcagagcgctgacatctccaggctgctgggctgcaccgccaccctgtccttcttcgcctcgtaaggaaatacagcaccaaagatatcttcgtgatagcgcttctggctcttttaggtaaaaacagagagcaacgtgtcaagtccaggctgggatgagcccctggggttgcccagcttccctatcacatggaccttcatgagccatctgtcttcccaactgttatacttagattgtgcttgaatctggtttagaccctaaccctgctcagcacctgctctggtgcgggccctctaaccatctccaaagctttacttagcatacccatttcctgcccagcgttcatcccccacccaagatactccaggaagtgtgagctctgagataaatatgtttgggaaatgctacgtcctttctttccttccagccttgaagggtcctgatgaacagcagcatactgaaggctcccagaagtcttgtagtaaagcaacgtgtttgccttgccttaactaagcatgtcccaggctattcgaccttggaatctttttgatgccaactgtctaccgacccactgaacacatttggggaaatgcctgttatctcctcactgttcttcaaacacgccagcttaactcccacccccggggcctttgtacctgctgcccctccagaacagcccagagtgtttccttcagtatccacagggctcctcctcaccatctcaggtttattctcagatgccaccttccagctctgccttccctggccaccctatttaaaattacactccccagcgttccctgggctgtttcctgctgtttttctctgaagcactacacctctttcttgtctgggtttgtcagccccagtagaatgtaaagaatttttgcctgattcatttactgctctatccctagcacatagtaggtgctcaataaatgttcagttgaacgtatgaatgtgtcttagggagagtatggaagtgacaatcacaggctttggaaccagagagaggcagactgaactctaggctctcacatttactgctgtggtccccgtaggcccccttccctctgtaaaagggggtgcctccctcataaagtcctcggcaggactgaatgaaatgtcacatgagaatccttggcaagcagtatgcccagtgtaagcccttgataaatatcactattatcttcatcaataaaatgcaagcccttcctgctggggggatgagggtgagcagacaccagcctgggtgtaaataagaagtgtgaggttcacacgaggctgacggggggcagccttgctctcccctgtgttcacagccttgctttggccacacagatactttctgaaaggggggtttggggagaggccagggagactctcctgcccccattctacagatggaaaaatggaacacattcacccgacttctcaaagctgccaactggtccaggatgtgcagtagggccatctgacagcccacccagctcagatctcagccactgctaagattctcttggggtccagaacctttctgggcctgattcccctgggtctacctgccacccctggtcctggctccaacggcctgtgcccttggccggcaccttcagcccacacacccactactataccttgagctgaaagaaatagtcctcgacctgctcctcattcaatttcagcttggcagccaccagctgcttcagggtgtgggccacgtcccgggccatgcgcacatccccgcaaacatagaggtggcctggctccttgtggagcacacggagcacctcgctggccagctgctgccgcaggatgtcctgaacatagacctgaaaccagaggaaacagtgggttcagtcctcagctgctcaggacaaggcttgcaggcaggcctgctggcctcaaggaggcggggagaggggcactaaggggtgaggagtgagtccccttccagccaggaccttgcaaggggccaggctcaggatgaggtgcatggatgcccctggggctcggctgggattagagagataaatgctggacacagtcctgccctcgaggggctgaccatccagtggggatcccagactgtctctgaatttgccatgcttcaaaaaggcatcaatgaaggcagtccccctgcccagggctctgcctacaccccagaaaagggagcctctcaatgcagtctacccattaggtctctgcagggtatggatcccgggctccccagatacaaggtccaggagtcagtcagggactctctgctcctgctccacacaggatgcccagtggccccagcactgggcacagagcactgggcccaagaggtgccctgatgggacaaatgtgtgaaggccgagagtctattctgacaccccaggctcagggggtaacgcggccctggggacagaagagcccctctgatggccgtggtggaagcatcggccgccctccagccttgcaaggcttgagcgtagccagcctggaccacctctccccgggcagtcgcgtgtcccagggggcctgctggggaccttcagcaggctgggctctggggttaacccgcgtgtgacctaggttagtcctgaacctctccaggtctgtcgcttctgctgtatgagagggtgtaatgctcttcacagcatcactctgatggttgtgaattaccagcattttcgagctcaggaggtgaaggctcggggaggcgaggggcctgtggggacccagggctcacagtggagcttgtgtgtgtaatgcttcacctgctttgaggctgcatttaccttgggcttgccaggcaggcgggaataggctgtgtgcaccgcatgcagcacccccttctgggccatctccagcatctcctcctggtagatgtggtcctcatctgggcggcggcacccaaacaccaaggtcatgcggcctccccgcactcctgcaggagtcccgggctgttgttaccatgttggccaccagagggcgccagggctccaagcccaactggaattctcacttcactcccactagctatttaatagcattatccccactttacagatgaggaaactgaggcccagcgcattcagatcactcatccatagtcacagaactgaaagtgcggatgcagaattccctcagccaatcggagatcaaaagcagggactttcctgttacctccactcccaggagagggagccctggctactatgcgggagacggaaaggcagccattctaacccgcagaggcccgcacagggaagcaaacttgggaggccttccctcgagagaggtcaggaaccgtttgtggggctgcagttctgctcctaggcaggcgctggccccctggtgcccctcccacctgggaagcctccagccttacccttgtgctgggagtcatggagccgttgctgccagaaactgcggaagggcgcgatgcctgtgccaggcccgatgaggatgcaaggatgggagggatcctcggggaggtggaagccgctggcactgaagaggacaggagaagagggggccagtcctcagacaccccaggcccacgcacacacaggatggctggggagctgggcctgtgggaggcggtcgtgagggggtggagaggacaagaagctcctatttgatttcccacgtcctgcaggctgcttcacttctgtccaggcaccagcacctcccccaggtccttctgaaaaagggccaagctcactggactcttgagacccacctgtcatcgctgtccctgctacaggcagccacaccagtgtgaccccagtgccttctttatgggccaaggggctccgagcgtctcctaaaccccagatccctccctttcctcccggaactcccaggggtcggcggccccacaggggacagagtggaaggggtgcttacttccgcacaaagcagggcactgggtcttggggcttcaggctgttgagccatgtgctgcagacgccgtggtgcaggggaccctggccatctgcaacgataccacaaagtgaccaacgtccccccactgcccatgcgcaaactgtaccagctgctccgcccacaccacggcctccttggacgcccccactcaggcactctcaggactcaatgagcagctgtttgtcctcctggttctgagatccaccctctgtaagcgcggagctgaggaacgttgaaagggacttagagaggctgcaagttgctccttctgcccaagcagaaactgagacggggagaggaaaagtgacttgaaaaaggtcactcaggtcgtggtggaatcaggtggacagctcagcttccctgactcctactccagtgctccttccaaagactttctccgggaacactcccagctcaccactgagctccactgacagcagcatgaagtggcccctcagggtggctactgctgtgcgtgctcatgagcgtggcccttgctggtagcaaccctgggtggtggatgagctccgcgcatttcagcctgctctggcaccttgctttcctcctcagtgggccctcctgggcttgtagaaacccaggaggtctctctgggttgtgttccctttacaatggcccagcacttgaagaaggcctccaaccaactgcagaggtccccctggtt

SEQ ID NO: 96232 - DNA, 37891 bp, Homo sapiens
ataaaagctccaaatcagagaaaaagataagaggcctcctttaccataagaagactgtttttcatctaatatgaggaatagactgaggacctgaaatgggtttttttggagttaagtttaaaggttagtgaaaaattgttttaaggtgatgacataattccgtgaaacaactgtggaagcttataaaattgtacccgctggtctacataaattagctcttgggcagtttctaaggtatgctgttatttcaaacaaagggcagaatatcacagagtgtgtgctactgaactgtgtaaaagagaaaggctataggccaggcacagtagctcacgcctgtcatcccagcactttgggaggccgaggtgggtggatcacttgaggtcaggagttcaagaccagcctggctaacatggcaaaaccctgtctctactaaaaatacaaaaattagccaggtgcggtggcacgcgcctgtattcccagctactctggaggctgaggcaggagaatcgcttgaacccgggaggtagaggctgcagtgacccgagattgtgctactgcactccagcctggacaagagtgaaactccatctcaaaaaacaaaaacaaaagaaagactataaatgtatccacatatcttgtatatgtacagaacatctcagttggaagacaaaaaactggtaatgctgttgcctcaggagggacagacgctggagggagattttttaatatgcatgcttttgcaggcagaacaattggaatacgttaccccttcacaatatatttttaaaaattaaatacttttttaaaaagtctgttatttaatgaaatcaataacagtcactggggcttccacagtttagagtaactctaatgaaagggttcctaggccgggcgtggtggctgctgcccataatcccagcattttgggaggccgaagcgggtggatcgcctgaggtcaggagttcgagaccagcctggccagcatggtgaaacctcatctctactaaaaatacaaaaattagccaggtatggtggtgcacacctgtaatcccagctagtggggaggctgaggcaggagaatcacttgaacccaggaagcggaggttgcagtgagatcatgcactctagcctgggcaacagagtaacactctgtctcaaaaaaaaaaaaaagaaagaaaaagaaagaaaaagaaaaagaaaagaaagggttcttaatctggggtccacaaaacccaggagtccaagagcagaactcaagtggtctatgaaatttgacaggaaagaaattacgactttattcttgtaaacttctaattggaactgagcctttccttccattataaatattaaagatataaaaaattataaattttctatatctttaatatttataatggaagaaaataaattacacattataattatgtaattataattatttacattatatttccttccactatgaatatattttttaaaaaaggactagcaggacctctgcgtggattgcttgagttgagaccagctcagaccagcctgggcaacagaaatggttttctttgactttcccttcctttgcacagaaatcttcttcaacccatggggtcccctttcgttttctggaatcagtactctctgtcccgcaccacacgcctctaagtctccactactctctacagccttggccgccacatgttggcaccacaactcaaactcaattttggaatcaaaaaactcagtaggccggcgctgtggctcacgcctgtactcccagcactttggaaggctgagacaggcggatcacgaggtcaggagttcaagaccagcctggcccgcatggtgaaaccccatctctactaaaaatgcaaaaaattagccaggcatggtggtgccagcctgtaatcccaactactcaggaggctgaggcaggagaatcacttgatcccaggaggcagaggttgcagtgagctgagactgcaccactggactccagcctgggcgacagagcgagactccgtcttaaaaaaaaaaaaaacaaaacaaaaacaaacaaaaaagaaactcagcaatttccaaacagagtttctcagggccagttggggagcaggaagtaagcaatgcttcaaccaaacagttcacacagaaagcaggttagggacttagccaccaaaatcctgagggcaaaggagaaaactattacgatccctcctgagtgctcaactgcctaggtacttgacattctcaattatactgactctccacaacaactctgttacagaaactaaggcacagaggggttttcaaaggaacttaacctgcatctatagtacgttccaccccaggtcggcctgctccacagctcacctcttaaccaccagactgagttgcaagggaaggagaaatacataagcgtttactgggaagcctactctatgcctgacaggctgatcacattctcaaataccctcaatcctcaagtcagccctccaagacaggtgagatcatccccactttatagatgaaggtactgaggacagaggaacatagctggggttcaggcaaggcttcaaaacccggtgtggctggctccaaagcccacgttcctttctccttaccacggtactcaaggctggcttctcaactctgtgtactgctgagttggggggaacaaactggttgatgcctctggaggaccacctggcgtctctatcggaacggcaaccccacttctgtgtatttggcccacagagaccctcacaggtggaccaagtgaggcacaaagttacctgctgcagcactaactgtaatgagagaagactggaaactggtggaatgtctacccttagggaactggttccctcattactggaataccatatggtagaatattgttcagggttaaaattaaatgaatgatggataaaaggtataggagttttttggggggatgataaaaatatcctaaaatcgattatggtaataactgcacaactcagcgcatacactgaaaaccactgacttgtacactttaaatgggcactttaaatacactgaaatacactttaaatacactgaaaaccactgacttgtacattttaaatgggcaaaattgtacactttaaatgggcaaactgtataattgtgaattatatctcaataaagcggttaccaaaatgaagagataatgacaggaaaaatatcaagtaaggatgaaacagtactcagtaataaaaagaaacgaagcactgatacaagcaacaacttgggtggacctccagggcattgtgcagagtagaaaaaaggtaacatcctaataatatatgattccatttacataacaatctccgaatgacaaaactagagatggtgaacacattagcggttgccaggggcctggggaggagttcttatgtggagagggaactgttctatatcacaattacgatgggggttacacaaatctatacaaggaatcaagctgcacgggcacacagatgcacaatcacactcacaccacacaaactggtgaaaactgaacaaggtctgtaatctagttaacagaactgtattgatgtcaatttcctggtttcgatattgggactacataagatgtcaccattaggggaagatggatatactcttttcacaacttccttgaatctataattatttcaaaataaaaagtaaaaacaagaggtaagctccatccctttatcaagcatacattaggccagacgtctccccattcagatgattctccatcttttacgagccctttacctagacctggaccttaccactgacctctccctgacaccacccatctccctccagtagggcccactccttccaggtgatgctgctgcccgcgatttaccttcttctagccccgccccctcagcacttccaggtggcccccgccccctcagcacttccggttcccagccagccccacccttggcacctcccccttccaggtggccccgcccacacgcaatcttttccccggccccgccccttagctcccttcagcccctccccctcccagatagccccgccccctcggggggccttccgatttccagctggccccgcccacacagttttccccccccccggccccgcccctcagttccatttggcctctcccccttccaggtgaactcgcacctcaaggcctcttctcagaggacctgtccaactgtctctgtctctcgtctaccctctacctggcccccctccctctgggagacacctctctgcactctccggcggcccgcagcccgcgctcttccgtctccaccgcgctctcggcagcctcagcgtccccacgcccactcctctgcagacaccccgacatggcgaagcataggccccaagcattcggcgcacccgccgccctccgcctcccatctgcttgcggacggccccacttgccttgcgttggtcccgcgcgccgctgcccgggcaacacactcagatccgccaggcgcgcctctgcagtcccaagttcgcgccacggcattcgcgcgcagacgtctgcgggcgggggcggggcagagcctaggggcgggacctgggcaccgtccgcaccgccgccgtcgcgcggaggacactgggagtcgtagtctcccgaatgggaggagggcgggaaaaggggtgaagtggggcgagccctcccgcagagcacactgggaaaatgcccgcgctttccctcgccctggatgagcgggtgtggctgagggtctgaggagtgactggcagggaaagaggaggaatcggtggaagcgcccccgcgaggcacggcgggaagagaggcgggagaccgcgcggggcatcccgggagcaagggccgggccaggcctgggcgcggggcattgtgggaggtggacgccgctccggggcgggtaggtgagtggggaggggcgggaagggtgcacatcttggggaggggagaggcacagctaggtgggacggcggggctggaaggtgccgcagcgggcggggagggggggagtaggagggtcgggagcgggctggatggggctgctcgaggggagacgcgcagctggacgtggggggagcatctggggtgaaggagcccatccgaggacgaggggccatgtctagaacgaagatgcatattgcgggggatggtggatgtaactgggaggaggggcccacagctggactgggggccgcatctgaggaggaggggaccacaggtgaatactggtgacacttccgaggagaactagccacaagtggggcacacacctgtaggcgaagcgtggataactgcatgtggggagtacatctggagatgagagtgtctcagggaagccccagctacagctgcatgtggcgagccatagggtcataatcgggggaaggggcaacagctgcacgccagaggcacatctggggagtgcggagccacaggtgcatgaagcatgtgaccgggtgaggggtccgtggcctggatgtgggagcacatctggagatggagcgtctttggaggggttacagccaactgttggcacatggaaggaggagttccagatgaatacgagagttagaagttactcttgggtgagagacacagctggaaggggaggaggttttagctggaatttgagaacacatttgaggagatgtccttaagggacatctgagcttaagggtcgtattttgggaggagagattccaactgtacctaagggtcacatctgcggaggaggagacgagttggaattaggaatcaagatgacaggctccaagtgaaccagggataaggcggtgggaggaggccaaagataggatggaggttgatatttatatatttggagaaaaacaggcacgtccgaccccgggctacccacctcgatagaggcaccagcaaccgacggggcaggccaagaatggagtagatgagataccccgggtgggaatgggtctgatatccacctgttctcccctcctccacgcaggcccccaggatggagcggccggagcccccacccggcacggctgcggggcaggaggagcaggagctgcgggagcgggccttcttctcgtgggccgagttcagccgcttcttcgacgcgtggtgccagcagcggctggcgctcttcttcgtcaagagctccatgcacctggcgcgctgccgctgggccagtgcgcccccgctctacacgctcatcgacgtgctcaagtacagctacgtgcggcttgtgtgcaaggacgtgcgtgcgcccagccggcccgccgtggggtgcgtgaacctgagccgctgtcctgctggggggaaggggagcaccgggggtgggtgtgggtgggagacgggcagagaacaccccacccagagatgcagagggggagaggccaactgaggcagccaaatacaccttgcagagaggcgggagtcaaggagggacatgtactgagagaagaagaggagctagagagacaaagatactcacggagcaagagatggtgtgggcccgacttacagacttttttttttttttcgagatggagtctcgctctgtcgcccaggcttgagtgcagtggtgccatctgcagcctccacctcctaggttcaagtgattctcccgcctcagcctcccgagtagctaggactacaggcacctgccatcatgcccggctaatttttgtgtggttttttgtttttgtttttgttttgttttgctttgtgttgtttttttgagacagagtcttgctctgtcactcaggctggagtgcaatggcacaatctcggctcactgcaacctccacctcccgagttcaagcgttgtttctcctgcctcaacctcctgagtagctgggattacaggcacgcgccaccacgcctggccaatttttggatttttgtagagatggggtttcaccatgttggccaggctggtctcaaactcatgacctcaggtgatctgcccgtcttgcctcccaaagtgctgggattacagccgcgagccactgtgcccggcctgacttacagaatgtaatagagacttcgagaggcagagcgtaaaacacacacaccccaagaggagaaaatagtcacggaaaattccagaaacatggagacatggaggcagagacaccagagacagccagggaaacagaagagccaggttttgtacacgtgacaaagactgggagacagagactrggagactgaactgcagagaagccgcaggataaagaaaaggatccatctattcagtgaataaggggccaggtcccatgctgtgggctggggatattctagttggagcgatggagttgggcaagagacaaaaatccctgcccttctggtactttctgactggacagaaagattgacgttaaaagaacaagctcacaggtagttccctacaactgtgcaaagaggggcaggtgagaaatccaggagagccagaatcacacccaggtggccaggggtattttaatggaccccaattgtattttatttagtctttatttttttgagacagggtcttactctgttgcccaggctggagagcagtagtgcgatcttggctccctgcaacctccaactcctgggttcaagagattcccccacctcagcctcccaagtagctgggactacaggtgtgtgccactatgcccacctaatttttgtatttgtagtagagatggggtgtcaccatgttggccaggctggtctcgaactcctgacctcaaggaggctgaggtgatctgcccacctyggcctcccagaatgctgggattacaggcatgagccaccacacccagccaaattgaccccaattttattttactttattttattttattttatttgagacggagtcttgctctgccatccacactggagtgcagtggcacaatctccactcactgcaacctcagcctcctgggctcaagcaattctcctgccttagcctccccagtagctgggattacaggcatgcgccaccatgcccagctaatttttgtatttttagggtttcaccatgttggccaggctggtcttgaactcccgacctcaggtgatctgcctgccttggcctcccaaagtgctgggattacaggtgtgagccacggtgcctggtctgaccccagttttaaacaggggttgttccccacacagttaggtttccagcttccactggaacaccggaagaggtgagcccatgtttccattggcagacggccacccctcttggatggggctttgctgcccaggtttgccccaaaccctgccactctctgctgcctcatccctagcactgtcttttgcttgttttgcctgcctggtcccagtaggtgtgtgagtttgagacccttggttggggagctgtagacaagaacagagtgcttaagaacacaggctctgcctttaggctgcctgagacatgctccacgacttcctggatgggtgactttgggcaatggacttcacatctccaagcctcagttttctcatcctttgaaatggggttatcacgatacccgcctcatggggccattgtgaggatactgtgagatcatacatgagaaaaacacataaccctggtgcctggaacatggggtggctggttaagtgatagctgttacaggattcgagagcatggactctgggccattgygctgctgatgcttggtggatgctgttgagtgagtgacttcacctttctgtggcctcagtttcctcatgtggaaaatgggagacataatagtgtctatctcataggtaaattattcagaaaggcatccagcacagagtaagcacactcttaacagctctttcaccggtagttatttaaacatgtattgtgaaatacattcttgcaacttctttctcactacttattctagaaacagagactcggagatctgaaagtggaacagcatcaaacacayacatcacccagaaacctagaacgttagagcttgcaagaagctcaaagaagctcaggcctaatctgaaacctattaacagaacccagttccaatgtaacaaatgcttattgagcacctactatgtgcatgcccttcactggacgtttagaatccragactgatctcggctcttgaacagttcagaacttaatggggtagacaaagaccaaaaaacaaaaaaaaattatagatagtggcccatagtagtgagagtgagattgagggggagatgagaggaggatacaaagggagtggtcagctccacctgaaagcttactgggtggttctggaaggcttcctggaagaggtaaccagtaagcagaaccttgaagaattttgttgatatgtttatgtatgtatagtatgtgagctaacagacacactaggtttactatgtgcaggtactgtcccaagtgctctacaaatatcagagacagccaaggagcaggagagacaggactatggagggggcgaggacagggccctgggtacactcctgggactgggtagatgatgagatggtctctgaatggggagtgcgggagcaggtggttgatgagccggttcaggaacgatatcttggagccgtcatgtctagctccctcactctctcgagctgctcaaagcagagcctctccagtgccacagcccagggacagcccatgggcsgaggtcaggctggagaagttagtgtgtaaggaaaggcaggacatgaggctgcagtggtgtcaagggctggatctggcagggctgagtacaggagttgggactttatctgggggtggtgggagccctagaaggctgtgagtagggtcagttctgggtggaggaagatccctctggggccgtgtgggagacgatgtgggggagagagaagggatatgaaggaggaggctggggctgagggtgcaaggaaccagacaagaactttcttcctgtccactccttcccccttgccagaggttacacagtgactctctygaagtcaccactgctgcagcttcagctctccagctccagttcctcccccatccctctctctcagmacttccctccctggaacagaattgctcagcctttctcaatacacaccggccgttgaaaacataaagatcttgaaaacctgaacgatcaagaataaatgggtagtcgggtgcggtggctctcgcctgtaatcccaacactttgggaggccgaggcgggcagatcacttgaagtcaggagtttgagaccagcctggccaacagggtgaaaccctgtctgtactaaaaatacaaaaattagccgggcctggtggcaggtgcctgtaatcccagctactcgggaagctgaggcaggagaatcacttgaacccaggaggcraaggttgcagtgagctaagattgtgccactgcattccagcctgggcaacagagcgagactctatctcaaaaaaatgaataaatgggtaagtggaaggcaaatcaaagcaaagcaacgggtccttgaaaaaaagtttaaaaaaatagcaggtactatttctgcattgtttactatgcactagcccatttctaaccactttacataatttaatcctcttatttagccctctctacaagcctgagagactagtattactattggccccactttccaggtgagaaaactgaggcacagaatgcttaaagattgttccyaggataacacagcagctaagagggaaaaccagggtctggaccctcattctrgttactaagcccatgattttaattaccaccctcccgcctttctttctcactttctctttctctctccttccctcatctttatttcaatcattcaaccctcagtgtgagggttgacygtgccatggatcccctaaagatgtgttgtttctgggcaccagcctatccatcccttcacccaagaggtttttgggagcccctgcaatgtgcaaggtggtggttttagatgctgggatttctgtggggagcgtacattacagatggacataaataaaaatcccagccgggtgcggtggctcacacctgtaatcctagcactttgggaggccgaggtgggtggattgcctgagctcaggagtttgagaccagcctgggcaacatggtgaaactccrtctctactaaaataaaaattaaaaaaaaaaaattagctgggtgtggcggcgtgtacctgtaatctcagctattcaggaggctgaggcaggagaattgcttgatcctgggaggcggaggttgcagtgagccaagattgtgccactggggacagagtgagactccgtctccaaaaaaataaataaataaaaattaaaaaaaaataaaattccctacatgtgatggaccatgccctagccaggatatggtcagggaagacttcctggaggaggcgatgctggctgtgaggcctgaaagatgagtaggagttgactaggtgaaaagggagaggaatgttttatgaaggagggaagaacttacgataggttgtggcaayggaaaaaatgtggatgggtaggacgtggtgatggatggttttggtggaatggagaccatatcccagagtaggtgtgccagggtttgtaggttacatcgtgggatttagtcactgaatcatcacacacttactgaatacctccagacgccaggtactattctaggtgctgaggatacagagataaacaaaatagacaaaaattcctatccatgtggaatttacatttagcggggggatgacattattcctccagacaggtggagagaaattggaaaaatggcgtgttgaagcaccagtaggtggttatgtgagattctgggcccctgcagaggagatgccctattctctggcaagattcatggcttcacagaagaggtgacctacccggagcaaggggctgtcctagggcctgaaacacctaggctgaaggaagtcagacaaggrtttcacaaaagcccacgaattattctagaaaaatgtacggggtggcataccgtgaacttgcaatcttgataaatcaaacatggctgcacgcggggatttcctttgcttccacctgataccacatggtggctgtatgtttattttattcatatttatttgtacattgaataattttctaaatgtgcattatttttgtattttttgagatggagcttcgctcttgtcgcccaggctggagtgcaatggtgtagtctcagctcactacaacctccatctcccaggttcaagcgattctcctggctcagcctcctgagtagctgggattacaggtgcccgccaccacgctcagctaatttttgtatttttagtagagatggggtttgcctatgttggccaggctggtctcgaactcctgacctcaagtgatccgcccgccttggcctcccaaagtgctgggattataggcgtgagccaccgtgcccggccttgttactttaaatgaggcataaagtctcaaactctgtatgttgattcttaaaatctagcaggctcctgcgtttttcttcacctcgtgcatgtaggaaaaaaggggtgtgtcaaggatgcccttctggtttaacaaagaaaatttttaagcatttatactggtggatttaagcatttctctgggtggatcctggggagaatcacccagttggggggccatttggaaaaagcataggagggcttttagggggtgtgttactggggtatttactacctgggagccagggtttcttaactacataccaggccccgggcagtctgtgttacaagggtcagcaaactaggaagcccttggaccaatcccaacctgcagcctacttttttttttcttcttcttcttgagacagagtctcgctctgtcgcccaggctggagtgcagtggcgcgatctcggctcactgcaacctccacctcctgggttcaagcgatctcctgcctcagcctcctgagtagctgggactatgggcgtgtgccacsgcacctggctaatttttgtatttttagtagagacagggtttccccacgttggtcagactggtctcgaactcttgacctcgtgatctggccacctcagcctcccaaagtgctagaattacaggcgtcagccaccacgcccagcctgtagcctatttttataaatgaagttttattggaacatagccatgcctggtcatttacatacgtctatggcttcgtttgcaatatagcaacagaatatattaaacatttactacctggccctttgcagaaaatgtttgacagctcctgctgtataaacataaaatctgccaaaaaatgctgatattaccccacatggagaaacactgaacccctcttcagaaatcagatgccaatttaaatattactatcagagaaatacactctgatttttttttcctattccctttcttttattttcttttttgagacaaggtcttgctccgttgcccaggctggaatatgatggtgccatcatagctcactataacctcggattcctgggctcaagtgatcctcttgcctcagcctcccagaatagctaggactatgggtgtgtgccacaatgcctgactacttttttatgttttaattttttgtagagaagggctcttgctatgttgcccaggctggtcttgaactcctggactcaggtgaagtgatcctcctgcctcagcctcccaaagtgctgggatgacaggtgctagccactgcacccggccctatttcattttctacagtgttggttgcaactctctacattaatttcatgtaatgggctatgctgtgcagtctgagaaccgctgtcctagacaaactcttgctcacacacataaagagatgtataagagagtgttgtatcacacgttggggtgattgaagcatcattcgtaacagaggagaactggaaacaccatcatagatggcagagccgtggagtggaacattcggcagcagtaaaaggaatgaaactgaacagttttgaaaatccgagtgaaaagccagctgcaaaggcatctgtagggtgggatgattgtcttagtctcaaytgatgtaacaaactaccacaaatatggtggcttaaaacaataccaatttatttatctcacagttctggaggtcaggcggccaatatgggtctcagggctaaaatcaagacattggcagtgctgtgttctggaggctctaaggagaatctgcttccttatccttccagcttctagagaccacccatgctctttggcttggagcctcttcctccatttgttttatttatttattctagacggagttttgctcctgttgcccaggctggagtgcagtggtgcgatctcggctcaccgcaacrtccgcctcctgggttcaagcgattctcctgcctcagcctcccaagtagctgggattacaggcatgcaccaccacgcctggctaattttgtatttttagtagagacmgcgtttctccatgttggtcaggctggtcttgaattcccaacctcaggtgatccgcccacctcggcctcccagagttctgggattacaggcatgagccaccgcgccaggccattcttccaatttttttttttttttttgagagrtaggggtctcactagtctcactatgttgcccaggctgaactcaaatgatcctcccagctcagcctcctgagtaactgggactataagcaagtgccactgtgcctggctcttcctccatctttaaagctagaaggtagcatctttcaatctctctctgactttgatcctcttacttccctctttcccttataagaacctttgtgatgacatttgggcctacctgggtaatccagactctccccatctcaagacccttaatttcatcacacccgcaaaggtcctcttgccatggaaggcagcatatgcacagtttcagtgactatgatgtgaatattttggggaaccatgattcttgctaccgcaatgctyggaaacaaagagttttctttttctttttttcttttttctttttttttttttttgctttgagacagggtctcgctctgtcaccccaggctggagtgcagtagtgcgatctcggctcactgcaatctctgcctcccgggttaaagccattctccttcctcagcctcccaagtagctggaattacaggtgtaatcccattagcctattattagccagcacgcctggctaatatatatatatatwtwtttttttagtagagacagggtttcaccatgttggccaggctggtctcaaactcctgatctcaggtgatccgtcccccctcagcctcccaaagtgctgggattacaggcgtgagccaccatgcctggccaaaaacaaagttttttcgaagtagacttttaaaaaatgtaacacacatccagaaaagtacacacatcatatgtgtgaaactgaatgaatttycccaaaaaaaaaatcagaggtaaccagcacccagaacaagaaacagaatatgtccagtcccaagaaacctcctggtgccccctcacagggttaaccacttaagggtaaccactatctagcctcctaacgatagaggttaactttgcctgctgttgaactttatataaatgggaattatatcagtttctctttcatgtctggcttctttcacttggtaggtttgtgagattcatccgtgttgttggaggttgtaatggtgtgttcattcttggtgctgattagtgttttattttaggaatataccacaacttattttctcactctattgttggatatttagstttcaagtatttggcgaatacacatagtgctgctrtgaacattctcgtacacagctttagatgcccatttgtcttgagtggcaccactgggtcacaggagagacataaaatttgctttagtagatactgccatgaagttttccaaagtgcttgtgccatttcacgttcccatcagtgatgggtgagagttccagttgctccacgtcctcatcaacacttgatgttatcagtctcttttgtttgaccattctgctgatgtgtagtggcatttccttagggttttaatttgttatgtctttgatgactaatgagtttgagtcctttttcacgtatacaatgcttttaacacacagaaacatacctcccattgtttatgggtgcataaaaatatacatggaatgctaatagataattttgatagtggctgcctctggggacagagggaaggaagataatctgttagggcagcgttcacagaaggcctcaacttttgatgttattgctaaaccagaagcagatacaggactatctgaaattttttatttctaaaaaaagttaaggtaaatacaataaaacattcactcacttttgacagaactaagggtggtaggtatagaattttagtgaacacttactgcttgccatattccagacactgtgtaggtgctttacctatattaactcttttcatgctcatgacgatcctatgaggaaggtatgatgagtaggaccttccttgtaacctatgaggaaactgaggcatagagacttgaagtgacttgccccaggtcacacagctggcatattcttagggccctctactcttctctatgcctgaaacaattcttagtttaaaaaaaaaaaaaaggtgagtggaaaggaagaagagggcagcagagtgatgtgaccagggcggtggtggttcctcccacaggcctccccagcccggctgccccgccttcatcatcgtcaagctgagcccgctgcgggaccgcctcgtggtgacggagtgccagctgacccactcacacccggcctgcccgctggagttcgcctactacttccgcccgggccacctgctggccaacgcctgcctgccggtgcgcaccaccaacaagatctccaagcagttcgtggccccagccgacgtgcgccgcctgctgtcctactgcaagggccgcgaccacggcgtcctggacgccctgcacgtgctcgagggcctcttccgcaccgaccccgaggccaaggtggggtctcgagagaggcaggccgggggagggggcgggggaaagccrcgctgaagactcgtgggtcattcatkccttcatccgccctctcatcccttcactcctttcctccattcatcckttcattcattcaataagtacttaccgaggcattggggatgcagcagcaaaccagacccacgtggtctctgtccgcagagagcttaccttctagggtagtgctgcccagtagaactttcttccaggatggaaacgttctgtgattctgcacccccagccacaagtggctactgagcacttgaaatgtgtccagtacactgaggaactgaattaattaattaattaattaatttttttgagacggagtctcactctgtcacccaggctggagtgctctatcacccaggctggagtgcagtggtgcgatctgggttcactgcaacctccgcctcccgggttcaagcgattctcctgtctcagccttccgagtacctgggactacagggcgtgccaccacgccggctaatttttttgtatttttagtagagacggggtttcaccatgttagccaggatggtctcgatctcctgaccttgtgatcygcccgcctcggcctcccaaagtgctaggattacaggcgagagccaccacgcccggcctgaatttattctaattaattgaaatttaaatagccacctatggctattggctgccttgcagaggtaactgccagaacgcccctgcagttctggcgggaaaaaccaacaactgacaaacaygtccaaatatgatgtaacatcactaggggctggctgggtgctagcaagaaggggagccacagtgatgacaaatgctatgtaagtttttttttttttaatcttttttttttttgagacaggatctcactgtcacccaggctgagtgcagtggtgcagtcatggctcactgcaccctcgatgtcccaggctcaagcaatcctcccacctcattctcccgagcagctgggacaacaggcgtgcaccaccacacccagctaattttttagtttttgtagagatgtttggcgggggggggtctccctatgttgcccaggctagtcttgaactcccagactgaagcagtcctgcttcggcctcccaaagtgctgggattacaggcatgagccaccacgccaggcctacttaaatttttttttttttaattgaactgcacaaacagaaaatgcacaaatgataaatacttagtttgatgaatgttctcaaggggagaacacacctgaacccaccatgcagatggagaattaggagaaggaagagtgctatgtcctgtaatgtgatggagcgataagttatcatcaaggagaaaaaggccggggcctggagcgggacagttctaagggtgctgtttgaattggtcagggaagktctctttagcaaatgatggtgaagcagaggagatggaacagaggcaagggaccctcattctgtcatcagagggaagagaattctaggcagaaggaacagccagtgcaaaggcccagaggcacgagcaagcttgtgttggaggaacagtgaggatggctgctgctccataaggaatctctgcggctttaatccaacttcaagtttggggtgaacttgaagtttaaagaggaaagaaagatgagaaagtaggggaagaactggtttctcctcctggctgtgcctttgtctcccttgtgtgtggaagaggtcccaaggcagggtaaagtcgagaytcagctctggcacactcttcctgtcttcatctcatgcccagtaagaagccctgattcaagccaccagcccaagcccaggcctctgtcccgacataataataattttagctaatgtttatcaagcacttactatatgccaggcactaccctaagtgctttacatactataactcattttcatctcacctgagccctatgaggaaatagtccaccattctcatccccattttacagacaaggaaactgaagcacagagaagtcaagtaactggctcaaagtcacacagctatttagtgacagagctgggcttcggacccacacagcctggatccagacccatgaccttcaccatggggacaaacacacatgcacttcctactccactggtctttgctgatctagtaactctcctccactacccaccatgacataaataagcctcagctgttcttccctgaacccaccctctgcaggattgtccctgtgcagaacagctcattcatagatcagagccttccctggaaggggagttgtcttttcattttgaaggctgtcttggaatctcggctaaaccacggttggctcctgcgtctgtgttttgacctgctttcatactttttttttttttttttttgagacggagtttcgctcttgtcacccaggctggagtgcaatggcggaatcttggctcaccgcaacctccgcctcccgggttcaaacgattctcctgcctcagcctcctgagtagctgggattacaggcatgcgccaccatgctaatttttgtgtttttagaagagacggggtttctccatgttggtcaggctggtcttgaactcctgacctcaggtgatccccccgccttggcctcccaaagtgctgggattacaggcatgagccaccgygcccagccccttaatgctcttgaaagaaaggaggaagaagttctaggacaggagagacagattagtgaagcaacatttaaatatttactttttgaatatgtcatacattcacatggttctaaaaaaggtatgtggtgaaaagtcttatcacatcctgtcccccaggtcccctcccctgcagagttattagcagcttataaatcatatctcgctttctatcctatggaccagcactgcccggtggaactttctacaatgatagaaatgttccttatccaggctaggcatggttactcacacctgtaatcccagcactttgggactctgaggcagatggatcacctgatggcaggagttcragaccagcatggccaacatggcaaaacctgatctctactaaaaattcaaaattagccaggcatggtggcaggtgcctgtaatctcagctactcgggaggctgaggcacaagaatcgcttgaacccaggaggcagaggttgcagtgagctgagattatgccactgtactctggcctaggtaacagagtgacactcttgtctaaaaaaataaaaagaaagaaaatggttcttatctgtactgtccaatccagaggccactggccacacatggctacagaatgcttaatgaggccagtatgactgaggaactgaatttgtcatttaatttatcgaaatgtaaacaacctaatgkagctagtggcttctggattggacagcgcagctctgcacatatacaggtcaatttgcatgtctgtatktttaactttaatttttaactttatttcctctttctgccccgccaccccccacccccagcaagcagggcagcctagtgtacacgctgtttttgtttgtttgtttgtttgttctttgagacagggtttcactcctgtcacccaggctggagtgcagtggcacgctgttggctcactataacctccacctcctgggctcaagtgattctcctgcctcagcctcctgagtaactgggactataggcatgcaccaccatgcctggctaatttttgtatttttagtagagacgaggtttcaccatgttggccaagctggtctcaaactcctgacctcaagtgatccactcaccttggcctcctgaagtgctgggattacaggtcggggccaccacacccggcctgtacatgctgttttgcatcttgctttatacgttggggagtgccagatgtcaccatctttcgttcttcctctggggctggtcaaatccccctgagaaaactcctctggcctcctggcggggggtgaaggccaggctgccagggccaggctgccagcttctgggagctgcaggggcagaggcagggagctgtcaggcattcagccagcaagacgcactcagtacccacttggggttcagaatccccctccctcatcttcagatgggccagatgtccccaaagccagcggcccctttctgtttcaccctgtctacagaataaacccccagtcactgggggtgggggaagagtaaggggagaggggaaacgagatttggaggtctagctgctgctgaaacagccctcagttcgtctttattttgccttctgcaaaactggcctggtgttgccagctccttttgaggactttgctaccggttctcagcatccctcaattgctggcttaggattcatgggtttttaggggtggggtgggattagcatgtccagctgctttccagtttccaaagttctgtccctatcatattgcctctgatttaaaaaaaaaaaaaagccattttaaaaaaaagatgtaattgaggttcaagagagagtgaaactagagaggtgttcaatccatcacttttacacagaaatttcacctttttttcacttataaaatctaatgaaagagttctatattattatgttaataatacagtagtaatataacagtataatgtaatagataattaatatattatattaattatatattataattawatattatattatatatattatatattatatattaattatatatattatatatattatatattatattataatatattatattatatatattatatattatattataatatattatattatatatattatatattatattataatatattatattatattatatatattatatattatattattattatattataktatatatattatatataatattatatatattatatattatatatataatattatatattatattaatattataatatgtaacgcataacatgtaatattgataatataataggtgcgatggctcacacctgtaatctcagcactttgggaggccgaagcgagaggatcacttgagcccaggagttcaagaccagcctggccaacataacgagcacctgtctctacaaaaaattaaaaaaaaaaaaattaggcatggtggcatgcatctgtagtcccagctactcaagaggctgaggcacgagggttgcttgagcccaggagcttcaggctgcagtaagctatgatcacaccactgtactccagccttgacaacagagtgagaccctttaaatagatagatagatagatagatagatagatagatagatagatagatagacagacagacagcaagctttaaattttcatcccaagcctaggtcaagcaacaatcagtctttccacttcccagcagtcttccaaaggaaggattatttgtaaaaagtgcctgcacttcctgagttgggttgctctcttgatctttggaggggatcagacaagaaggatgcgcccaaagccacaaggcatgatttaagggcaagactggggggcgacttcacccagggaggtgttaatacctttttttttttttgagatggagtctcgctctgtctcccaggctggagtgcagtggcgcaatcttggctcagcacgacctccatctcccaggttcaggtgattcttgtgcctcagcctcttgagtagctgggactacaggcgtgcgccaccaggcctggctaattttgtgtgtgtgtgttttagtagagatggggtttcatcatgttggccagaatggtctcgatctcctggcctggtgatctgcctgcctcggcctcccaaagtgctgggattacaggcgtgagccaccgcacccaacctttaacaccttttatcacctgccctgcctgatgatgatgggctttggggtccagtcacatctccattccctcacttgtggcaggcaccagggtaaccagcaagcaagccctgaaaagagagaccttgcccggaaacgttgcagcgttctcttacgtgtatgctttgccttctgagaatggcgagcattgatgcaagtgtatcccttttaagaatactcaatggggccaggcgtgatggctcacacctgtaagcccagcactttgggaggctgaggcgggtggatcacgaggtcaggagatcgagaccagcctggctaacatggtgaaaccccgtctctactaaaaatacaaaaaattagccaggtgtggtggcaggcgcctgtagtcccagctacttgggaggctgaggcaggagaatggcgtgaacccggaaggcggagcttgcagtgagctgagctcacaccactgtactccagcctgggtgacagagcgagactccatctcaaaaaaaaagaatactccatgggaagctggtatgatctcagtggagggcaatttagcaatatctatcaaaatgacaagaacactcacccttaggctcacaatcccactactggtgatttmtcctgcagatgtagttgcacagctgtggaaggacttacttacaaggttaatcattgttgtttgtgaaagcagcagattagaaacaacccagactccaccaacgggtaatggttacataacttgtggtatatccatccatggattactacacagcactaaaaaagaatgagaactttgggaagccgaggcgggcagatcacaaggtcaggagatcaagaccatcctggctcacatggtgaaaccctgtcactactaaaaatacaaaaaattagccaggcatggtggcaggcacctgtagtcccagctactcgggaggctgaggcaggagaatggtgtgaactcaggaggcgtagcttgcagcgagccaagatcgtgctactgcactccagcctgggcgacagagtgagactccatcctaaacaaamaaaaaaaaaagaataagaacaagtctaggaactattttgaaagatctctcaaacacatttttaagttaaaaaagcaaaatgcaaaactgtacataatatgctgtattatctataaaatagagcaaataagaattataggtatgcttacttgtactcatataaagaaactctagaagaataccaagaactgtggatgagggtagaatagtgaatggaaactgactgattagactaaagaggtgggagtaagaccttttatgtatcgctttacattatttgactttaggaccatgtggatgtttgcatattcaaataattaattcttaaaaagaagatgaaaatagaaggtgggcgcagtggctcacacctgtaatcccagcacttcgagaggctgaggtgggtggatcacttgaggtcaagagtttgagaccagcttggccaacatggtgaaaccccgtctctactaaaaatacataaattagccaggcatgctcgtgggtgcctgtagtcccagctactcgggagactgaggcagaagaatcacttaaacctggggtggcggaggtcgcagtgagccgagatcatgccactgtactccagcctgggtgacagattgagactccatctcaaaaaaaaaaaaagaaagaaaattaagcaatagtcccaacatactaaacgcatttgtttctctcctcaaaggaaaaattagagggcgagttatagagggtcttgaggttgtgtgagtcaggatggcctaggttttgctgtaataatgaacagccctcaaatctcagtggctgaactcattgaattttatttcttgctcacttacacagccaccacgggatgttgggggagtactgtttatctgagtcattctgggacccaggaggatgggcattcagcccaacgtaattaccatatctggcagcggtggctgcgaaggcttctccttggatgcgatgccgcagctccctcccactcacacttgattggccaaagcaagtcacatgacactgcttacctgcaagggggcagggaggtgcaacgctactaagtgcccgggagagggagaactgcaatttcttggcaagcggcaaaagataaccacagggtactgtttcatcaagggccgcccaaagccctgtctgaatatggggctcgtgtttcccctgctatgtagttacacaggcctcctgcagcttagtttcagcttttctagtttttcatggctcccagagggaatattttctatgccgtatagcctsttttcacatgaagccattttggggtgttatagtaacagctggtgacttgattttatttatgttgctatgtgctgaaagctttatgaatgttctggctgtgccagttactagctgtgggacatggaacaagttatgaacaacctatttaccttctccaacccttagttcatttatctgtaaaatggggataatactatcttatagggctgttggggttgttgtgtgagaaagtgcagtgtgtatgtgtatgtgtgtgtgtgtgtgtgtgtgtgygtgtgtgtgcagaatgggtagaaccgtgcccagaagtaggaagccctgcatatgttcaatatttagctattattttgttgttgttgtttgtttgtttgtttttttgagatggagtctctctctgtcgcccaggctggagtacagtggcacaatctcggctcactgcagcctccgcctcccgggttcaagcaattctcctgtctcagcctcccaagtagctgagattacaggcgcgcaccaccacgcccagctaatttttgtatttttaatagaggtggggtttcaccatgttggtcaggctggtcttgaactcctgacctcaggtgatccacctgcctcggcttcccaaagtgctgggattacaggcgtaagccactgtgcccagccttagctattatttttattccttcaattttttctttggggcagtctggagaacagtttcatgtgaacattctgatcacatggaaaagggaaggtttactcacgtgtcggaagaggtgtgaatggaaagtagtaaaggcatggtttctgatgttcatgtttgtggaatctgtcgtctatggcagatgcttccccgtgctaccaatttgtgtgtctgaaaggacacccgtacattcatytgcatcctcaaaatctgttcctccgtgggtttctccatctctgcaaaatgcactgctgtccactgtgtgcctaagccagccctgtttggtcaattttttgaaggctgtagggtagagtggtcaggaacaagaagccctggacccaagctgtcagggttcaaatcccagctcacctggtattgcaaatcgcatgggtgactccaggcaagcaactgaagccgtgtgtgcctcggtgtcctcatctgaaaaaggggaatgagaatcatagtatctatcttacagggatattgtaaggatgaaagattagctgttggaactgtgcctggtgcagagaaactacttcatgtgtgctttgcacacccgaaaccttcttttttatatttrtttatccttggcctgggggctgtctcctctcactcagtggtgtgtctcatttgttctcctctgtgcctgagccagcacatggcacatcatattttctcagtaaatatctggcagaaaaatgtattcatcagcctggccaacatggtgaaaccccatctctactaataatacaaaaattagccaggcgtggtggcgggcacctgtaatcccaactacttgggaggctgaggaggaagaatcgcttgaacccgggaggcagaggttgcagtgagccaagatcacgccactgcactccagccagggcgacagagtgagactctgtctcaaaaaaaaaaaaaaaaaaaaaaaatatataaatatatatatatatatatatatatacacacacacacacatttacatagycccgccttcatcaaatgtcaccctgccccttaaaatgccgcccatgcatgttctcccacctactgcttttgtttccaatcattcctaatggcccggatcyattggatcccagcatcactgcttgttagcgcagtggccttgggcaagtcactcctctggtgcagatgggggtccctaagaccaccctcagtttccatgattcactagaaggaatcacagaactgagaaaaattgttatagtcaaggctacagtttattacagcaaaaggatacagagtaaaatcagcaaaggcaagagccacacaaggcgaccccatcagtctctctgattccttaattatctaacagcagcacatagggcagaggccaagagagaccagcatgagctgccagatgtcgtctctcagtgaagtcccatggacagtgctcagttctcccagcaatgacatgtgacaacaatgatgtattgctagccagggacacttacttgggccttggtgtccagggttgttattggggtcagccatgtagacttgtgctgaatactgctgagagatcgagacagacggtaagaacggctgagagctgatgcacgccaggtgtccttccatgcgttggccaggagtgatctcattttagcccatccatgaccctgttaaatagacatctccatttttccagacaaggaaccaaggctcattgaggagaggtcacttgcctgaagtcccacggctaataggcaaatccaggagtctgatccttaaacctccacccttacagatgtggccttggacatggctgcacaccctcgcgtgagttcactcactcaggatgtattgagccattgttccagggcaggtagcattcaaagcatcaggggtgctgttatagscaaggctacagtttattacagcagaaggacacggaataaaatcagcaaagggaagagccacatagggcagaggccaggagagaccatcccgaaggggaacatccctgtgcttgtggggcttccatcttaaggagggcaagcaggcaatgggcagatcaggaaacgaagatatgacttgccaaagggtggtaagtgccatggccaaaaggagscagagagagatggggtgtctgcttagttgggaagtcacagaagascgggacgtgatgtttgaacagagacgataattataatggccactttcagaacacttactatttgttggataagtaataacagtaatatatgtaccaggcaatgttctaaatgcttgaatgcatctcatctttccaatcacagagatgctcttattatcatcactttacaaatgaaagggaggttagggaagttggcagaaggcacacagccaggaagcaggggctccaggatctcagcccagggatcttggcctcagaggctatgcttttcaccactgtcctgcctctcagtgcatggagaaatgaatgttcagtgcctagaagggataatcagggaatatggaggttaaggaggcaactgaggcacagagaggttaaatcrcagggttcagaagtgttgggggtgggactcaaagctaaatgatctgcctccacaatctaagctcattaccaccagaccagtcatccttaagcatgcataggagtcccctggagggcttgtcaaactagattgctggggcccgcccccagagtttcagactcagtgggtcygaggtggccccgagaaggtgcatttctgtccaggtcccaagaaccgatggtgatgctgctggtccagggcccacattttgagacccactgccctagactgcctctcagcacacggaggaatgaatagccagcttccggcggaggaaactgaggctcagagaagctaaaagtgtcatgtggaaaaaatcacatagccgttagactgtggtacctggatctcaaacccaggcaatccggctccagagtgtttttaaccatttccctgcactgcctcctgccggtcaaaagaataaaygcatatgcaggcaagaatgaatgggtggtcccatttccgtagaaggggaaaccgaggtcggggagctgggcggggagaccccagcatcctctgacctctttccttgcctccctgcccccgcccgcaggtgaagctggtgttcgtggaggaccaggctgtggtggagacggtgttcttcytgacgtcgcgcaccagggcgctgctgcggcgcttccctcgcatgctgctggtggaccggctgccggggctgcagggcgcgctggatctgctggccgtgctgtgcgtggacggctcgggccgtgcgcgccaggctgcctgctgcgtggcgcgcccgggcacaccgagcctgctgcgcttcgcgctcgcgtcgctgctgcagagcgcgccagacgtcaagggccgcgtgcgctgcctcaccgccgggcccgaggtggcggcgcagttgcctgcagtgcgccagctgctgccctgcgcgcgcgtgcagatctgccgcgcgcagggcctggagacgctcttcagcaaggcgcaggagctgggcggcgccggccgcgaggacccgggcctgtggtcgcgcctgtgccgcctggctggcgcgtcgtcgcccgcagcctacgacgaggcgctggccgagctccacgcccacggcccagccgccttcgtggactacttcgagcgcaactgggagccccgccgcgacatgtgggtccgcttccgcgccttcgaggcggccagagacctggacgcgtgtgccctggtgcgaggccaccgccggcgactgctgcgtcgtctcagcccctcgcgtggcgtggcgcagtgccttcgcgacctggtggccatgcagtgggccgacgcggccggggaggcggtgcccgaggggcccgatggcggggggccttggctggaggatgagccagggaggggagcccagggggagaacgagagggtgaggggcctggagacaggcgactggggaggggctccgaaagaaggaagtatttggaggggagcccagatggagaaggagtgggcaagggcactggaaaccagagactggggcggggctcagttcgaaggtgagaaggggagggcactgcagatcagagattggagagggggtcggttggagaatcagaagccgaggggactggaagggggtgtcttgagagggtcgaagttagagaaagggcacctgagagggccagagattagagactggagggggccccagttggagggtgagaaagattggggactggaaggttatgtctggagggggtcccagttggaggaccaggcgctaagaggattggaagggtatacctggagggtggcccagctggaagatcgcaggagtaccaccgacctgagggggacccagtttgactatgagakggtcaggagtcttgaaggaagcccctggaggggggcgcagctgcacgatgaaagggcagggggactgagaactgcagaatggaaggggccacagtcagaagtagagaaggggagggggctggaggtcagaaacttgagggggatccccttggagaagtccctggagttggcccctgagaacggagaccaaaggggaccccagtgggaagatgagaggaggagagggccagagattgcagaggagaggggagcgagggtgggggtcaaaagaagaaggggcctggaggatatagttctggtccagctgggagacacgagggtcacaggcatggagaatggagatggagggggagcccggtccgtgggccccaagagccgagccggacgagggatggagtggggagacgcaggagggcggtgtctagggctggggaatggagtcgtgtctggcaccccggtggggactgtattggaaggcagcccagaatgggcagcggcgaggagtgaacacctggctgcaggtgacggcctgcaggaaggaggcgaagatggccccagggaaccaaagaggctttgccgacccccgggagaggaggaggtggactgggaacccctggccaaattccgagcagcctgcgggccagagctggcagacctggtggctgaggagttggcctttgctaggcagcatgggacccggggtttccactggaccggagctggctttgcccttaaggacggcacctcggacttcttcctggatggggccctgacacgctgcagctgctcaattcacgccgcccgccgtctgccctgcagacacctctttgcagcgcgcctcctcactggggctgccttattccacatggacctgctcagggattgctgggggagagccccagagccctgacccttcatgcctctgcccaccaccctccaccaggagggtcggagggcattcttcgatcccaaagataatagggctgaggccaaggagaccgttgcagtccccctggccaccttctgggtcatccagggacctcctcatggcagtttgcctctctgggtccaagggcaagctgtaagtggtctctgaggtcctggagccacagcttgggaaggtgttgatgggcagggtggattctgagggcttccctctggagaggaagcatgtgatgagaggtgtagacagggtcaggctgggacagaaggaaggaaaggggcagagctggggggagggggaggaagcgatcatatggggagtgtctggcaagagtagactggccagtctagggagtgcagcggggagaggggaaagggagaaagtacagaagacagatgaaggagaggaggtaagcgagaaaaaatggaaaggggagccggaaatggaggagagaggacaagcaaagagacagaaatgaagacatgaggaaaagctgggggaagcaggagaggaagggacgggatgtaggagggggaagaaaaatcggagatgagacaaaagaaatgtgtgggagacgggtagagacgaaatgcaaggggcgtggttttggtttttctccaagacctggagacatcgacccccatcgccttctgaagagagagggagggcgggcactgggggtcaggagagtctccagcaggggaggggaattgtttggactattgttcttcaggattggaataaaacaatcttattttggtttccgtgatgagttcttggcttctggggttggttgggagtcccagatccagggaacagttgagatggtccagcgttccttcattctttctaccgacaaggcctcctggggccagatggatagaggagccacaatgaattcatctccatagcaactcaagcttcctcctccatcatctggaccagtgcgtcccagtggcaacttcttgacatgagtcgattctaccttcaaatgactgactcatgccaaatgtcctggccacagaatgggcctgtgacccagtcctggtcaacgagtctgctcaggttgaggtgggaggcttttttatttttatatttttgtagaaacagggtcttgctatgttactcaggctggtcttggactcctcggcttaagcaatcctcctgccacagcctcccaaagtgctgggattacaggtgtgagccactgtgctcagaactaggaagcttttttttttttttttttgagtcttgctctgttacccaggctggaatgcaatggcacgttcccggctcactgcaacctccacctcccaggttcaagtgattttcatacctcagtcacctgagtagctgggattacaggtgtgcgccatcacacctggcaaatttttgtatttttagtagagacggggtttcaccatgttggccaggctggtctcaaactcctgacctcaggtgacctgctcgcctcagcctcctaaagtgctgggatcacaagcgtaagccactgcgcccggcctaggaggcttctaataaagattctatcactcctaagaaggcctagagacatgatcaggcctagacctgctgatgattaccttggtatggtgtgataatgaagtccacactgaggatgacagagctgagatgaagaaaatctggatctttgcttggctcagttgagtctctcgagtctgctctaccatggggcttcttaagtaaaatatatccttttttgttagagacagtgtctcgctctggcccaggctggagtgcagtggtgcaaacatagctcactgcagccttccagctcttgggcccaagggatcctccagctcagcctcctgagtagctaggactataggctcgtgctaccacctagctaatttctttttcttttcttttcttttcttttttttaactttttgtaaagatgaggtctcttgctacgttacttgggctgttctcaaactcctggcctcaagcgatgcccctgcttcagcctcccaaagtgctagaattacagatgtgggccattgcacctggccaatcaaagataccctaatgatttagggaagtttgagttggggtttctgttgtcgcaactgatgaaggggatttaattctattataggtgacaaagtccaggttgaagtagctcagcatttttcaaactttagcgtggacgtgagtcacgtgggcaccttcttaaaatacagagtctgactcagtaggtctaagatagggcccaacattctagcaagctctccgatgatgtggctgtgctgggttgtggagcacactttgagtagcaatgaaggaacttgagataaaagacaattcaggccgggtgtggtggctcacacctgtaattccagcactttgggaggctgaggtaggtggatcacttaaggccaggagttcaagaccagcctggccagcaaggcaaaatcctgtctctactaaaaatacaaaaattagccagatgtggtggcgggtgcctgtagtcccagctacttgggaggctgaagcatgagaattgcttgaacccaagaggcgcaggttgcagtgagccaagatcgtgccactgcactccagcctgggtgacagagcgagactctgtcaaaaaaaaaaaaaaagaaaaaaaatgattcagtggttcaagtcatgcgaagtcaaaggctttgatggcagctgactgcaggggctcaaacaatgtcaggtttcccctctctcgcctgcttttcgtgcgatggatttcttcaaaagacagctctctcctgagaaagggggggactagaagttcccatatcacaccctcctatcttgatccaaaaataccattctatcagcattcgtatattaagtctcaaggaagcagcaggttggatttatggaggttatcagttatccatggctacataaatgctgtgttaacaactataaaacttcctaagtatataacaataaacatgtatttggaatcaacctaaatgcccatcaataatcataagctagataaagaaaatatggtacatatacaccatggaatactatagagccattaaacaactagatcatgttctttgcagggacatggatggagctggaggtcattatccttaatgaactaacacaggaacagaaaaccaaatactgcatgctctcacttataagtgggagctaaatgatgagaagaaatgacacagagagaggggcaacacacatggagacctactagggggtggaggatgggaggagggagaggatcgggaaaaataactaatgggtactaggcttaatacctgggtgacaaaataatctgtacaacaaacccccatgataaaagtttacctatacaacaaacctgcacatgtacccctgactttaaaagttaaaacaataataaaaatgaacacgtattgcttatgagtcttgggtcacctgaggggttggctagacccttgcttttcagtgtggtgcatgcaacagtgtcatgaacattccctaggagcttgttagaaatgcagattctcggctgggcacggtggctcacacctgtaatcccagcactttgggaggctgaggtgggcggatcacctgaggtcaggagatcgagaccatgctggccaacatggtgaaaccctgcctctactaaaaatacaaaaattagctgggcgtggtggcgcacctgtagtcccagctactcgggaggctgaggcaggagaatctcttgaacccaggaggcggaggttgcagtgagccgagatcgctccactgcactccagcctgtgcgacaaagtaaaactccatctcaagaaaaagaaagaaagaaaaaagaaagaaatgcagattctcaaacccattccaaaactacagaatcagaatctcattctaacaagatcctagtatgcatgttatactttgaaaagcaaagcaactgatcataaacctacaattatcggaaataggcttatttaaaaaaaatgaaagcagctaatcttgataaagtagctgatcttcgttgggcttgcccacatatcgggagtcatctggcttttgggtgaactaaaaaggccttggcagggcttggtggctcatgtctgaaatcccagcactttggggggccaaagtgggaggaccgcttgagcccaggagttcaagacgaacctgggcaacataggaagaccccgtttctacaaaaatagaaacaaaattagcctggtatgatggtgcacgtctgtgatctcagctactcaagaggctaaggtgggaggatctcctgagcctgggaggtcgaagctgcagtgagccatgattgttccactgcactccagcctgggtgacagagtgagactctgtctcaaaaaatgccttggccgggaggactagggtaactcgttcagcacgtagacccctccagtacaaccctatgaaacttccctgcagcccctgcctttgcagacagctcttcgtctgctgtgctgcccattgctttcttgcaatgtactatctgtctaataaatctgcctttctttccctacgactgtcttgataaatgcctttacctcccatgatactggccccagctagtcacacccgtgatgcccatctcttttttttttttgagatggagtctcgctctgtcgcccaggctggaatgcagcagcacgatctcggctctctgcaagctctgcctcccgggttcacgccattctcctgcctcagcctcccgagtagctgggactacaggtggccggcaccacacccggctaattttttctattttttagtagagacggggtttcaccgtgttagccaggatggtctcgatctcctgacctcatgattcgcccacctcggcctcccaaagtgctgggattacaggcgtgagccactgcgcccggagatgcccatctcttaaaataaaaaataaaaaaaaaaaaagaaagagagaaaggaaaggaggcaggagggatcctgggaaggcaaacaacagctattgagcgcaaaccaaatccaaaacttctccacttgcctgttttatcattagattcttagatgtgggctatctggttagtgacgggaagctgaattaattcattaattgattcaccaaataacacacagaaccctggggtggaaaagagctcagcccataaggtaaagagaagatgggccagtgtagatgggtcagagtgtgaaagagggagagatttggacagtgaaatccgcaagcccttaaagatagaagatgaggtgagtctttatcctgggaggtatgggaagccttcaaaaggttttaaacagagagtggcttgattggatgtacattagaataaccacctcccctaccccagaagctttactgtgacaaatggattggatgagtccagaccaggaagagacgtatgtgaccataaacaaacaaataaaaataaattttaaaaaacaggcagaaggatcttcacagaactggaccttgaagaatgtgtttgccaggaaaagagaatgaagaagtacgttcctattggagggaactgcacgtattacagtatttggcccttcaggaaggcaagaggaaactaaaggttagtaaaccttaaccctctatatgccccacatatatagctcacagtgttaaatcaagtttagcctaaagctgcctccttacatattttaagttcggcctgaaggtttttctgtacgtcgtgaactataacaagtggaggtgtaaacagaaggtggcctacacttgtgccaatcaccgagttttgggcaatcaaatgtagccaactgttcgaactgtgtacagcaaacgccgagctgtaatcaattcagctgtttctgtacctcacttacgttttctgtatgtcactttcctttttctgtccataaatcttccaccacatggctgtgctggagtttcagcctactctggtccgaggctgcctgattcgtggatccttcattgctcaattaaactctatttatttatttagagatggagtctcgctctgttgcacaggctggagcacagtggtgcgatctcagctcactacaacctccaccttctgggttcaagcaattcttgtgcctcagcctcccgagtagctgggactacaggtgcccaccaccatgcctagctaatttttgtatttgtagtagagacagggttttgccatgttgaccaggctggtctcaagctcctgacttgaagccatccgccctcctcggcctcccaaagtgctgggattacaggcatgaaccacagtgcctagccaattaaacttctttaaatttaattcgtctgaagtttttcttttatcacaagtcacatcaatccctcgggcccctgctcaaatgccacctcttcctgaaagccatccctaagtagtctctctaaagagccatccctgcccctttctttgctttatccttcacagcacttatcactacctgaaattatgccacacagctatttaccactttggcattgtgattaagcttatcaagtatgaagccagactgcctgggttcaaatcccagctccactacttccttgtcatgtgaccttccagcctatgttacagttgaggggtcataatagtacctgtctatagggctttgtgaggatgaatgaattagtgtgtgtaccagtgttctaacatcgcctgcatttccatttttcccaaagcagcccagttacttattaacatactgctttttccagtgacacgtgttcacagttattaag

SEQ ID NO: 96233 - DNA, 12614 bp, Homo sapiens
aatctcggctcactgcaacctctgcctcctgggttcaagtgattctcctgcctcagcctcccgagtagttgggattacaagcacccaccaccatgcctggctaatttttgtatttttagtagagacggggtttcgccatgttagtcaggctggtctcaaactcctgacctcaggtgatctgcccgtcttggcctcctaaagtgctgggattacaggtgtgagccactgtgcctggccatttttatcatctcaaacttaataacttcccatctttccttgcccctaatgcctggtgactgctattctaccatctgtttgtatgaatttcactattctaggtacctcatataagagtggttacacaatgtttgtacctttgtgtctacacatttcatccatgtcgtagcatgtattagtcagaaggacagaaccaataggatgtggagatatatagatatatatatatgactttaataggtaggatatatgtatatatacgagagtttattagggagaatcaactcacatggttagaaggtgaattcccacaataatctattggcaacctcgggaaagagaagctagtggtagggctcagcccaagtttgaaagcctcaaaagcaggaaaaccaacagtgcagccctcaatctgaggcctaaggcctgagagacccccagaaggctgctagtgcaagtcttagaatccagagcccaaagaacctggagtctgatgtacatgggcaggaggagaggatataagcatctggcaaggaaaaagagaaagcaagcaggaagactcagcaagcaggcttatctttgcttcttctgcctgctttgttttagtgcactggcagctgattgtatggtgcccacccccattgagagtgggtcttcttctcccagtccactgactcaaatgtcagtctcctctggcagtaccctcacagagacacccagaaacaataccagccatctaggcattcctcaatccagtcaagttaacacttaatactaatcatcacatagtgtgtatcagagtttcattcctttttaagtctgaatatttcattgtatgtatgtaccacattttgttaattcatttatccatcaatggacacttcagttgtttccacctcttgggtattaccaataatgctactatgaacatgggtgtacaagcatctgtttgagtccctgctttcagttctttgtgtatatacccagaagtagaattgctggattatatggtagtcctgtgtttgattttttgattaagcaccatattctttttccactgcagttgcacaattttccattcccgtcaacaattcacaagagctccagtttctccacatcttctttggctctgtgtccccacccaaatctcatctcgaattgtaatccccatgtgttgggggaggggcctggtaggaggtgattgaatagtgggggcagatttcccccttgctgttctcataatagtgagttctcatgagatctggttgtttgaaagtatgtggcactttcccctttgcatgctctgtctctcctgttccaccacggtaagatgtgcttgcttccccctttgccttttgtcatgattgtaagtttcctggggccttccagtcatgttccctgttaagtctgtggaactgtgagtcagtgaaatcccttttcttcataaattatccagtctccagtagttcttcataacaatgtgaaaacagactaatacacttgtcaacacttgttttctattgttttgatatagccatattaataggtgtgaagtggtatctcattgtggttttggtttgtatttctctgatggttagtgatgttgagcctcttttcatgtacttactggtctctatattaaaaatctttggagaaatgtctattcaggtcttttgcccatttttaaattgggttgtgttttctgttgttgagttttagagctctttatatataattcagtctcctatcacataaatgatttgcagatattttctcttattcttgggtttttcattctgttgtcctttgatgcaccaaagtttttaattttgatgaactccaacttacattttcttttgttgcctgtgcttttggtgtcatatcaaagaaatcatctccaaatttgatgtcatgaagtctttcccttatgttgtcttctaagtgttttgcagttttagtgcttgcgtttaggtcttttatccattttgagttaattttttgtgtatagtattagcttagttttattcttttgaatgtggatatctggttttctcagtatcatttgttggaaagactgttctgttcctatggaatggttttggcactcttgtcaaaactaactggaccatataagtgagagtttatttctgggcttttttctattccattggtctttatgtctgtctttaatgtcagtaccacatggttttgattaccatagcttcatagtaagttttgaaaacatggaatgtgagtcctctggggttgtagtttgtcaggattattttggctattctggatcccttgagattcaatttgaatttgagaatggatttttctgtttctgcagaaaacatggttagggttttgatagagattgcgttgaatctgtagatcactatgggcattgttgacatcttaataataagccttctagtccatgaacatggaatgtttttccatttatttgtatgttctttaatttcttttagcaatcttttgtcttttgtagttttcactgtacagtattttacctccttggttaagttaatttctaggtattttattctttttgatgctattgtaaatggaattgtttccttgatttcatttttggataattcattattagtatgtagaaatgcaatggacttttttgttgatttttgtatcctgaaactttgccgcatttattagctctaacagtttttgtgtgtttgcggggaatctttaaggttttctaaatgtagcatatgttgtcagtatacagagataattttaccttttcctttccaacttgggtgccttttatttatttttaattgctctggctaaatttccaatactatgttaaatagatatggcaaaagtatgtatccttgtcttgtttctatcttaaagcaaaagttctttcagtctttttttttttttgagacagggtgtcattctgtcacccaggcttgagtgcactgccatgatctcagctcaccgcatcctcaacctcctgggctcaaggtatcctcccacctcagcctcccaagtagctgggactaacaggcgtgcactaccacacctggctaatttttttttatttttagtagacatgaggtctactgtgttgcccaggctggttctgaatgtctaggcacaagcgatctgcctgtcttggcctcccaaagtgctaggattacaagtgtgagtcaccatgcttggccagttttcagtcgtttttgttgttgttgttgttgttgttgttgtktgtttgtttgttttttgtttttcttttttgagatggagtctcgctctgtcacccaggctggagtgcagtggcgcgatcttggctcactgcaacctctgcctctcgggttcaagcaattcttcttcttcagcctcctgagtagttgggattacaggcacatgccaccatgcctggctaatttttgtatttttagtagagacagggtttcaccatgttggccaggctagctttcggtcttttaccagtgcatatgatgttggctctgggtttttaatatatggcctttattatgctgagataatttacttctgttactagggttttttaaagttttttttaaatcatgaaagagtgttgaattttgttaaatgctttttctgtatgaattgagatgatcatttggggttttttgtttcattttgttcaggtaatgtgattacattaattgattttcataagttgaattatccttgcattccagtaataaatatcacttggtcatggtgtataattctatcaatatgttcaattcaatttgctattattttcttgagttttgtatcagtatacattcatacagaatattggtctatagttttcttataatatgtttgccttgttttggtatcaagatagtgctggcttcacagaaggagttaggaagtatttcctcctcttcaattttttggaagagtttgagaaggattggtgttctttaaatgtttggtagaatttgccaccaaaatcatctgatctagggctttactttgttgggaagtttttgattactgattcagtctccccactagttataggtttattcagattttctgtttattactgattcagtcttggtaggttttgtgtttttagaagtttatccatttaatctaggtaagtcacatttttgttgtagcgttgaggcattttttttttttttacaaaaaattggtactcatatacataaagtaatatgaacttaaaattcatacatttacttcattttttagcttgacattctagtaaatcttttgctccatttatttttggttatgatagcagaagatctacctggatgatttaagagcatcatttgtcaatgagcacctcttattttctctttattggcagtagtgcttacagctactattaatgctgctttccattttgtcgtttcgggttcaaacatacctctgtaatagccaccactgaaggcagattttggtagactttgaaaaatttgttttgttgttgttgttgttgttgttgtttgttttggggtttttttgttttgttttgttttgttttgttttgttagagacggagtcttgctctgttgcccaggctggagtgcgatagcgcaatctcggctcaccgcaacctctgcctcctgggttcaagtgtttctcctgcctcagactcccaagtagctgggactacaggcgtatgccaccacacccagctaattttttgtatttttagtacagacgagttttactgtgttagccagggtggtctcgatctcctgacctcatgatacgcccaccttggcctcccaaagtgctggaattacaggcatgagccaccacgcctggccgaaaaatttgttttacttgaggttccacatgccttatataagggttgcaaaacataacagcctgcaaatcctgcagcagcaatggtcagtccgactgctaccactgtactggccatggctgggctcccctactgcaccaggagcatggctcatcccagcccagaggttgcggccaacaatgacacacctttaccagagagtgacacaggcaccgatggcaagcacaatacactggattataatttttttaaacaagaggattatttgaaaaacagtctaggtgcggtggctcacgcctgtaatcccagcactttgggaggccaaggcaggcagatcacttgagcccaggaattctagaccagcctgggcatggtggcatgtgcctgtagtcccagctactcaagaggatcacctgagcccagggtaatcgaggctgcagtgagctgtgctcacaccactgcactccagcctgggtgacagagtgagaccctgtctcaaaaaagaaagaaaaacacagtttatgttgttgttgtatatcgagtcttaaatcaatgcttcctctggcagaacaaatcagaagttggttatacagtatcaactggccaagtgtctttattatttacagcatctacattagtttttaaaaccatcacattttcaatatataaatgggcaaaaagatgtttagatgggttagtaaacaatggagaaatattttaatttactagatactaagaggtagaaattaaaatttttaaaattttatgcctatataacaaaaaatagaaaatgttgatagtatgatagatagtgaaattgacactggcatatttacacatttaaaaagccacacgtgggtcgctggggaacccaggctgtcctaggaagccgagtgggagtggcacagagctgctggagatcctgagaacctgagttttggcaagcagccagaatacttaaaaaatgaccacaccaaacaaggcacctcctggtactgaccctgagcagttggaaaagactggaacagtacgggaaattgggtcacaagctgtttggtcactctcatcttgcaaaccaggatttggagtggatcagttacgagatgacaatctagaaacttattggcaatcagatggctcccagcctcatttagtgaacatccaattcagaagaaaaacaacagttaagacattatatatttatgcagactacaaatctgatgaaagctatactccaagcaagatttcagccaaagtaggaaataattttcacaaccttcaagaaattcggcaacttgaattggtggaaccaagtggctggattcatattcccttaactgataatcataggaagccaacttggacgttaatgatacagattgctgttctagccagtcatcaaaatggaaaagacacccacccatatgagacaaattaaaatatacacactggtagaagagagcgccattggtaaatttcctagatgtacaactatagatttcatgatgtattgttcaataaggtgactttaaaatgatatggaagtcattaaacgtatctttgttttatcctgtctttaaatagtatatcagttacctttattgaaaaaaacatcagttatttgcaactttatatatatttaaaaatattttattgtaattttgataaatttgggtcatattatctttaacatgtaataaagctcacatattttacattactaaaaaaaaaaaaaaaaagccatatgtgtggctgggcgtggtggctcacacctgtaaatcctagcactctgggaggccgaggcaggcagatcgcttgagcccaggagttcaagagcagtgtgggcaacatggcaagacctcatctctgccaaacaaaaggggacgtatgttccaattttttgagctaatgattccttttttgagtaaataattcttaaaacaagtgcagtaaacaaaaagatgtgtattttagtgttactaaatagcaaatacatttaaagtaatttgtgtccaaaattggataatgggccaggtgtggtggctcattcctgtaatcccagccctttgggaggccaaggtgagaggatcacttgagctcaggagttcgagaccagcccaggtaacgcagtgagacctcatctctactaaaaattaaaaaatggcgggatgtggtggtacatgcctgtagtcctagctacttgggaggctgaggtggaaggattccttgagcttaggagttcgagaccagcctgggcaacataatatctctgctaaaaattaaaaaatagctggatatggtagggcatgtctgtagtcccagctacttgggaggctgagttgggaggatcacttgaacccaggaggtcgaggctgcagtgagccatgattgtgccagtacacttcagcctgggtgataaacgagaccatgtctcaaaaaaaaaaaaaaaaggttaatggtaagttaagtacaatacatatatttgcttcagccattaaaaattattacaaggcagtgtagaaaatgcttatgatgacatatgaatagaacagaatgcaagcttatgctttgtttacaattaaattattcttgggcataaaaacagatatgtctgaaggaaacatatttttaaaaagtaattttagagccaggcacggtgggtcatgcctgtaatcccagcactatgggaggctgaggcgggcggatcaccagaggtcgggagttcaagaccagcctgaccgacctatggagaaaccctgactctactaaaaatacaaaattagccgggcatggtggcacatgcctgtagtcccggctactcagggggctgaggcaggagaatcgcttgaacctgggaggcggcggttgcggtgagccgagatcgcaccattgcactccagcctgggcaacaagagcaaaaccatctcaaaaaaaaaaaaaaaaaagtaattttaggctggatgcagtggctcatgcctgtaatcccagcactttgggaggccgaggcaggtgaatcacctgaggtcaggagttcaagactagcttgggcaacgtggcaaaactccatctttattaaaaatactaaaattagctgggtattgcggcgcgtacctgtagtctcagttacttgggaggtcgcagtgagccgagattgcatcactgcactctagtctgggtaacagagagagactctgactcaaaaaaaattttttttaattcattgagtttgagctattatgcttatttcttttcttttcttttatttgctgtactttacttttcttttcttttcttttcttttcttttcttttctctctttctttctttccttccttccttccttcctggcttccttctttcctttctttctttctgtctttctttctttctctctctctctctctctctttctttcttttctttctttcagatggagtctcgctctgtcttccaggctggagtgcaacggcgcgatctcagctcactgcagtctccacctcctgggttcaagtgattctcctgcctcagcctcccaagtagctgagataacaggcgtgtgccaccaccacgcctagctaatttttgtatttttagtagagacggggtttcaccatgttggtcaggctggtcttgaactcctgaccttgtgatctgtccacatcagcctcccaaagcgctgggattacaggcatgagccaccatgcccggctcttttttttttctttttcttttttgagacagttttgctcttgtcgctcaggctggagtgcagtggcacaacctcagctcactgcaacctctgcttcccttcccaggtttaagcaattttccttgcctcagcctctcaagtagctgggattacaggcatgtgccaccacgctcagcagatttgtatatttttagtagagatggggtttcaccatgttggctgggctggtacagcctcagttggatataatattgaaagtctgaattagagatctcttttaaccctttctgtaatggacacttaaaatgactctgataattattattgttttctattaataacagtgaagtttaaacaggtgtttagacagaggcaagggtctggatttgtttgaactgctttagatcttatgatactgatttttgctatgtgctaataagtggagggataaagtactcctgcatttgacaatttttataagttgttactttcactggtctttgtgaacagctggacactggtcagttctatgcactctcctctcctgtttttattattctcacatcacagttatttttgtcataattatagggctttttgaagacctgggacatcattttttgcattttctaatttggaaagaaataagtgagcatttgatgatttgaattttcaagaattgcaaaggaataagtgttattcacactgtaagagggtataaataggcacaaagtggtactttgaatataaagcatgttcacagatttagcaataggatttgttatgtggaaagcctgtagtgggaaattttaaaaggaaaggaaagggaaataagaaaggtaccaacatacatttagaacctattatatgctacattttatacatataatttcatttaatcttcataaaagccatatgaaggaaatactgtattagcatttctattttacatgtgagaaaaactaagacctagagagtttaaattattcccataaggtcatctgactagagaataatcaagttgaaataggaacacagaagtgccacatttaaaaaaattacatataaacacacaaatggaaccttttaaccagtacttagctggaacatcgtatagaatatatattataaattaccttactttgtctctttatgcttaggcaggtcatacggatcctgccatatgatgtcagctgtaaccattaggcataaaaatcttgaggtcattcttataaacagattaaaatgtgttgttgcaaaagttgaatggctctagattattttctgaatttggatatgaatcatatagtccttccccaaaaagtttacattaatgtttgtttctccattcatacatttatgtatttatgtatttatttattttttgagacggggtttcgctcttgtctcccaggctggaatgcggtggcgcgatctctgctcactgcaacctccacctcttgggttctcctgcctcagcctcctgagtagctgggattataggcgcctgccaccactcctggctaatttttgtatttttagtagagatagggtttcaccatatttcaccaggctggtctcaaactcctgacctcaggtgatccacctgccttggcctcccaaagtgctgggattacacacatgagccactgcacctagtcccagtcatacatttatttatgcaataactttacttttcaaggaagcaataagcaaatatttactgagtactatgtttcagacacaatattgaagataccagtattaaaaataatttagctcattattccatggagtttacattctagtgtggggaaatggagaataagttcaatcagtgcagtagattgtgttgtgataaagatatatggcatatggtaagatatttcagcagtataatttaagttcaggtgtgcaaatatgtaattttcttaatttttagaactgactttacttttttactctaagcctgtagcttagagaactggggaaggtacttagatggtatatggaatatagtggggtatttttagttgtcagaatgactgaggttgctactggcatttagcaacctgtgcataccaagactgctaaacatcttgctatgcccaggacagtactgtcctatgaagaactggcccacctaaaatgccaagagtgcccctgttgagaagcactgactaacctggctcatggtagacaatttcatcttgatctttttaggcaaaattgactattatccagtaatttcaaattcaggattatttaaactatcccaaacctggctcaaatctcttagattctgcccatctcctctgtgatactaattcttatgacctatgaatctcactacgtcatagtctggcgttgaagagtcatctacttttctagctaactcctgtgctttcctctaatctcattggaaacgtaaaggatctctctatactgttcttcggcctgtgggatattgagaaagatgggtattcttgggttcttctgtgtttactccatttgctgctcccttgcttgcttttttttttttaagatactttgttttttattcaaaaatcattatttgagattattgtcccaaagcctaactcactacttctgaatgttcccaactatattagtttgctacagttagcaaaataccacaaattgggcagcttaagcagaaatttattatctcacagttattagaagtctgaaattaaggtgatagcagggttggttcctcctgggggctgtacggaaaagatctcttccatgtctctctccttggtttgtagatcgacatcttcatgttcatatggtggtgttcttgtatgtatacctgtgtccatatttgcctcttttataagggtatcagtcatgttggattaggagactaccctaatcacttcattttgattacctctgtagagaccctatcttcaaataaggtcacattctaaggtgttaggagttaagacttcagcttaagtatttgtgggggatacagttcaacccataaaagcaactaatttttttaaatttttttctaatttaaaaagtacagaaaaaactaatcaaaataaaataaaaatatcccaatacaacatttaaaaaattatataaagtaaaaggagagaaaagatagccagctgtggtggctcatgcctgtaatcccagcactttgggaggcccaggcgggcagatcacttgaggtcagaagttcgagaccagcctggccaacatggcgaaaccctgtctctactaaaaaaaaaaaaaaaaaaaaaaatcgctgggcatggtggtgcacacctgtaatcccagctgttcaggaggctgaagcaccagaatcgcttgaacctgggaggaagaggttgcagtgagctgaaatggtgccactgcactccagcctgggcgacacagcaagactgtgtctaaaaataaaaaagaaaaaggccctacttccattccaatctcatcctccaacttgactatatttttcttttccatgtcaatcggtacatacagaactatttcattctttttatgggaacgggattccattttatgggtatactgcagtttaattagctgttacactactgatgaacacttgggttgtttacaacttttattataaacaatatggagataattcttgtgtagatctctttgcacatgtggatgttttcagtagtgtaaaattttaaaactgtgtgctgagtcatactgaataaacacttccaattttaaaagatattgtcaaattaacctaccagcgtatattactaccagcagaatctaagagctataccctca

SEQ ID NO: 96234 - DNA, 12649 bp, Homo sapiens
aggttgtgaaaggatgttacctggatgggcaatggatatttctccatcagaaatgcagatcttaaattgaattatgtctctcaaaagcaagtaatggaccaaagacaggaacatgcccttttggtcagccagcttctgtgatttgagttacttcagagtaaccatgtaaaaataaaaagcccctttcaaacatccagcagaaagtagcagtgtttcttgattacattgttcttgggacaaagtgttccttaaattacttagcatgggctaagaaattcatatatttcctaagaaagaagtacagacaagaagcaggcagttagggaggtgagtagtctaagttctagtttttcctttccatctgttacatctactttgaaatttaaggcttaatgatctgattccctaattatattgggtgttcctcacagagagaaaaggtctcctactattgggtttaaccatggccactactaaagtataatctattattgtctacaataaatatttttcaataaccttttcctcaagcaagaaaccatataatgcataccacagtgttcacatctgtcatctcccaggtaccacatctctcggcttacctatactggttgtgtattgtctctctcagaataaaaatgatcatagtgcaagtttccttgtatgtgccagcagtattgcactatgcttttaggggaacttcaaacttgcccatggataaaaggcattaagattttatacctcacaggctaagctagctctgcaccatgcaagaaaactgactcactttccaaatgccttctaaggcacctctgaaataaaggggaaatctcaatccaacaaaaatggatgccgtgtataaaatttatatctgttctttgttcagccaaccagttattgagagtataccatgtctcagccaatgtgcaaatagaacatagaaaaagttatttaatatcacctcatgtctgttagagtggttgttatcaaataacaaaaggtaggtgttggtgaggatgtggagaaaagggaacccatacacgctactggtggaaatgtaaattagtacagccattatagaaaacagtatggaagttccttaaatatgaaaaatgaagctacaggccaggtgcagtggctcacatctgtaatcctagcactttgggaggccgaggtgggcggatcacctagggtcaggagttcgagaccagcctgaccaacatggtgaaaccccgtctctaccaaaaaaatacaaaaaaaattagctgggcatggtggtgggcacctgtaatcccagctactcaggagactgaggcagaagaatcacttgaacttgggagtcggaagttgcagtgagcccagatcgcaccagtgcactccagcctgggtgacaagagcgagactctgtctcaaaaaaaaaaaaaaaaaaaaaaaaacagagctaccatgtgatccagcaatcccactactaggtctatatattcaaaggaaatgaaataggtatgtcaaagagatgtgtacattcccctgtttattgcagtaatactcacattagccaagatgtggaagcaacctaagtgtccatcaatggatgagtgaataaagaaaacgtcctattatgtacacagtgaaatcctactcagcctttaaaaaaagaatgaaatgctgtcatttgcaacaatatggatgagtctggagaccattatggcaagtgaagtaagccaggcacaaaaagacaaatactccatgatctcactcatatatgggatctgaaaaactgatttcatagaagtagaaagtggaatagtggctatcagaggctgggtagggggttgggaggggttggggagatgttggtcaaaggacgcaaaattttacttaagaggaataagttcaacagatctactgtacaacatggtgactacagaaaatgtgatactgcattcttcaaaaatgctaacagaggccaggcgcagtggctcgcacctgtaatgccagcactttgggaggctgaggtgggcggatcacgaggtcaggagatcgagaccatcctggctaacacagtgaaaccctgtctctactaaaaaatacaaaaaattagctgtgcctggtggcaggcacctgtagtcccagctactcgggaggctgaggcaggagaatggcatgaacccaggaggcagagcttgcagtgagccaagatcacatcactgcactccagcctgggagacagagtgagactccatctcaaaaaaaaaaaaaaaaagaaaaagaaaaagaaaaagaaaaatgctaacagaatggatgtaaagtgttctcataacaaaaattataattacatgaggtaacacattggctacttagccaaatttagtcattctacaacatatacattaaaatatccagttatattcagtaaatacatataatgttgtctgtcaatataaaaaaattaaaataaaaaagaaatcatttagatcctaatggaagagtcagtctacataaccaaatacaggaatcaaagaggaaaaaagtgactagagttataaaatatgtttggtgtgctaagggaaaggtaaatagggcatctttaagtgcaataaagatgggcaaatgaagataatagagagtgcctcaggaattaagcatgtgatctctgaagtcagacaacctaggtatgaatcacagcttattatttattatgaacaaacagcgaacaactacggacaaattacttaacccctccaaactacaatttaccctatcttaaagtctaggctaataagggttcttaaaacacatgattgttattaaataatctgcgtgaagcaaggtgcacgcacatcctaagtgcccaataaatattagctctttgttactaatattagaagcttttttcctggcaatagtggaccatatatgctcctggtaatgagctacaaccctttgcaagaaagcaaatttctgaaagacttggctctcttaaaggtctcagggtcaagtacattcagctcatgttcattagctaataacattcaaaaggtaaatcaagaggatattaaaaaataaggccatgcagggtggcttatgcctgtaatcctagcactctgggaagccaaggcggtgggtcacttgagcccatgagtttgagaccagcctgggcaacatggcaaaaccccgtctctacaaaaaatacaaaaattagcaaggaatggtggcaggcgcctatactcctagctactcaggaggctgaggtgggaggatcacctgagcccaacaggtcgaggctgaggttagcagtgattgtgccactgcactccagtctgggtgacagagtgagaccttgtctcaaaaaataaataaataaaaataacaataataataacagtaataggatatcaaaaatgtgccctttcataattataaatgagtttttatgtcagaattaacaattaacgattttatatcagaaataataattagtataatctaaatactttagataagtcttattaaaaagactttatttctgagaactttacatatgaagggccttcaaacatttagtgttcacagaattattctcaggatctccatcaaacgaataaaactagccttaaactttaggctgaaataaaaattcaccttggtaagcactttgattatcaaaatatattgctttcaagtaacatttctactaagtttgggaaattaatttaaactccatgtgttcttatgtaattaatgctagatgtgaaagtatcttactttattttaatgtcagatatccaaaatgtccaatttatagtaacatttaatgttatttcatgccataactcaacataattaattaactggttgttaaatatcattataaaacactgtaagaatcactaccaatatatatgtaagataataatatatttcatcagcaatataaaataattgtcttggtaattaaggaagctcatttagttctagtaatagtttattcaaacatataattatactgtatagctaacaagtacgccttttaatcaaatatataattattaaaatattcttgagggatataattggcatattataaatatatttctatcatgactacttaaacctcaataaatgtacctttaaaaaggccttgatttaattagcatacagtaactctctccttgaaatgaaattaagtccttaagaaaaacaactaatatgaagcataatcttatattactcaaattactaaaccttgccaagcaaaaataataataaaaacccttcgagagctcatttaccaaaaatacaaagatcacgtctccaagcaataattctcagcctgattgcccagcaggaccatgtagggagcttttatgaaatctattagcccagaccccatctacagagattctgattaggttggttgggaggtgggcccaggtatctgttggttttgctttttagaaagtccataaaccaccacaccagagactgataaaacgtatttctcccagcccataaatgtttattgtagcttcattcataatcaccaaatatttgaaacaacccaaaggaataaataaaactgtgatacggatataatgctacgcaagcaatgatctattgatttatgcaacaacatggatgaatcttaaatgcattctgctcagtgaaagaagccagacccaaaaggctacatattgcggcagtgtgagggaaattctgaagtgaaggaactgctacatgtaattgtagtaatgaatacataactatgcatctgtcaagactcatacaacagtacaacacaaagagtggattttactctatataaatttttttaaatcgaccaagaagtaggggagggagggagatgcaatgcagagtgtgacaaatgaaataactgtcttacaaatgtatcacataactatattgaaggagacagggatggagctgtccttagtaattttggtaaacagtcttttggctggatattgtaagagtaaagacagcctgtatcaacagtattttcttgttctgaatgaaaaagaagtcattatttattacaaatatttagcttactgtttatcaattgtgtgtctttaataatgaacaacactaaacaatcttaaaatctgaaaggttttgtaaaaactttttactggtgttattttcgtcactatgtgccttttttttttttctttttggaaagaagctgggcaggatgagcatgtaaaggcttcttcaaagtgtgaaagtggacagatactgcctccaggatccagaacaacagtcatttacaaagctagagacagaatgcactgaaaatacagcaattttacaggtagttccagcaggggataatttatctaatcaaacagctgatctcctacatattctactgtattcagtcttttcatgttaataaaatttgaatatgcaaagatcgtatcaattcttttttggggggtggggggcatggactttccctccttgttgcccaggctggagtgcagtggcacgatcttggctcactgcaacctccgcctcctgggttcaagtgattctcctgtctcagcctcccgagtagctggggccacaggcacccgccaccacgcctgactaatttttgtatttttagtagagacggggtttcaccatgttggccaggctggtctcaaactcctgacctcaggtgatccccctgcctcggcctcccaaagtgctgggattataggcgtgagccaccgcacccagcctgattctttaatatgttacaaatctcaaaataaaaatctcagaaatctaggtatgtgtgtgtgctttttatttataaaacagaatctgagaggattaaaaagacttaaaaacaacaacaacgataacaaaacacaacttctcctgcataactgtcagtgccagaatttcagggtcaaacatttgatctgaaatttggtatccagttcgctcctaaactgagtctccaattgtccacttaaaatctttatccactgagcttttgcgggtggcggcgagcgcggagaggacgccatgaaggcctcgggcacactaagagagtacaaagtagtgggtcgccgcctgcccactcccaaatgccacacaccgcccctctaccgcatgcgaatctttgcacctaatcgtgtcgtcgccaagtcccgcttctggtacttcgtatctcagttaaagaaaatgaagaagtcttcaggggagactgtctactgtggtcaggtgtttgagaagtccccgctgcgggtgaagaacttcgggatctggctgcgctgtgactcccggagcggcacccacaacatgtaccgggaataccgggacctgaccaccgcgggcgctgtcacccagtgctaccgagacatgggcgcccggcaccgcgcccgggcccactccattcagatcatgatggtggaagagatcgcggccagcaagtgacgccggcaggctrtcaagcagttccacgactgcaagatcaagttcccgctgccccaccgggtcctgcgccttcagcacaagccacgattcaccaccaagaggcccaacaccttyttctaggtgcagggccctcgcccgggtgcgccccaaataaactcaggaacgccccggtggaaaaaaaaaaaaatctttatccactgacgcataacttggaggaccatggtgagaattagtgaggcctgaccttggtacacagtgactcaatttcaggctttgaatcagttagtcctatcagaatgctacaagtcagagtatcctggcaagaaatttactattggccataataatgaataacggccctaattaaagcctaaggtggatcagatgagaagcgggtcacaaacctaaagagatgatctatataatctacttgttcttggacatccatcacttcaggagaaaatttttgtgtctcagttatcagtgccatcaagagcaatgattattttccatattgtaatcagagtaatcctaacaaagcacaaatataatcatctttacctttcccctttaacagcttattgggtttttttttgttttgttttgttttgttttatatcacggcctcctttattctgccctttgcagacactagtcatattcctttgagccttggcacaagcttttttttctgcctgttggctcttaaatcccaacatcactagcaaactcctaaatactcctgttgcttccaggaagcctgacctccagatagcttggtgcgcagtagaatacctccccattataggatctctgtacaaggtttttctcctaatcctttacattttctccattcattccccttgctattcctagaacctgctagtcaaggtcctgccctagggtctttggactggctgttttcctggcctggaatactcctccccatggctaacttccctacctccttcaaatctttgcttaaatgtcactttctcactgacctgactacccaattttaaatcacatctgaacccctacccacccccatcatgcaccctcctgatttcccttactctggtctttctcccaccataatacttaggtcacctttgaacacataatatactttcctatttatcaattgtattgtttattatattgtatttattgttcaatttcataatttagagccccctagaatgcgaccttaatggtgcaagatttttttttttgtctgtcttggtcactgttgtatctcaaaagcctagaataaaaagaatatctctgaaatgaatgagttgcttaaggacctatatacaagacattcaagaagaaagagagaaagctcacacttccaagacctgaacaatatctgtgagttaaaatgtgaatgcacaaaagatctatgaaaaaaaaaaatagctgctgtaaatttaaggtagcaaattagaaggtgtcatcaactaagctcagcagaaaaagcaaatcctacagctacatcgaccaattatgagcctctaatcgctgccaggacctcaaacacattatcccagttaattctcacacaacacataacaactgcaggatgaggttctcacacccatttcacagatgagcaacctaagattagcctggaagctacaggagtgcacagaccctacctgttcccatcttgccatcataccaccagcatccagcgatatgctggcgggcagtaggtgtagaatatatagaagctgcataaaattaaaaaatatatatgctcagagaggttaacaaacttgaccaagaccacttatccagtaaatagcaaaatacaggatttgaactcagatcattttatttaaaaaccaatgctcttcccaccacaccatatttcttctaactaaagttataaaacacatacggacctacaaaaatgcaacagtcaggccaacgatctaccacagtcattcctcagggcctcttaacagagaaaaatataaattgatattcctaattagtgtcacctcaataatcaagcagcaatcatgtttcatttgatctctttaatattgagacaggcaaagtacattctagagacaattacaacaaaatagataagtttaaagtttagcaccaaatgtttagccttcagacaattcaaaagtcattttcacagaaatagtacacagacattacagtatgagtaaattcctgcttctacttagctgctcacttgggcaatgccctttggagcactggcccttgaaatgctaattcactggctgaactactgttcacctgctctttagccttaacaggtctgtggcttcacattgggtagccacagcagtccctaagagaaaaaaggagctccagcaaccaagctatttaattgcgaaaaccgcaattacctttgcaccaacctaataacctaataacttgactccagaggatggatgaaaccaggagaagagagggggagcctctctccccacccttgggctaggagacacctaaggtctgtaaacctggcattgttagaacctacaaggagaaccaaaggatttaaatgaataattcatcatcccaaattcacattcactagaagtatctatgtaattgtggttaaagtacttcaaatgtgtccttctgcttcatattttagtgtaagatactaggtaatagaatccattctctaattcactttacacaaacagaatcagcccaaatgtttgctgccaattcttacatttcctattgttaagcacagaaatagctggaaactgctggtattgagaaattttattcatttcagttctacaaatttctagaggccctacacagagattgaaagcctatagtcgcagacgagatccatcccaaagatgtacttcctttagcctcaatattattgtaaaacctaggggatggttcacatataaacctagactttaagctgcactaggaaaatcaaaggatccggagcatgcactcccaaataggaagaagagaatgggtggtggcttccctcatgagatacaacacaaactttcgaaacagttgaactggcctacctcaataatgaatgttactctcctggtcactggctgtatggaaggcccagtattggaatgtagggggttgggggtgaggcagaatctgagatgaataaataaacttgtatgagaattgaaaattttaggctgggcactctgggaggctaaggggagcaaatagcttaagcccaagagttcaagaccagcctagacaacgtggcaaaaccccttgtctacaaaataatacaaaaaattaaccaggcatggtggcatgtgcctgtaatcccagctactggggaggctgatgtccttgagcccagaaggcaggggttgcacctgtaccccatcctgggtgacagagtgtgtcactgtctcaaaaaagaattaaagaaagaaaagttagacaaatacatctaaaagtaacatatgaaaactatgatacctctaggagagacacaaaaaccgtatcaatgtgcattaggtgtgttggggggagaagcagggatggaagagaaatacacaaagtgtatcctccccaacctacgtctcatcctctctggctgtcccttctatgactcatcaagcacttataaagtcaactcatcatgacatcctgcaaattccacctcttgaataagttttgtatagggtcctttggtatcccatattcaaaaatacagttcagatcctcaagaccctcattctatttgacttcacagcagtctcctaactggtcttccaccctccaacgcatcctccacatagctgccagtgacctattgaaaattcaagtcaggccacaacacttcccagtttaaaactttcactgggttccctagtaatttgtaatactcagcctcacttgagaataaactgaggggcattttttaaattagctatgcttgatcctcaccttcacatgtttttattaaattagttggtgtggggcctacatgtctacattctattccaagtgattctgatgttttatcaagttgagaatcaccgttttaccggacaagttccaagatcattagctttgccttaatgccctccacaatttctctgtctccggcacacctatgaacattccctgtaaattccaataaggaacccgctcctggtagcatcctgtgcatatatctacctcctgccctgaattccctttattataattatctttaccactagtctgacagcagtgacttgggtctatcttccttgtaactcaaatgcctgcaacatagtgagcactaaataagagtggatgaagacagcagaaaaagatggacctggaagaggaggtgagacctgaaaggcaaagctgtgaagtaagaaagggagaaggggagaatgcttgtaaagctggaaaatcagaaagcactttttgggctagcaaaatgttggtgatcataatttgtcaaagctttcttcaggctagaaaaagcaatctagtggcctgagtaaatacaccaaagggatttaagccaattattccctgcccagtaggggtgtcagattcatttgttaaactacaagctctctagagaaactagatctcagaacgcaagtaactgttttattataattatcataatacccctcgtttccctctcactccaaatcacaacaattgaaatgaaaaagaagtatgtgttgttcagttgctaaatagtctttttataaccttttctgatgtagtttggattatttcagaaatagtagttctccacagtggtttctgctgcttacatcaaatgagtcatgctgtggggctctcactctttcccctgagagtttacaccatagttgaatagacttaactattagtcattttccttcatattaagccaagagttttgtttaatctaattagtccgccttctctatacaattctaaacaacctcagtccttacaagaatataggtatgcccttcctacatctgcagaaacgtgtgcctcctatttactgccaggacaagctgaccatagttcgttcttaaattttcccacgtgagccagggattccaattctgaaccttctcattcccacctcccacaaaagcgtttcagtttgctggcacgatggagcgtagtgttatttccgagcgtttgctgctggatcaatggtgttttctcattagttttattttgcttttgatttataagcaccaaaatggtacagagtatatctacaccagaagcatctataatgtgatcaaattcaccatgacttttgtgcttttatttgcctttatgaaaccaatctcaggcttcgagacccatgattacaaactgtttcttcacagaccccttacaactttccaagcaaatgtaatactttccagcacttttttcctcttttttaagatgttcatagctccaaatgtcaggcacaccgtgcaatgaaaactatccctcagctgataaattattcatttttcaggagtttgcaatttgaaatggcactaacagctgaatacctgaagcacccccaaaagacatgaagagcaataacatgcaaagctttttctgcatacattttaaaggttaagcgccattagacatctatgtttatcaagagatgtgctccttgaacatatttcttctaattaatctgctcccaataaacattactaacaaagcaaagtgataaaggaggctaatcaaactaatctcttccctttaactaacttcatcaggttaaacaaggtcctttgctgatattctccactttctcctgtctgatgaggagttgcaggtgagtaaggtcaaaagcaggagtgatcaaactaggactcttgaacaatctggcccactgcacgtatttttaaataaagttttattggaatactgttttacccatttattttgtattggctgtggctactttcttgttacagtggcagagttgaatagctgtgatagagacccacaaagccaacaatatttaccatatagctctttacagaaaacatttgctgacctctggtcaaaaggcatgcaaaatgtataaggcttttaaaatgttagcgccaagtagggctttagctaatgtatatcaatgtgttcatttactctaaaaaaaagaaaaagaaaaaaaaaaaaccttgcatttaaaagtgtgttatctagaataccatctgtgtta

SEQ ID NO: 96235 - DNA, 42548 bp, Homo sapiens
ggccgcgcacacctggctaatttttgtactgttagtagagacagggtttcatcatgttggtcaggctggtctcaaactcctgaccttgtgatcctcccgcctcagcctcccaaagtgctgggattacaggcgtaagccactgcacctggctatttttttttttttttttttttgagacaggtctcactctggagtgcatggctcactgcagccttgacctcctgggctcaagcaatccttccacctcagcatctttagtagctgtgaccacaggcacacatcaacacacacccggctaatttttcattttttgtagagatgaggttgttgcccaggctggtctcaaactcctgagctcaggcaatcctactgccttggactcccaaagtgctgggattatgggtgtgcactaccacgcccagccaaggcttagacattttagaatgaggcgatcctgatttcagttctaccagagtcatgaccccactatgctgctgatgaagactggggacaaaggtgttgaatggtacaggaaacaggagtcttaccagggtcatgctgagtgtacggcccatgacagcatggaacaggtcgtgtgcagctgggccagacacaacaaaaaattcacagatgaaaaggtattcgcggcaggaattgtctaggagggcgtagtgctggctgcggaagagggcctcaaatggatactgggagaggaggagtaaagaagaaaaacagaagggatggaccccaacactgacttcccatggatatggctggaaaatcagtaaacctgagtaataagagctaggcagacccttcgcatctatctaggtccgggctgtctaagagcaagctgaatgggcactgaaaaggtgggggaacataggggtacaaaaagggcctacacccacctgctgttgctactcctgcatccacctcaacacctgcctctgactgtcattcccctcatccagtctctcccctctgcatgcccttaagtcaatggttcccagctcttttcacatcacagcaggctggagtgattggagaaggccactcccaagtctaaggggattaagacagggcctgcaggttgggaagctctgccctgaggtctggccttccctccccaccgtgctcagagcctctttcgtgactgaagcttgttcctcctcataccctctgctctccgcgctgcgctgtgtgaggcaccaggatgggggcctcaagttcagtgggggagatgacagagccgcgggttcctagggtgaaaatggtgttcctgctgcggagcgatggctttgagaagaatcgtaagatgggtcagagtcagggaaaacaatgagaccataactgggcccaaagactcactatctgtggggaccccagacaggcagacgtggcctagccagccctctttcccagtactagggccccacgtgctgacatctgtgaatgggcttcagggtgtctctccctcccttgcaatcatatgcaaaactatgtgtcaaaataatgtgtgcatctttctggggagggaggctatagctttcatcacattctaaaaggtttcagtcccataggaaaaggtaaggagcagtgcattggtggctggagtcgaaagtcctcccactctcaaggcctggcatgagggttccccagtactaggatatctttctttgctgtatcttccacacccattagatcatctttctcagcgacttcctcatactaaggaaagagaaaagagaactgataaccgtctcttcccacaacacaataaaatattccttgcccagggatgtcccctcctcccagtccatgtgcccaggaatacctctccctcctgaccttacctgcaccttcatgagccgccccaggtaagagcggtagtaagacaggtaaatcttgctcagcgtctccacatattcatccctgatctcctttgctgttgctcgttcattgcccagcagaaactgatagaagaacctagggggtcaggaacatgtcagtctacctgtctcccaagaaaccagatgcccacactaggccgctcaaaaactcaaaggccatcccatgcacttccttggggttgtgacctgtacttcagcagggccgtctgggggatctgatagttggtcatgggtttcctgaaggaataaatcttctggaggataaactctcggatcttcgtcactgcctagatgtggggaaccaaacacagggcatgaagctgcaacccttttgctgtatgagaggaactgggggaagcaacaaatggtaaacataggcagaagggtggtgaatatctctttggtatttctcaagattttcagggaaacccagagagacaagaatggggctgcccagaaaaggcagggtgaagtccctggagacaggctacagtgagctctgccaaggaaatccatagtgaagatcttgggaaggctgcttccagtagcctccagggtatccatccctacttcccaccttgacccggagccgatcgagcacgcctctgacatctgcgcaggctgctgtgcctctagcttcctgctctctgactgcggctgccttggcatccagctcctgtagctgctccaagaacctgggctctgtcactggagcctccagaattgccctggttagcagggaggggtgggatgagttacaagggagacccagacatccctaaaccagacccagaccacactccttacctccagcccctgtcatctctaccaccttgcattgtaccatatagtcaggacacatgtacaaagttttctattcctggacctccccactatacacctgatcttacatcattcttaatcttaatctttgatgcctaatgcatacctaaagaaatggtggttaacctggctactaatttctaaaaagcacttaacctggagccaggagacccatatggtaaatagggtgggtcaccccagcccatccacctgctatggacattataacccttcaaactggtaactcacgtgaccagagcagaaggcaccaccagaccatcaacaagctccccaagtttcccccgaactgcctggcgatttcgaagtcgaatgttcatggctcctgactgttcctgcagtgtccggatctcagagctgatggagctgaggtcactctgaaaagctcccaacatctgctccattcgctgtagggagggtagatgttgccggagtgctatagggtttgtaggggataagtgggccaccaaagactctttgtgaagtcttcagtatttatcagtccttgagggtggcagatgatgagacaccccagattatcaggaaataacattaaatatggcagtaataacaaaaaaggctcctgaagtcatcttgaaaatgaccctaacctgtccccatcttgaggctgatgacctaaaaatggcaccagagtccatgatctggttcagagtagctattaggggtcacaggtcatgattactaacctccaggacagcatcacaggctgtgatctggttgtgtagagatgctatattctcactctcttgaatatctgatccacaaaaagtcaaggggcctcatggtgaagatgggagatcctcagatttgtagtacctctccaatttctctttgaagtgatagaaacctcagagatgttgaccccagctgggacatctgtaccacacgccacaaaatccccatgtcaatagcaccaccccttccctctgctggaggatacaatcccgaatggatttctgttcaatctgctgtagctccagctcaacttgctttgaatagtgacggagatctacaccctgggagaacataaagatgacaggtcagaaggaagtctcagtaaagggacactgtaacagaatcagtgaaggactaaagggtcagataccaggctgatacaacaaaagcaagagactgttgtttttccttttggggtagaatagatagaagggcagattagtacaggggaaagcctcaccgttttaagagcttcctttactaactcatcctccagatttgcctgaatgtgaactggaaatagaagtttatcataagggtccagctccacagctccctctccccacattgagtatctgcacaccaatccctaccttattccttccagcccccatgcctctcagattacaggtactgcacccaccccatgccatcgcttaccatccacttcatccaggatgaattcatcagaagtgatatccaactccccaagttgcagtggttcctggagcccaggaccacccgcctggaaagggataagttaatgggagtagggtacggtgaaagacagaaagaaaaaatataattggatatccccagtccttcaagtgagaaggagctgcttttactgggagccacaggtactgctttgaaaaattctaagagtctcacgttgtacccactctcctattttgtgctgatgggtaaggaatacgacaaggagtgagacgatccagtgagacagtggaggtagcccagcatggtggtgggctccttgtagtcccaactacttagaagctgagacgggaagattgtttgaggagatcaggagttcaaggtcaacctgggtaacacagggaaacccgtctaaagaaaacaaaaaaaggtaaaagacaagacagtgcagtggaggccggacgcagtggctcacgcctgtaatcccagcactttgggaggccgaggtgggaagatcacgaggtcaggagatcgagaccatcctggctaacacagtgaaaccccgtctctactaaaaaatacaaaaaattagccgggcgcggtggcgggcgcctgtagtcccagctacttgggaggttgaggcaggagaatggcgtgaacccggaaggtggagcttgcagtgagccaagatcgcgccactgcactccagcctgggcgacagagcaagactccgtctcaaaaaaaaaagtgcagtggagatgaccgaatgaggaaagctaggaattgcagaggatagagcagaacttgcacttaaatttaagaccctcagactcctgccatcttgggtgttctatcacacctctggggaaccccaggctttctagaaatgtcaaaacacatagtgtttacctgcatgccaggtgcaatcttacacatattcatctaatcctaacgacgatgtatacaataggttctatcttcctcaccttaaaggtgtgagaaatgatggcacagagaagctggttaacttgcccaagggcacacagcgtgtaagtggcagagatagaactcaggcagtctggcttcagaggccatgttcttaacctttacactatactacttcgtgactctaccccaaaatgtggagtgaagttgaaattttgtgccccagaacatgagtttcagccactagggtcccgctcagggtcgggtctgatcacagggaagggtacggggagccaaacaggtaatatcacgggtagcagccaagttcccacccttgtgcctaaacccagctcaggtctttctgaagctaggagcaccggaactacggaggagaaacagctccgcgctctcaccagcgggccctcttcctcctccatatctgaggtcccagcccgcaacaccagttcccgggccgcagccgccatggtcgcagcggcggccattccccgcagcctcacttccggcaactgtcagtcccggcgagtccgttccccggagtggagctacaagtcccaaagggtcttcctcagcgcgaaatcgttcccagatatttgagttaagttgtttgactccagctgtcccctttcagctctaaccacttcacccaactgcaaatggaaatatggaagtctgaaacacaaactagccccggaaccttcgctgttctcttacctatgaaccttacgaactgtaaagaaaggcgcaccggaagttgtggtacccaagccatactctcataaatccagccaggtcgcgctgaaacagtttccggaagcacttctcctagatcgcaccgcctcttcctcctggaagctatataatgatatcgcgtcacttccgctctctcttccacaggaggyctacacgccgccgcttgtgctgcagccatggtaagrctggaatccgtgccgtgatccagcggcatcgcagctcgggcaaggaaagccggytgtcagggttctggaaacgtcctgycctgagggcctgcgactttctgtatggagccttggatcgcgtccctggaaagggacaccaaagatttccaattccggagagcgggcccgaggaagggtcactgctcgggcgcacgaaagctgtctaaggcttgggcgtatatggggaactctggcttttgccacgcacttttgggaatgggcaggagacctgcttcctctctccagaggttgcattttcccaagcttgaacgcttcatgtgcctactctgcaggactgaggagtttgctctgtggtgtgaaaacctaaggaatggggggcgggtgtcttgccacttgtgtgacaggcttaacctttttgtatgaagttcgtttgccttatcggccttactgtttgatagtttactgtgtctgatttcttcccccgtactttttcaactagtctctagtgatccctgaaaagttccagcatattttgcgagtactcaacaccaacatcgatgggcggcggaaaatagcctttgccatcactgccattaaggtragtgaagtagggtaaggaatagggaatgtaaatgagaattgggttgtgaagacataagcaaaaatgaagcaaggytggggagacttgagtctcatccagatcaccttgactgctggattaagaaaagaaagtrgtttagggagagactgacccctttagcatttaccacagaaaataagtgattaaagccaakatagtggtctaaggtcaagccaaaacatttcacctggggaagtggggaggaggtatggttgctcacccgaattcgctaagattttcctgaaccacgagcttgtgagatttcttctagattcggtttctttacccatcccaccatcataacagcaacccttcctgcgaaatttatattccctgagaattggaggattattgggcatcttgagggataagtagaaataccaacagataaaaagtgtgaagaagcctgtagatggagggtggaagaagtctgagtgggacatttactcagatgagccataattgacactcctttcctgtcgaagtgtgaaggagtacatccatctttctttggcttttaagaatcgaatmaatgaatgcaagaatattatttcacttgagtatttctctccacaaacctaatgaattcytggctttstagatacataacgttctttttttttyccttaagtcagaatgtgtagttagttgtggaaatagcctaccagtatgtgtccatgcgtgcagggctaggcctgtcttcttggcttctgttgcatggtaggtacttaggcgacgttagggaatggatagtagtagggatactgttggctctgttgaggaatttgtagagggaaattccttctgttgggtgctctgtgaaactaataaggcagtgtgaaatactgtacttatttcagagaccggctgtgaggcttaagtagaggtgcagcattcataagtgtaatagagaataaccttcatggatgtatctaactaaaaattagaaatcttatttcatctatatctcttcccacacccattttgaagtaaatcttttcacttgtaaacatataattaaatttgaggcttagtgcagtggctcactcggaggctgaagtgggcggatcccctgaggtcaggagttcgagaccagcctggtcaacatggtgaaacctcgtcatttaattaataaaaaatttgaaagaccctgctctcttctgaatcaacctaataatttgacccttggtcatgtttatttatttatcccgagacagagtctcaccccgtcacccaggccggagtgcaatggtgcaatcttatctcactgcaacctcagcctcccaagtagctgagattacaggcacacgcccagctaatttttgtatttttagaagagatggggtttcaccatgttggtcaaactggtcttaaacttctgacctcaggtgatccacccacctcagcctcccaaagtgctgggattataggcgtgagccactgcacccagccacatttattttttgagactgtcgcccaggctggagtggcggaatcactcttcactgcagcctcgacctccagggctcaagtcaatcctcctacctcaactttccaagtagttggggctacaggtgtgcaccaccacatctggctaatctggatcttgctgtgttgtccaggctggtcttgaactcctgggctcagtgatcctccagcctcagcctcctaaagtgctgggattacaggcatataggcatgagccacggtgaagccaacccttgatctctttcttgcagataggaactgccatttgttttagtttcctggagcctactgtaacaagttcatataaactaagcagaaaattactcttggcgctggaggcacttaagaatcctaccttgcctcttcctgtcttctggtggttgtcagtaatccttagtgttccttggcttgtagctgcattactccaatctgttgctgtcatctcatggtcctcttcgtgtstctctcatgatttgtcattggatctagagcccaccctaatcaaatataacgtcattttacctaattatttccgtaacgaccttatttccaaatagggccacattctgatgttctagttggacaaaatgaggggcagggctcagtattcagttcctccttcactctccaaatcactttggttcatgagttcagatggcatgggtgctagtgctggtgttgatgtgatgctaccaatgtaagcattagtttctttttataataacttgggcagtcagttctgggcactgacaaaattgagtttgtgatcttggaatactttgattatggggatamagtgatttgcctaaataattgtgacccttagagattctgaggaactgacagcccaataccttaatcaaagcctgtaactcataagaccctggtttactgcatcagcttggagtggcaggccccttgttctcctaaatgcaagaatcagaaggcacttagtgacaactacatatgctgagcaatgggggaaaaaaaagatactgcctgctttcaaagggttgtctgtaatactaaattctgtgttcatgattcagtcatacccctgaacaaagttacttttttctttttttgagacggggtctcactgtcgcccaggttagagtgtggttgcgtgatcttggcttgctgcaacctccacctcctaggttcaagctattctgctgcagcctcccaagtagctgggattacaggcacctgccaccatgctcagcaacttttcttgtatttttagtagagacagggtttcaccatgttggccaggctggttttgaactcctgccctcaatgtcatctgcccacttgggcctcccaaagtgctgggattacaggcgtgagccactgcgaccggcccaaagttaaccttctgtcgaacggtttatatctggaaaggtgggtgaggaaagggtgacctaggggattgcaaaatagattattgcagatcctacctttgtgagctttttgaatgaggctataaaggaatttaaaaatcagattcaacactaattccgaaacccctcacttcattcagggtgtgggccgaagatatgctcatgtggtgttgaggaaagcagacattgacctcaccaagagggcgggagaactcactgaggatgaggtgaggacaaggaagggggctgggggtggggtcagcctcagaaaggggtccatctagatctgaccttggtctgcctgccaggtggaacgtgtgatcaccattatgcagaatccacgccagtacaagatcccagactggttcttgaacagacagaaggatgtaaaggatggaaaatacagccaggtgtgtactgaaatgagggcaggattagaggaagggtggagggtcctaacagaattgggcataggaggtcaggggataaaacatcccttgccccctcctctgaatccaggtcctagccaatggtctggacaacaagctccgtgaagacctggagcgactgaagaagattcgggcccatagagggctgcgtcacttctgggggtgagtggggggtctcatctccctgcctacctcgactcagcattcctcctactcgctcttctttttccccaaccttttgtttctgctgtgcatgacctgtgactcttctctttttacctgcagccttcgtgtccgaggccagcacaccaagaccactggccgccgtggccgcaccgtgggtgtgtccaagaagaaataagtctgtaggccttgtctgttaataaatagtttatatacctatggcttcctgtcctttctgtccattctaatagggartgttaaagtgctgggtcctttttccatttagagctgccctactcagttgcccacacagtgctattagttttagcagtggtgatgctgcagaccccccagtctccctatatgtagctagtgatgtccctctctgtaaagagaaatgtgagggtaaaacagttcagccttgaggggctgacccagaccagtttagagaccaacaccctggggttggtgtgcagcatcattgtggagtgggttagctgagcctagccagttgcagttaaggtgagtttgcaggtcttggtcactctgggtttttttgtttttgtttttgttttyttttaaggggtcatctagtcataagggaaaatccttcgggctgtgaccgaagcaacaaaggcaaaaacgcggacsttggttatgaagggtgtggtctccctggtggagtacgtcggtgggttgggatggggagcggctggacagaccggtctcactccgtttggtgccactccacccgcccgggtttccgcgccctgccgcgctgctccgacgccgcttccggcggggatgggagcgcgcaacgcggaagcgggcggcagaccggccgccggggcgaggcgggggaggggccgtgagtgccgcagtcggccagccatggagcggagcttgctggcggcgaggccgcggcgacaaggtagccacccccgcagcatgcctcgaccgcggtccgcagctgcaccgcctctccccgccccccagggtgcgctggtcccggtcgcgcgctcagacctccgcatcccgggcgtggtcggttaagtccccggccgtgacccaggcccggggagctagtctccgcccttcgctcttacggatcccctcggagtacgccgcaccatgcagctcaggctcttccggcgcctccttctcgccgctttgctgctggtgatcgtctggaccctcttcgggccttcggggttgggggaggagctgctgagcctctcactagcctccctgctcccagcccccgcctcaccggggccgcccctggccstkccccgcctcttgatccccaaccaggaagcttgcagtggtcccggggcccctcccttcctgctcatcctggtgtgcacggctccggagaacctgaaccagagaaacgccattcgggcttcgtggggcgggctgcgcgaggcccgggggctcagggtacagacgctattcttgctgggagagccgaacgcacagcaccccgtgtggggttcccaggggagtgacctggcctcggagtcagcagcccagggggatatcttgcaggccgccttccaggactcctaccgcaacctcaccctaaagaccctcagcgggctgaactgggctgagaaacactgccccatggcccgatacgtcctcaagacggacgatgatgtgtatgtcaacgtccctgaactggtatcagagctggtcttgcgagggggccgttgggggcaatgggagagaagcacggaaccccagagagaggctgagcaggaaggaggccaggttttgcacagcgaggaagtgcctctwctgtacttgggccgggtgcactggcgcgtgaacccctctcggacaccgsggggcaggcaccgcgtatcagaggagcagtggcctcacacctggggcccctttccaccctatgcctcaggcacggggtatgtgctgtcagcgtctgctgtgcagctcattctcaaggtggccagccgggcaccccttctcccattagaggatgtctttgtgggggtaagtgcccgacgaggaggcctcgccccaacacagtgtgtcaagctggctggtgccacccactacccgctagaccggtgctgctatgggaaattcctgctgacgtcccayaggctggacccctggaagatgcaggaagcctggaagctggtgggtggctctgayggggaaaggactgcgcccttttgctcctggttccagggagtcctgggcatcctgcggtgtcgagcaatagcctggcttcagagctgagagtgcctggggccacaggaaaggcaggaacaggaccttctctctcccaggcccaacgcaggggccctcactggctgcagctgatctgtttccttataccagatcctcagtctcactaaagacagcratatgggagacacccargggcctggcccgccagcccaaaagatggtcatcgggaagaraaaaagaaaaaaatgctgcagttgttctctcaagctagggcagaagaggggtgtcaagctcctcaataaacttgtctccacttcttcgagtgcagtgtggtcttcaccaggacccccagaacaccacaaacctggagagcccagaggctgccagaccctgctgcatgggaaggacatctccagggacatgggagagaggacagcctctctgaggaggaaggcccctaaaaggcaaagctaaggccacagcagccacaaggtatggggtgggggtagaggcaggacactgacccctccgatcctagaatggcctcatgcttggcaagggggaggggaacaggtccacaagatgatccagacacattatccaaaaaatcgctttcctctttaataccaacccaccccaggagacagctgtccacccccagttggggaaggggccacactgcccccacctccttgttccagggaacactcatttccctacaggtgatcttggggagagactgttcccaggcaaccctggagtctggctcagcgcacaaatctgtccagggcagatggccgggcccccgtgggcttggccttygcctccttatgatgctgctgctgaaggctctgccggaccttgtcctggggaccggagacggggaggacacaggcacagagtgagaagtggcaggctgacaagggcagaggcacaagcaggagggtgcagcctgtggaaggcccggcccatgccaatgctcatttaccctgtgttcctcatccatgaccttcctcttcctcttcaccaggcttgccgtggagctgcggcccttctgctttggctttggctggaagggagccttagcctgcgggtcatagccctgagggaggggacaggagtgatatctgttacagcctcggagtcagggaactggcagcacccacctgctggccgcacttctggggacaagccatggtggggagaggatgtgggggagaagacgggcctgggcattcaggggcctgctccataccagcctctctatctgctccttctttccctgctccagggagatgacatccacctcggccagggctcgtgggtccagacaaataagctctgcaggtacctgggggtgtcacagagggacaggactcagcaaggagccacaggagggtagcaccaaaaagagaagccagggaggctgctgaacccctctacccaagacccccagcatgagacatcaggagagctttctctacctccaaccccaaaccacaccttccccagcagcaggggcctcactctctgcagcaggggaacctcacctccaacaggggcaatctcaccctctccagcaggggggawcctgaccctctccaggagagggaatttcaccctctccagcagagggaaacctgaccctctccagcagggggaatctcaccctctccagcagagggaaacctgaccccgtccaggagaggggaatctcaccctctccaggaagaggaaaccttaccttctccagcaggggggaacctgaccttctccagcagtggggaacctbaccytctccagcasgggggaacctgaccttctccaggaaggaggaacctcaccctctccagsacgggggaacctgaccctctccagcaatggggggrayctcaccctctccagcaggggagcctcaccttctctagcagggccttcacctcccactcctggcgctgcttccggcttctgtatggattactctccaggccatcgaagttgggctcaccggcccctgaagggagggagggagaagcatggagccataaggaagaacctcagtccaacagctccagcccaactaagcccccagttcctggatgtctctggcccaaacttccacccagagktcattcacttcaagccccatcccctggcccactcaccagggaccagcatgctggtgatgcccccagtgtgccccacccccagcacatcttcaaaggggcagaactgaaggccatgcacagggcctgagagccggtgggtgaggtagggctgttcaagggagggtgggctggccttgccctgccctgcccagatgttgacaacgtcacccattcccgccaccagcagtcccctctgggagaaggccaggtgccctgctccatggggcagggtccgagtgctcagaggctggtacgtccctcgcaagtcaaagatcttcagctggtggtctaggccagaggtggccatgtacctggtgagagaagagggatcaattaatatgtcagtaaatgggtttaccaagcaagctgtggccaagtccaggcatcaagtctggctggggagaaaaagattaatagtaataaccactgccatcaccctgaacactccacaggcatcctctcagttaagctgcacacaactcatactatttttatttccctttaagaggtgaggaaactgaagctcagggaaaggaaagctaggtcagtgaatggtcaggcctgtctctttagcatctgcctctaacctgctaacaccacacagccctctcaagacacgggcgtcaaaaggaacgcccacacgacaggctgcacccaaatgtgatgtccccctgtacacacatgcagcacacagcccagcaaggggaaggagcatgtgcagtggtcagaaaggcttcatgggaaaggtgggatttgagccattctagataattctcaaaaaattacaggaagtagatacacagcaggttcaaatgcattaacaccagagtgttgagactgagagggaagcagaggtttgttaggattggtgggaaacatggtcaggaaaatcaggagcagacaatttgtgaggtttctttaaagtcagactgaggacccacagctcatgatcccaacattgctctctggcagtgacaaatcacaaagtgaaggctccaaggacttgagaagacctactcagggaagtggtgaagtaatgcactggaggcccttgccctgcccctctgtgtgctttccctggaaggaaggagggaaggttggtgaccaaatcctctccaggaatcatgtactgcataagttgtttactttcagaagttggagttccttttctttttttgagacagggtctctctgttgcccaagctggagtgcagtggcatgaccctggctcactgcagcctctgcctccctggttcaagtgattctcgtgcctcagcctcccaagtagctgggattacaggcatgcgccaccaccgctaatttttagtagagccagggtttcgccatgttgaccacgctggtcttgaactcctggcctcaaatgacctgcccaccttggcctcccagagtgctgggattacaggtgaggttggagtttctatgttcaagttgttccttagagagggaagctgaagggggaccagccaggtaggggatgtatgtttgccaagaggccaaggagtctcttttttgccttggctgtgaacccaggagaagggaactgaagagttcttatgagcagagacttgcacagtgatggagcccaagagaggaccagctggatacttccgacaagataatcagcgccctgactttaccaaagagaaaggccatcagtgcaaaccaggaattaccgagcgctcgtggaacacagggtcacatcctttggtgaactaacaactcaaggatgcatgctggctcttctcccctccacacacccatctatgggacccctgggtaaagaccagcccagtgccaaatgggagtctactgtactactagtaagcagcagttcggctttgagaagtcaacgcaatccaatcataatacaagctaccagaacacctcttaagaaagatggtcagcctcatcactggagcccccgtggcctgacaagctcctgaggaggaccagagaaaagcagggatgggctgaagatcacaaggaccagagctgtttagcmtcaaggtgttgattaaacttcaggcctcagcgaactagtgattaagccctaagcacaggagtggctgacccaggtagcccacggagggcaagctacagctttggcccagtggcccagagagggcagaaacccttgggcaggccttctgactctcctagagccaggctggtataaatatggagtaaaaagggcagaaccaaatcactcattcacaaagatacaattacaaaggccagacacggtggctcacgcctataatcccagcactttgggaggacaggcgggtggatcacaaggtcaggagttcaagaccagcctggccaacatggtgaaattccatctgtactacaaatacaaaaattagccgggtgtggtggcacacacctgtagtcccagcttctcaggaggctgaggcaggagaatcgcttgaacccaggaggtggaggttgcagtgagccgagaccacaccattgcactccagcctgggtgacagagtgagactccgtctcaaaaaaaaaagatacaattatgcaaaaacagggagcgggtggtggggggggtggtcccagcatcctggagactttgaataagctggtggccaagctggatgtggtggctcacagtaattactctgtaatcccagtactttgggaggttgaggtaggaggaccgcttgagcccaggagttcaagacagagaccagcctgggctacatggtgaaaccccatctctacaaaaaatagaaaaattatccaggtgtggtggtgtgtacctgagtcaaattctgggtgacaggaaaattctgggagatgagagcaggtcaagagaaactttaggaggcggtgacctatccagtgatggacacattgagtctgggatgacagaggataactgtgtagaaactaatggcatcacctgagctaggcgtggtggctcatgcctgtaatcccagcactttgggaggccgaggtgggyggatcacctgaggtcaggagtttgagaccagccaagccaacatggcaaaaccccatctctactaaaaatacaaaaattagcgcatgcagtggcatgcacttgtactcccagctacttggaggctgaggcagaacaatcacttgagcctaggaggcggaggttgtaatgaaccgagatcgcgccactgcactccagcctgggtgatagatcaagactccgtctcgaaaaatagtaataaaataaataaatgcatcacctggccaatcattctcaaaaaccatagccatggccgggtgcagtggctcacgcctgtaatcccaacacytgcactttgggaggccgaagcaggtggatcacgatgtcaggagttcaagaycagcctggccaagatggtgaaaccccatctctactaaacattaaaaaattaactgggcgtggttcgtgggcgcctgtaatcccagctactcaggaggctgaggcaggagaatcgcttgaaccccggggggcagaggttgtggtgagctgagattgtgccactgcactccagcctgggtgacagatcaagactctgtctcaaaaaaaaaaaaaaaatagccacaagtttttatacctaaaggataacgggagcaccacaccagggcaggctcaacgattcatccttttrtctccagaacctcagcgcagagccctgcccacagcaggtgcccagtgaatacctgatgacaaaaggaatcagaggaaaatacaaatcagacagaaaagctgtggaaaatgcagatactccctcaggaacagcagaaatccaaagcagacaccacctccacccctcacatcagccagacctggagagaacgatcatcttgaatgacaatgatgaacacagcrctccctattttgctaagcgctgtgctaaactatatgccttaactcatcttaatgtctacaacagcttatatgagggctttaaaccaaggcttggtaaactactrcccatgggccaaacctggcccatcatctagttctgtatagcccacaagccaagaatggtttttacatttttaagtggttgaaaaaaaatcaaaagaatattttgagactgtgaaaaccgtatgaaattcaaattccaatatccaacaaataaagttttattggaacggggccacactatttacttaatactgtggctgcttttgctctacaacacacagccgagtggtcacgacagcgactacagcatcctgatttgcactgctgctttgtacactacaagtcacagtgacacagtcgtaagtgcttcacagcatttcaagcacctcacatatcacctatcattacctgtgtgaaaagatgttttcaaagatgaaatacttgcaatctctacagatcagcatgaacatgaatatctacagtcaaatttgaccatctggaacactaactttgtacatcaattaggcaaaatgttaacctcaaaaagagaaattcagttcttcccattagtagatctgtattacacaaathtatttgattattattattttttttttctgagaccgggtctcactctgttgcccatgctagagtgcagtggcatgatcacagctcactgcagccttaacctcctgggctgaggtgggaggatcacctcagcctcctgagtagctgggactacaggcatgcaccaccacacccggctaatttttctatcttctgtagagacagagttttgccatgtcatgggtgacatggcttgtttcgaacttctgggctcaagtgatctgcccacctcagcctaccaaactgttaagattacaggcatgagccactgtgtccagtctcatattatgttttgtttgtttgtttgtttttgagacggagttttgctcttgttgcccaggttggagtgcaatggcacagtcttggctcactgcaacccctgcctcccaggttcaagcaattctcctgcctcagcctcccaagttgccggaattacaggcccccgccacgacacccggctaattttgtgaatttttagtagagacagagtttcgccatgttggccaggctggtctcaaactcctgacctcaggcgatccacccgccttggcctccaaagtgctgggattacaggcgtgagccaccgcacctggccatattacgtttaattttataacctaaaaatgtgtgggccaggcgcagtggctcacgcctgtaatcccaacactttgggaggccgaggcgggcagatcatctgaggtcaggagttcaagaccagcctggccaacacagtaaaaccccgtctctacaaaaaaatacaaaattagctgggcatgatggcaggtgcctgtaatcccagctacttgggagactgaggcaggagaatcgcttgaatctgggaggcggaggttgcagtgagccgagatcacgccactgcactccaacctgggagacagagcaagactacgtctctctcaaaagatttaaaaaaaaaaaggtcaggcgcagtggctcacgcctataatcccagcactttgggaggctgaggcgggcagatcacttgaggtcaggaattcgagaccagcctgaacaacatgctgaaaccctgtctctactaaaaatacaaaaattagccaggtgttgtagcaggcgcctgtagtcccagatactcgagaggccaaggcaggagaatcacttgaacctgagaggtggaggttgcagtgagctgagattgcgccattgcactccagcctgggtgtcagagcgagactccatctcaaaaaaaaaagttgtgataatttgttttctcttggtatttaaatgcctacatggtaccctttgattttacctcttatcagcaaatcataaaatatttactatctgactctttacagaaaaagtttgtggacccttgaaatggacactcatatttccattttcggggtcaggaaactgtggcacacagaggttatgaaatatgcctatacttgcaaggcccatccgtggtaacactgcgatttaaacctgggcatcctggctttagactctgtgctcctaaagcacactgccttccacacctttctgcccacctatgactcctaacacctcaccccaccagtgacttacgtgcctgtagaatctactgccacagcccggaccccaccacgatgacagagaatctttgccagtggctccttcatagctggactccataaagacrcagtacctggaagagaagaagaaccaaagttgctaatacacacctaagcctgaggttactaaacatgggaaagatgggaactcaagaccaagagataacaaaaaagggaaataaaagggtaactttaagggactcatgaagtacaaatatagaagaaaagcaagtcaggatggtcagagtcaaaactaagccaggtactgaccattgctgtgtccgagatggatgacggcattgtaagggttctgactcataacatcgagccgcccagctcgagcattcagagctgccacaatcttccccactgacacatccaggtaggttagaaaccctgtttctgactgagagagaaagacagagagaatgacccagtcctgattgccctctgtattccctctgctggggtcctaaaggagaggtggtcatcccaagggcttccamccagttcctgagctccatggccactcacagctgtagccaggaggaagtggaagggcaggaactcaagccgtgttactcggtcacagcggcggatacagtggagctcaatgccctgattgtcatagatgtggagccagcggttctgagcaacagcaagcagtgcctcagaatggagaaacctgggggagaggaagagtggttcaattgggaaatgaggtcacaggctatcattcaatcaggaatggactatctcaccccaactgacygctgacagtgaggccactgaccggatgtcccgcaccgcctccatgacgttgatctcgcacataagcttctttgttacccaatcaagggcagccacatgacctcggcgccctccaaaagccaggtgtctgttggaggtgaggggcaggcagggtgttaaggcaggggaccaccgactcagacaacttgaggtctgccccacgccagccccatctctccaggcgggcagacacatgttgctgtaggtgcttaccctcacacccaagcaaatcgaaggaccctcccctcatcagcaacccaaacatacactgggaatggctgaagtggttaaggaaacacatcttagttcaagagtcactagaattcaaccttaccttccagttcgagagtagtttagtctgtagggtccaaactgccgcagattcaagtcaaagtgctgggaaagagaagagtgaaaaaaaagagtgccctgcagtaacgccttcttctagcccccattcctctattgtcctgcaccaccaatcaatcccttggctcctttacctcctcaggctcaccttggctgcacttgcaatgtccacagcctccacaatgtcagcctggcatatctttgctgtgtcttccccatcctccccttccagaaacctgaaagcaagggttaggatggcagtaaagcttcccaatatgaagcaagtataccaacataaaaacgagaaaagacagtcccawaaggcagggaatgggggtccagattagggctcactcacccaggttcttcagcaagcagcagctcagaacgagcagctttgatacttgtttcctcttcctcagcttcagccacctcaagtcggcttcgagttttggctttakaatgtggtagctgtaacattgttggtggggaggagtggcagaagaaccacaggataagtggggtcacaggagagctacctgtcccagcctccatccaactcacccagacactccctgcctccagcacttcccaactctccggctggacctcacctttcgrgatttgtcaatgcgacagaacttctggaccacttccacagggacgggggcggggcctgggaatggatcttgggyctaggggaaasgaggacgcaattagcagacagccttggattgaccccaaccctctcactctcaaggaacgaggcggcctgcctcgccacccatcaggtcccacgctcaccccggacaagccgcgctgggactccgggttcttccattctcggggtttcttcgggacctgaggcttcttagaratccgagacttctttaagatgtaagcattttttggtctctgaggacggagctcccgattcttcttgttacgaggaggccctggagaggctccggctgtggtcggaacggtctcttcctcccagtatcgccgcggtttctacaggcacatcaggaactccgcactcacgccccgccccccgaccccacagctaaaaacttcgtttcccacccagggaggcctctacctttctcttggtctgaagtttgtctttcttgggcgggacatccttgcccggcttgggggctgtctccatctcgcccacccgaacggcgatccacgtgcaaaactcytctcagctgccacacaktcggcttgaaaactcccggaagccctctgtccttcatccaatcagcagcgtaccaggtatgaagctctctaggtgccatcttgagtgagggcacgctctccttagaggggcggaacagtttttggcaccttatcgcgagcggcagcttatgcaagagtgayttaaaaaagaaaggcaggtccggrgccaggggctaagtagcggtgcggtttctttttctggattagtttccccatcttgcctaaaaatgtcctagtctagtctttktagcagaactccactccctaaacatgtcagaactacacttcccatcaagggtcagaaagaaacttccggcacagtcttttcccagcattccttgtttacttccgggtttattactactgaaggaagaacgtgagtaggttaggatttcggttgagaggcttggggtcttgcgtttcgcccaccatctcctggggacagggtggagtcgatatccgggacgggggggaggttgcggtgcccctcagggctacctctcaagagtgctatcatttccgcaggccagatcagaaaagggagctcaggtaccttccagagagtgagacccagcgcccttgtctcgcacccagtaggctttcatccccgccatggcggagctgatccagaagaagctacagggagaagtggagaaatatcaacagctacagaagggtaagggaacagggtcggtatggtctcgcccaatgcacttacaacccaaagccattaccgagataaggtttgttgccccatctgggccctcgcgtgcagagacttccccgcctcagtctcagtactcttccctgttcactcacccgctgcccccatccttttctgcttcctcagatccatatccacctgactaggattgtggggataggtggcacatttgatgtttctaaatygcctttcctctcatccccagacttaagtaaatccatgtcggggaggcagaaacttgaagcacaactaacagaaaataatatcgtgaaagaggtgagggactgggatttgtggggcgaggagggacctgtactagccatggttctgatcacatatgtcccatccctccatcaggaactggccctgctggatgggtccaacgtggtctttaaacttctgggtccggtgctagtcaaacaggagctgggggaggctcgggccacagtagggaagaggctggactatatcacagctgaaatgtgagtttttattccaccaccgtgtgctgcaccctgtgatgcaagtgaaccattggagtagaggtgttgaaccattgcagaacagctctccatagtggcccctagtcctccagttcctccaaccctttccttcccttttaaccccccttcttctccctcccctggatctcaagttttccacctatctctttcttgcgtttagcactctccatagtragtcctactaatttctccctttctgcttgtctcccttgtctctccttagtaagcgatacgaatcccagcttcgggatcttgagcggcagtcagagcaacagagggagacccttgctcagctgcagcaggagttccagcgggcccaggcagcaaaggcaggggctcctggcaaggcmtgaccccatggtggggggaggggaggggaggggagggaatgaggcagctctaggatctatactgtagctaataaaatgtaaaaacacctggctctgtttcctgaccaggcacttctgtcatatccccacagccccttccaccttaacacacaccacctgtattaccccctcaggttcaaactcttgcacttggaatctctttgtggcacagtgttctttcttgaaagtgaaatcctaaatgtcttcaaacctacttcttgcctgtatatacaacccttaactctccctcatcttggttggcatgattcttttggaagggcatttgcaacataccatattgctaggaatgtcggtttaattgaaaaagaatacacagttctctaacctgaggccccaggatgaaatgtggttaccctccttgccaacagccctggcatctctattagtacttttcagcctctgtcttcctagaatttgcttgaatgtagctttaaactgacttaaaatcccagcatgtaatgctttatggtattataagtcctcccaagtttatatgttgtccataaagttgttctgccatttccttgtcctaaaattgttttatacacatttgcagcaagggaccagtggtagagaggttactggagagaaactgttctgaggaaacttttttcaccaatacctcactttttgctctgttcatggggacagaaaacattgtgccccttcctgttccatggcatctaccttcagccaattccccacccccactcatagcagccagttcatatgtactgcaaggacaggggagtagaattcaggtagtgttttggtttattatcttagtgttgtcacagtgatagaaacccccagagtgggaagaagagctcctgcgaggacctacattttgccattcccctctgccctggggctcagagccttgaagcctttgcttggcccttrcatgttaggatatggccaagaatcagaaactgatgcgtttttccagcactacctgtgtgctgcactcatggaaggtgggaagctatacacaggtatccaacttggttataagacaccagttcccacagggctggatttctcagctgtctggtaaaccagtggcacttcactgccccagggtggctggctccctttctgaatttctgtctcaatgtgatataattgccaccattcaggatggctacccacatctggtatgaacaccatgacttctgtaagccaacggggcttcctcctcagaacagtgcccgtgcaatcttcctccctgtggccttgatcctgggaaaggagccccctcctccctcactcggaggagttcctgaggcagacgggccactggtgacgccaggtgtagcagtagaggaccttcgccgctgccgcaggaggaaatcgtgtgaagctccatccatggcgtagaatacattagccgaggctgggatagtcagctctgaaggttcaggggatggatgtaaagcacacacacagttgttccccccacagccgcccagatgtggaagtactccactctcctcccgagtctgcctttccctcatggcctctgacctcgctccyctggtagcagctgtaccagctcatactctgaagccactgcagagtcacgattgtttttcttaaggacacgactgatgacacttggagccttgtcctggcttgtcacctggcagaacaggagaccaaaagagcaatcartcagccatgatttcccatccttctaccctcagccactgaacccaaccacaaaatgttacttgtgtccaaggctttaaaatgaacaggaaaacccaatatggtggcttcctataccccataagccagcccacatggtgcccagtgaaacagagctgcttccctgtggggaaactgctgttgattctgaaattttaacacggcgaccaaaagtttaaggtgtagcaactaatgcaaaatagccatcaaaataaaacaaatttcagcttctattgaagactagagtttagaagataaaattaaaaataaaacataactgccaaaaccaaaggtcaaaattaaaactacattcaattccatttggctgcccaaacctcagacaacatttatagtccaacaagacaccatccttcaccccaactccatcccaaggctccctcaccaaaatgctcttatagacactgccatcttcccccaactccatctggactcggatgatacggcaatcagaggcccctggcccagatccctctcccccatatccagtccccccggaggcctcttctgcacccccactcagcggggagccacaggaggctgagcggcggtgacctcgagaaggcctaggggaggaggctggtggggagaggtggctgrggtcagctggactgtgcagggatggactgctttccaaggcagagtctagtgacgagacagatggccacttcatgtgctaggaacaaacaacatgggactggcatgaaggcagggaggtttaaggaagaaacatttacagagtgagggtcagcgtcaaggtcagagtcaggagcagagctcacctgggccagccgagtcagcagaggagcaggagttgtaggcgcctcatctcccccagtactgggccggtcacaggacacaagcggggtagggaccccaacagagcccaaaaccctgcagtggcaggagattgggaggatcagagaaaagtggaagtcccaagaaaccaccccccagccagtgaatctctcactctgtccactgcgagatgaccaatgttggccgaagcacccgtggggcaggwgggtcactggaaccrggtggctccacctcacaggatacacgatggctgggttaggggggcaataggcagagctcaggacatgacaccaatcccccacacctggccagaaccctggagtcccaacctcacccgccagtcacctctgagcctctgtmagtggccggagcccctgtagccacctctggatatcatggtcaggttggaggttatagccacgrcattcattctggagccgtcgcaactcagaaaggactgcaaactcctgggaaggagccctcaaactgcaggagccaaaactcagggacccctgacttttccccctccccttcctggaacatggatagggaagtccagcatccagcccagacactccgctcaccttcctccgcttgtcaaaattgatgtatccattctgcgaggaaaatggggatggggtgaargttccaaccctaccttccggccacagagagagaatatcccctctcttaaacacacacagccacatccaactcacaaccacttccctccagcctctctgactcttcgatccctccctgccttcctcctcaatctatcatggcctaagcactccacttgaccctttaaattgaatttctcaggtagacaacgartctgctttgcagaygagaggactggatagtatccaattcgacaggattccttatccagagaggataaggaacttgtccaaggtctcagtatttgtttatttaacaaactctagcaatagagcaggagcccatcacaaaacctagatgtgcttacgtttcaggcacgttctaagcacttgacaaatacaaattcatttaacccttataacagatcaatgtagatgctatttctagtttcccatttacagatcactgaggcgacttggcacagaaacagatctggctctgtcccacactcagctatttgtgccttacagccccttgcaaggggcgggggggtctgtccgaccctgcagcccacttgttacatcattgcaatgacacacacacacaccactgacctccaactcatccttggaggctgcatccagcatcacaaggtccttcaggaaggtgccaaggtatgggaccacaccctgaagtcaggggtcagggtcagaagtgcctgccattgacgtgagggccctccatccctccgcacttgccctcctcattgcctcagagaacagatttcattctcctcacccctctgtgcctcccttacccatccttcaggctgctcccccaaaacatactcctcaccccttcataatcaccacccccacgcccaccaccccgctagtcactcaccccaccccgggagccagacctcggggccttcttggagtgtggctccagaggagactgcagcttcacctcctggtggtgacaaaataaaagagacatgggggagcagtagggaacaaggagaggtgggaatgccacaaaccaggctctcacctgcacgagcagctcccgactctgggaataattatcctcctcggagaaaatctggcagaggctggaaaagactctgaggctgtccctggggaagggagaaaagtggccctgaggacaggcctggctctgtcaccccctcttccccgccttctgaggaacccccaccccagtccaatgcctcagcctccgcacctggttgcttccccccaggctgcccgaagcctgtggatggggctggactgcagggctgacaccacggcataaactgaagagaagtttcggagcagccggcactcctgtgggggtcaaagaagagagctaaggctatgggaggcctctccattccatggccacaaaccgtagggcaatcttctctctcacctctgccacgcggatccacttctccaggagccgggccctctgtgggggacggagtggccgtatggtcacctccccaggtccctctccagtggaagtagcccccaggacagaactaaccactgcccctgccaccttgttaaactgtgtgacagtagctcggacagatgggcagaggtgagaatgtcctggccggtctctgtgaccccacaggcctcccaggcactgagaggggatcaaattgagaaaaagttcctgcagggtagaggtcagaggttaaagttcatagtcaagtgaggtcagccttccaatatcagggatctgaggatctcaggtggccaaggaaccagaggggcacagggtttgaagggtaacgaccaaagggaaaaggggagaatcaaaatggtaggtggaggaggctaggagctggatcaggaaggggtggaagcaaggaaaggatctggagtcaaggagaggttagtaaggggtcagggggcataggggccagaggtcagggtctcaccgcatctagcagggtcagctgttcggccaagtggtcagcgaggaacaccaggacatccgtggggtcagcagggggatcgccggggagggccaggggcttaggaaggtcgggggcctgggggtccacccgggaccggagattgcggatgaggtcagcgctgccccccccaacacccttccctgctgcataccctgtctgaagtaagaagctctcaagccggtcaagctgacccttggcctcagagccaaaatcctcagggtgagaggccagccaggttgacagtacagagatggctaccctgggagaagggaatcagccaagggtgagaggtaaagctgcagcctgggcagaggggactgtgagattaagaaccaggggtcactcactctgttgtcctctctagttcgtcggtaggatgagattcaagggcttccagcctgagggggagaagaggatctatctgtccatttttcccaaaccctcagtggctttgactattttggtgggatgttgcggctttaggaaatccgggcagatactccactaccctgcgtcccttatgactctgacctgtcagccataagccctagcaaggcaggcgtggaggtgaaggcccggtgggtagccaggaaggctgacatgaagctcacatcagtccctgatgtccgggtatccagtaggtgtctgaccagggcctccagagtgccagctcggagccgtcgggaggaacgtgggggaggcatagggacctggagaacacagagagatgatcgctaaccctttctcccactctgcacctagatttctgaggacaatcccagacccaggagatgttccagactcatttttctgatattcagagagggcaagagtcttggcctatgtcacacagcagagtccaggactccagaactccaacctagcactctggccagaaagtcagccagaggaaggaaaactgggaatgaagagtcagaggtgagaagctaaagtcatgatctcaccaagggatcaagaggtcgatattggcggcttgtgacrgtaaacacggcaccatcctcctcctcatcccagacggacacaggggcctggaggagcaaggaaggggaagtcagacagttccacaccaccccccattgccctcagccttcaccccaggccctgctcctccctctgtacccctcacctgtggtggcagggcatagtaccagcgagtgcgaggaagggttgggggagctggtgaccccaggtctcccccactggggcccagacagccccaccccagccgcctcagggccccggtggagtcgaaggggctgcagtggaggcgtggatggagtacaggaattctgatcctggagacccccaaagccccttctccccagagctgaacccacacacgacagagaagcagggtacaaagggcaggagagggaagcgagaggcagcaagccagaggcagcgactaggggtagctgaaacctcagtccaggcactgccgcatgccccgcccctcccggccaaggactataccagcccagagaattagtctttttcaggacccctttcaccctggtccctcgggtagcgcctccactatctcagccctaagggacccccgaaggtagcagctccaatcccagtacaggaaggaaaaggggaagtgggatgatagggggttgggggcggtagactcagagagtcacgtggccccagcccctcccccgaccgatcccgaaaaaccagccctgccagtcaacctgccctcacctaggatctggacctaggagtttagggcctcggggccccaaatccaaattctggcccctcctgaggcccgaaatcctgctcctggccaccaccattaatccctaatgaaaacagatgaccactctctacccaccctaggatctttcctccaggtcccagaaccgtggcttcccggcctctacccaggaccggggcggggcgggggggcggggggaagggggagagagggaaggaggggtcacgaaatctgagggttccctccccaatcccagagtcagaggagctggttactgtggaaacaaacccctccccgccaaacaaaaacaaggagggagacagggaccaagacacgactgctcagagaggtaggcacactcaggcaggcagaggtggagggccaaagacccgcagggacaggacagccagccagaagttccaggcaggaacagggcaggttcctgcgggcaggtcctgagtcacactgacagagaaccacggagacgccaggactccccgcagcagagaaacgggccgacacccagggaggcgcgagaataactgaggcaaggaggaggagatgtagggacccagagacaagagaaaagtggagacttcagaaatacatacgccccctacctcccaccacccgcgtctcacctcttcttcttcctcctcctcttcctcctgccccccgcccacgaccaggccacctgggcccccaccctcttcggggtcccggcttcggaagctgctcagtacgactcccccgggggggctcgtgtccaaaagcagccgcaggggccgcgggagcatggccgagtgaaggaatcagcggggtcgggccatgggggcgcctggggagagacggggtggggtgggggtggagagtcaggcaggcgcgggggaaccgggcagggaagggacgtgggtgggtgtcaagaagaccggaagggagttctgcaggaaggttgggggagggggcaacagaagggtggaataggggggcccttggtgctgttggggaaggaggaggtcacgagtacggggacgcgcagggtgctcaggctctgacctgctcgggaggggtgggggcagcgtgggtcctgagccgctgttgccgtcggtctccggccccggaccgagtcccctccccggcttttccgtacccccttgaacccccccgccgggctcctgggccctcccgccctttccgctcccccccgcgtccgcccgctccgagagcaggagccaaaaggggaaggaagtgaggacaggagccagggccgcggactaggggagcgctggacgctcagggaccaggacccaggcgcccgagtccccagctccactgtcctccgcctctacactcggggattctggagaccacgtcgacccgcaatgaactggaataaagattccagtctccagcccctgggggaaggcaggagcagaatttgacattcccttccccaacaataacacggctaaaactcccgcgggaagcgtttcaggcggagagagagccggtyactccatccccacgggattaccctccctaccacaacccacgaatgtagctgaccgaaatcccggccgggttttccgaagggccctcgattcccgccccctcggcagggggcggggcaggaagcagccacatccggttccagattcggctctcagaggcttccggcgccgagaccgagatccccgtcggctcggtgtatcctcgctggtggagtaccctctgcttgagcgcatctcatgcgccagtagtggcgcccgccccgaacggtgtcgacggggcgttctctgagcggttcagggtcactggaagggaccagaggtgattggaatattcattgagcttggaaaggggttggaatgagagaaccgtttggaagcactggaatacagctttattcctacacgattagacccgttaccccgtggstctggccgaccgtcctgactcggagatccctgagctgcgccgccgyttccttcgtcaacatccagcagctacttgatgagcgccctccagtgggccttaggtccctatgccggcgcggggttacagcagtggacagacaggccrgtccctgtcctcgaggagcccatgatccgcggggagacaggcrtttaacgacgactcacacgatcacttaaatacaactgtggtgaaccgcacaagagggacgcgcggcggtctgcggggaatgacgaggccgacctcgtctgcgacccagggagggcaagggtggaccaggcaaagggaacagaggactgggacctggaggtgggcgggaggcgtttggttcattggaggaaaggaatagccctgtgtgtgatgagcattgagaggaggtctggcgagcaccatctagggctgaagaactaggcagtggctccagcgyggggcggtgggggggacaagtgagccagggcaagaagaatggatttggccctagagtacgggttctccaaatgtaacctcggccctacagatctctgagactatgtcagggggtttgtgagattttataacaaaattaagatgttagtacaatatcgtgtttcgccgccgggcgcggtggctcacgcctgtaatcccagcactttgggaggccgaggcgggcagatcacaaggtcaggagatcgagaccatcctggctaacacggtgaaaccccgtctctactaaaaacacaaaaagttagccgggcgtggtggcgggcccctgtagtcccagctactcgggaagctgaggcaggagaatggcgtgaacccgggaggcggagcgtgccgtgagccgagatcgtgccactgcactccagcctgggcaacagagcgagactctgtctcagaaaaaaagaaaaaaagaaagattatttgcagccgggcgcggtggctcacgcgggtaatcccaatactttgggaggccgaggcgggcggatcaccaggttaggagatcgagaccatcctggctaacacggtgaaaccccgtctctactaaaaaatacaaaatattagccaggcatggtggaggacgcctgtagtccgagctacttgggaggctgaggcaggagaatggcgtgaacccgagaggcggagcttgcagtgagccgagatcgcgccactgcactccagcctgggcgacagagcgagactcagtctcaaaaaaaaaaaaaaaaagttttttgccttcttcattctataagtgtacagtggagtttttcagaagctacatgatatgtattgacaccatggttcccacgatgaatagaatgtgtgcctatgtattctcgtgttttaaatttttctcacttttaagttctagtaccataaatattgatagctataacccacatacccaaaagctttttggggtccttgatgatttttaagaggtcctgagagaaaaaaattttgagaaccactgtcctagagctccaagaaggtgaatgccataagatgtgtgttttttaaaaaagcatttctcgggcctggtgtggtggctcacgcctgtaatcccagcactttgggaggctgaggtgggcagatcacctgaggtcaggaattcaagaccagcctggccaacatggtgaaaccccgtctctactaaaaatacaaaaattcactgggtgtggtggcatgtgcctgtaatcccagctactccggaggctgaagccacagaattgcttgaacccaggaggcggaggttgcagtaagccaagatcatgccactgcactgcagcctgggcggaagaktgagactccgtctcaaaaaaaaaaaaaaaagaaaaattatcccttatataagtgaaagaaaaaaaaaaaagcattccagccactcagtggagagagattggagggattaggagcagatgatagggtattattttagggagctactacagaagcttgggccagagatgatggtggcttccacaggatggcagtgagtgccctcactctgctttctggaagagaggaaggtggtgaggaattcaggatattaaaaggcagttgaggtgtacatggtcagtttagagacatataaactatcatgggcacagatgatgggagaaggatgaggctaatattttctgccctccagacactgtgctgagtgctgtatctcctgcatcttcttaaggagatacactgtcttccttaatcctcctaaaagtcctctcaggctccgctgtccaatatgacagccaccacccacattaggctattgagcatttgatatgtggctagtccgaattgagatgtgctgactatttaaaataaacacctgtgtttgaatacttaaggtgagaaaagggctgcaatttattttcttttctttctttttttttttttttttttgagacagggtctcactttgtcacccaggctggagtacagtgggacaaccttrgctcattgcagcctcaccctcccagattcaagcgatccttctgccacagctccccaagtagctgggactatagctgtgtgccaccatgcccagctaatttgttttgttttgttttgttttgttttttgagacagagcctcactctgttgcccaggctggagtgcagtggtgcgatctcggctcactgcaacctccacctcccaggttcaagcaattctcctgcctcagcctcctgagtagctgagattacaggtgtgcaccaccatgcccggctaatttttctgtatttttagtagagacggggtttcaccatgttggccaggctggtcttgaactcctgacctcaggtgatccgccctcctcagcctcccaaagtgctaggattacaggcgtgaaccaacgcacctggccaagactgtaatttctttttcttttttttttgttgttgagacgaagttttccttttgtcacccaggctggagtgcaatggtgtgatctcagctcactgcaacctctgcctcccaggttcaagcgattctcctgccccagtctcccgagtagctgggattacaggtgccgtcacatctggctaattttttgtatttttagtagagatggggtttcatcatgttggctaagctggtcttgaactcctgacctcaggtgatcctcccgcctcggcctcccaaagtgcagggattacaggcatgagccatcgcacccggcctgtaatttcttatattgtttacatgttgcaataatattttggatgtacaggttgagcatcgccgatccaaaactctaaaatctgaaatgttccaaaacctgaaatttttttagtgccaacatgatgccacaagtggaaaatcccacagctgccctcatgtgatgggtcacatatattattaaaaatattgtggtcgggtgcagcggttcacacctgtaatcccaacgctttgggaggccaaggcagcgggcggatcacctgaggtcgggagttcgagaccagcctgaccaacatggtgaaaccccgtctctactaaaaatacaaaaattagccaggcgtggtggtgggtgcctgtaatcccaactactcgggaggctaaggcaggagaatcgcttgaacctgggaggtggaggttgcagtgagccgagatcgcaccattgcaccccagcctgggcgacagagactctgtctcaaaaaaaaagagaaggaaaaaaatcttcaggccatgtgtataaggtgtataggaaacataaatgatttctgtgtttagatttgggtctgatcccaaagatattaaatatatgcaaatattccaaagtctgaaaaaatccaacatccaaaaacacttctgacccaagcatttcagataagggaccagaattattagattaaataaggtatattattaagttaattttacctgtttctgcttatttttttaatgtgagtactagagtatttaaatttacatatgtggcttgcattatctttctattggacagcactgcctaagtaactttttaaaatccctacacccaaggaaacatatagattaagtagcatgctcaaagagtcctacagttaggatatagtgccaggttttaacccagatcagtgtgaattccaagcctaggttctgcctaccacaccagcagcctccctccatgggttttgagataggatgaggagataaagtgacaagggaaagatacagagaggtggagcactgtaccttctttgaatccttgcaggtggacaggtagacagctgtggggaaagattgagaagggatgggatgctggagtggtagaggtggagggcagagggatgggtgtcaggctcttgggagtaggtggggaaagtccaccaacctcaggtcatggtcagggtagggctgacacttaccagcccagcccagtgccttgaagagcccaagcagaagaaaggcagacaggaaaaggcctacgctgtcctcaagggagggccctgaaagacctggcaggcagaaggggtgagagtgagctcctgtcttcctgggtgctggctcagattccgcagagctcccagctcttacctgctacctccagggtgacctcagcgctgcgccccgaggcaggcaggctgggatggtgaattcgacaggcatagcgtgccccatgctgctcagtggtgactgggggcggctgcaagtgcccagagaggctgacagagccatcggaatggtggcgcagggccgagagccacctctgcccctcggccttctgagagcggccccctgggccaccccggagttcccactccacctccaggcccccagaagggtagaagtgggacacaaggcagagcaattccgggggtgcctcccctggggcggcccgtgcaagggttgctggcatcagggacactttggggggttctggggaaagaggacgaaatgagcatagggaaatcagtccatactgtcctccctaagagaccctcagtttgcctgctggcttcctcagaactaaagaaggttaggtttcttctcctgaaatagggaacccactgtctctccattggtgcgtcacagaaatacccatgtcaaagcccctcaaatttccaggaaacttctagcctcccattacccctctaactcccaggaacctctttctatctctacttacttgcccaggcaccctcttatccatcatccctccccctattacggtccccacaatccagtgcccaccctctacccctggagacctctgtcccccaactcactgtacacagcaagctccagggtgacctgtccttgcaggtatggcaggtgtatggtggccagataggtgccctcctgaaagggttgaactgtaggcagccagaaggtcccatttccggtccatgggccccatggctcatcatcatcccaagcagcaaatgccacggccccttcttgggctgctggcatctggccattcagcccaggagttgcagccaggagcagatgtcccttacccaggtgctggcgtcgccactctagcccaaagggagggggacccggagccagagatgaggcggcctcggaggtggggggcatgtaggcaaagctcaagtccagcagagcatcttgtcccagtctcactcgaggggcaggggtgtgggtgaggacagtcagtaccactgaggaagacagggagatgaggggttgggaggggcatgagggagagaaagaaggagaaaaaaatagagaaatgcagttattggggagggctaaactgcagtttacccacccctcagaggacaccttttctgatactcaccatttcctagccctccctgcaaactccttttgctctgcgactgggtggcacctagtgtggctgagggtgagcagagaggtctaggggtggtgagtaggggcaatgagggggtatggcctttgaagcctactctgaacacatagcacactctagctcgggggactgcagaatccgaggccacttctgacacaacctgaaccactctatctccaagcaccacccttgaggaaccaggcctttcttgattacaggcgaagacaatgattgagccatgactgtcagtcttgtggtgctgtacagaatatttactgactctagaaggttccagctctagcctagacctgagcacagacctctatgctctactgaagcagtacagtgcagtggctaagtgcctggagcctggctgaccgggttcaaatcccctctgcagcttatttatatggccttgggccacttcctttttccatggctcagcttcctaatctctaaaattaaaagttgatgataataatagtacctacttcatgaggttgttgtgatggttaaatcattaatacctcttgctactcaagtctattcagttcccaattttagataacagagacacctacccatgaagggtgcttacaacactgtctggaacacagtaagtctacacgtgtttgctatagttacacctaacttagcataccccaagtcaacagcatctctgcaacattccccaccctgctccaatgcccatcttccctgtctttgatgaatgatcaccaagcccgccagacactaaaagcaaacccttggagttactcagactcatttattcattcagcaactattgagcactgaagatgttcaaggtatcctggtagaagacagaatggtgaacaagacaagcagtccctgctctcaaattgcctatagtccaatgacagacaagcaaattgtcaaaaataatgtgctatgtgctatccccaccaggacctaacagatctcacatctgtttccaatttaggttctcatcaatgtacgtttagacaattacaacagccctcctgtctggtctccctattctcagtctctccttcaactccttcttcacactgtagccaaacaaagtgactacaagtctgatcccatcacctacctgtttaaaaatcccaaatatgggccagacgcagtggttcatgcctataatcccagcactttgggaggacgaggcgggtggatcacctgagttcgggagtttgaaaccagcctgaccaacatggtgaaaccccgtctctactaaaaatacaaaattagcctggtgtggtggcacatgcctgtaatcccagctactcgggagaccgaggcagtagaattgcttgaacccgggaagcagaggttgcggtgagccgagattgtgccattgcactccagcctgggcaataagagggaaaccccgtttcaaaaaaaaaaaaaaaaatcccaaatacggccaggcgtggtggctcacacctgtaatcccaacactttggtagcctgaggcgggtggattacctgaggtcaggagttcaagaccagcctggccaacatggcaaaaccctgtctctactaaaaatacaaaaattagccaggtgtgggggcaggcacctgtagtcctagctacttgggaggctgaggcagaagaatcacttgaacctgggaggtagaggttgccgtaagccgaaatcatgccactacactccagcctgggcaacagagtgagactccgtctcaaaactaaataaataaataaaataaaaatcccaaatacctaggaagtcagctgataaaggcataggctgaagctatatggcctgggttcaatttctagccctgcttcttttttttttttttttttttttttttgagatagagttttgctcgtcacctaggctagagtatagtggtgtgatcttggctcactgcaacctctgcctcccaggttcaagtgagtctcctgcctcagcctcctgagtagctgggattacaggcgtccacaaccgtgcccagctaatttttgtatttttggtagagatggggtttcaccatgttgcccaggctggtcttgaactcccgacctcaggtgatccgcctgctttggtctcccaaagtgctgggattacaggcatgagccaccacgcctggcctctagctctgcttcttacacactgtgtgtccttgggcaaattatttaactggtttgtgtcctatatttatccatatgcaatacagggataatattaaaacctacaacctatggttgttgagaggaataagtgagattatgcatataaagtgcttagaacagggcctggcatatagaaaatacttgataaatgttagctgttactattttcattaccttcatcactatcatggacttgctggttaacttggaaaaatcatttaacctgtattttcctcactagtccaaagatctgacctttgcctatcttttaaaagaatcaagtaaaataacaggctttttccgggcatggtggctaacacatgtaatcccagcactttgggaggctgaggcgagtggattacctgaggtcaggagttcgagagcagcctggccaacatggtgaaaccccatctctactaaaaatacaaaaaaaaaaaaaaaaaaaattagcggggcgtggttgtgggtgcctgtgatcccatcaacttgggaggctgaggcaggagaattgcttgaacccaggaggcagaggttgcagtgagccaagatcaccccattgcactccagcatgggtgacaagagtgaaactccgtctcaaaaaataaatatgtacataataaaaacaggctttttagaataacacgccctccaaaagaacttctgatggttcgctctcacctacagaacaaagcccagctttcaaggtatttgaacattcagcccctaacccacccttccaggcttctcctgcaccctacaaaccagccacatagaacccctttcttgtgcctagtagaagtggtcatcattggtcat
